United States Patent Application Publication US 2008/0050393 A1 - sequence listing, part 49

SEQ ID NO: 155896 - DNA, 3190 bp, Homo sapiens
tttaaagaccccgaagcagtcagagctctgacgtgtactctcctaagggaagattttggactttctattgatattccattggagagactaattcccacagttcccttgagactcaactatattcactgggtagaagatctgatcggtcaccaggattctgacaaaagtactctccgaagaggaattgacataggcacgggggcatcttgcatctaccccttacttggagcaaccttgaatggctggtatttcctcgcaacagaagtggatgatatgtgtttcaactatgcaaagaaaaatgtggaacagaataacttatctgatctcataaaagtggtgaaagtgccacagaagacactcctgatggatgctcttaaaggtagtatctgagtataatctatgactttttgcatgatgcaaccctcccttttttgccaatcaaattggaagccaagtggagtaaactcacgaaatcctcgaagacctccgcctagttctgttaatacaggaggcatcacagagatcatggcagaaggaggtgaattagagtttgttaaaaggatcatccatgacagtctacaacttaaaaaaagattaaggattgatatggcagccttgttgattggtgtctgctctgaggtctcagggagaaaagattggatccagcagcttgcgccacgatggtatagctgcatgctgggaaagaaatgcagcctggcgcctctgaaggaggagcttcgcatacaaggggttcccaaagtaacgtacactgaattctgtcaaggtcggacaatgagatgggccttagcttggagtttttatgatgatgtcacagtaccagtacacgaaggacgtttagcagttggaggagttacatctgatagccagaacaaaggcagtgcgtcaccaccaagtaagcgaagaaaattagagaaaccgagaaaacccataacattcgtggtgctggcgtccgtgatgaaggaattatccctcaaagcatcacctctgcgctcggagacggcggaaggcatagtcgttgtcacgacatggattgaaaaaattctcactgatttgaaggtccagcataaacgagttccctgtggaaaagaggaagtcagccttttcctaacggccatagaaaactcctggattcatttaaggagaaagaaaagagagcgtgtgagacagctgagagaagttccccgagctcctgaggacgtcattcaggccttggaagagaaaaagcccacccccaaagagtctggcaatagccaagaactggccaggggcccccaggagaggaccccctgtgggcctgctctgcgggaaggcgaggctgccgctgtggagggcccgtgcccgagccaggagtccctgtcccaggaggaaaacccggaacccacggaggatgaaaggagtgaggaaaagggaggggtggaggttttggaaagttgtcaaggctctagcaacggagcccaggaccaagaggcttctgagcagttcggcagcccagtggctgaaagggggaaacgtctcccaggagtggccggacagtacctgtttaagtgtttgataaacgttaagaaggaggtggacgatgccttagtggagatgcactgggttgagggccagaacagggatctgatgaaccagctttgcacctacatacgtaaccaaattttcaggcttgttgcagttaactagaaacctcctgcacagttggaaacgtgttgatagtaacttgctttggagtggcctgtggggtggcaagaggaatcctaccagcggcccattagtagcacgatgtggaattatcttcgaaaacaaaaacctatgaatctgtcccccacccccccccgcctccttcccgctttttgagttacagggagtcgtagtgtggtcatttacaaggaggaattgtggtcatcagtaacaacagaaagccctcagtaaactcccgagggattgcaagctggctcaagctggcccctcagctctgggactgcctctgcaaggtcagaagggttgtttgtgggagtctgggctgggcagcactgcctaggaatatcatgctgttctcttgttcacccaagggtgtttctttgagggaggggtgggctctctttggcctccagctggaagccctgggtaaccctgttctaggtcactcttcaagatggggcctaccttgcatcaatcccacgaagggagctgtatggtgggtggtggggaaatctgggagagaaaccttagtaatgctgggaaggagcagcagagtctggggaccacccggtaaatggcacatacctgacacctggctgttttgatgttgcttatttcagaagcagaattaggtaagcaaaactccccggtgtgactgagacacacagaaggcacccatacccccgcctccagcctgttgacagtaccattttgtagcagttttactactgtgtgatttttgtttggacatctgaagtagagcttgttttgtttttaaataagaatattcacaaattaaaaaccagcggtcctatttgaatcctggggttagctgagtgagcggctgatgatagaaatgagaaatagaacaaaatagtatgtgccgtaggtagcttaagaaagtctcagatattttgttgctgatcaaatactgtttttttgtggcttcacttgtaatcccccctgtacttacctactcacattggagagttctgaggccggagtaactgtgtccttgaaacacgtttctaattggaatgccagggttcagtagccgtccccccggaaaggggtgaccttttgctgtgcttgatgttgcatcagcagcctagggttctgtttagactaaaatcttggccagagctccttgccatctgctaagaagactggggctgagtagttaagccagccttctgagaggtggctgttggtcaggacgggaagctggtgaccttggcatgtcttggcagcagctagatcaggccctcggcagagacacaggaagcggaactgctgtgccttaacttggctgtggagctggagctggagaaggcagcatactgaccagtggctttttgattgattgtttgttatgaggtggagttttactcttgttgtctaggctggaggttgcagtgagccgagaatgccactgcactacagcctgggcgacaaagtgggactgtct

SEQ ID NO: 155897 - DNA, 1147 bp, Homo sapiens
agccgtgcctcgggtggagggtgggacacgctggcggtgaactgcagcttcagtttcatgtgctggcttagctcgaagagccccgtcctcagagcctggaaggccacactgaaggtgagcgcgctgcccttccgggaaaagccaaggttgttgaggggcgtgtggcagacgacggagtcccagggcagcctgcatggcccggcgctcctcctcacacagctgctttccagcctgtgcatgctctggggtccacacgagcctcacagcaaggaagtcttggagattgttaagcagcgtgtaggtgacagtgaaaagctccgtaggtcccgaaacaggggacttaacaagaacggtcatcaacaaaacacgggcggtcccaagcggacactgggcaggcggtagtgggtgtagatgctctgagtgaagggcagctttggggtagaccactgaaccacagcaatcaggggaacttccaggccctccttggcccctggagggggctgctcaccccctctcagctgaaacaggaagttgtgttcctcccagggcattcagcgggcaggggaagcagcccagaggtcccgggtaggcggcagaaggaccccatggagactttccccagactggtgacagacattgtccacccagcagcacagagccatcgggcatgacaggtagataactggcgttgaagttggggaggattcggatatcccagatggagatttcctcctgagaggagctgttcagcaccttgagcacggtcaagtgttttccagccacagtgaactgccggcatctcagaaccggagggggcagcagagtcagcagcgtgctcacttgggccttgaaagcgctctgctcgccccggaatgtctccccaggagatcgggtctgcagcaatcgcaggtagccttgatctctgacctctggtgcctcaatctcccgcttccacacagtcactacaatcttggccttaggtgtccctgggggcagtctatccagtgaaacggtgagtgggaagatgacctcatctgtggacacaatcggttcctccacaggcagctggggttgggaaaggggtgaagaggtcaggagcaagtcagaggcagcctgcagcctttccctttaagaccggcagttcatc

SEQ ID NO: 155898 - DNA, 373 bp, Homo sapiens
cctgctccaccarcctctccatccactctactatcccactgtcatggtgggtttaacatttgcctgctgcctgctctgcctgctttctttacattgggtgggggaaaaaaattcctctttgaaaaagtaaagattttaccacagtaccattatactctgccccatacacatcctttttcttttttctttttaaaccaaggcaataagtgaaaaggaatctgagtttccttctattttttcaccatcaattattgctgattttccggcctcttcttggattttatctcctttctaggacctatgagtggaatgggcatgaatatgggcatggatgggcaatggcactacatgtacccttcatcatgtaaagcaa

SEQ ID NO: 155899 - DNA, 339 bp, Homo sapiens; identical to SEQ ID NO: 119667

SEQ ID NO: 155900 - DNA, 2609 bp, Homo sapiens
ggcgcgcacgccccgcaccccaatgtcatgccggccagtatgggatccgctgtcaacgacgccttgaagcgggacaaggacgcgatctatgggcacccgttgtttcctctgttagctctggtctttgagaagtgcgagctggcgacctgcactccccgggaacctggagtggctggcggagacgtctgctcctccgactccttcaacgaggacatcgcggtcttcgccaagcaggttcgcgccgaaaagccacttttttcctcaaatccagagctggacaatttgatgatacaagcaatacaagtactaaggtttcatcttttggagttagaaaagggccacgaactgtgcgataacttctgccaccgatacattagctgtttgaaggggaaaatgcccatcgacctcgtcattgatgaaagagacggcagctccaagtcagatcatgaagaactctcaggctcctccacaaatctcgctgaccataacccttcttcttggcgagaccacgatgacgcaacctcaacccactcagcaggcaccccagggccctccagtgggggccatgcttcccagagcggagacaacagcagtgagcaaggggatggtttagacaacagtgtagcttcacctggtacaggtgacgatgatgatccggataaggacaaaaaacgccagaagaaaagaggcattttgcccatagtattccctatatatcatgagagcatggctcttccagcatctcacacatcctgtacccttccgaagagcagaatatacagttagcgcatgacacaggacttacaatttttcaagtaaacaactggtttattaatgccagaataggaatagtacagcccatgattgaccagtctaatcgagcaggttttcttcttgatccttcagtgagccaaggagcagcatatagtccagagggtcagcccatggggagctttgtgtttggatggtcagcaacacatgggggatccggcctgcagggacctatgagtgggatggggcatgaatatgggcatggatgggsaatggcactacatgttaaccttcatcctgttaaaggcattcgcaaagcaagggggaagtttgcagagcatggccaggggactacgtttctcagggtggtcctatgggaatgagtatggcacagccaagttacactcctccccagatgaccccacaccctactcaatttaagacatgggacccccaatgcatttcatattttgccaagccttccccaccacccaggccttgattgattgcacggggggaccccttaccccacctgggattgattatgttaggcacagagccccacaatgttaaattctgtagatcccaatgttggcggacaggttatggacattcatgcccaatagtataagggaactcaagggaaaaggaaacacacgcaaaaactattttaagactttctgaactttgaccagatgttgacacttaatatgaaattccagacagctgtgattattttttacttttgtcatttttcatcaagcaacagaggaccaatgcaacaagaacacaaatgtgaaatcatgggctgactgagacaattctgtccatgtaaagatcctctggaaaaagactccgagagttataactactggtaggtataaaatataggaactaaggttaaacttggtacatttctgttgatcacgccgttatggttgcctcaaatagttttagaagagaaaaaaaaatatatatccttgttttccacacctatgtgtgttggtccccaaaagaatgactgttttggttcatcagtgaattcaccatccaggacgagactgtggtatatattttaaacctggttgggcccatgagaaaagaaccacactggagatcatgatgaacttttggctgaacctcatcactccgaactccagcttcaagaatgtgttttcatgcccggcctttgttccccccataaatgtggcctttagtttcaaacagatcctttatagttccgtgcttccataagccaattcttattattatttttgggggactcttcttcaaagagcttgccaatgaagatttaaagacagagcaggagcttcttccaggagttctgagccttggttgtggacaaaacaatcttaagttgggcagctttcctcaacacaaaaaaaagttattaatggtcattgaaccataactaggactttatcagaaactcaaagcttggggggataaaaaggagcaaagagaatactgtaacaaagttcgtaccagagttcggtctattaattgtttcatgttagatattcctatgtgtttaccctcaattgaaaaaaaaaaaaagaatgtttttgcctagtatcagatctgcctgtggaattggtattgtatgtcccatgaattcttcttttctcagcaacgtgttcctcactagaagaaaatgctgttacctttaagctttgtcaaatttacattaaaatacttgtatgaggactgtgacgttatgttaaaaaaaaaaaaggtgttaagtcacaaaaagcggtaataaatatttcatttttgatttttaaaaaaaaaaaaaaaaaattcctgcggccgcaagg

SEQ ID NO: 155901 - DNA, 2262 bp, Homo sapiens
ctaccatgagacctgatatagataacagccaagctgcgcaccagcctccaggccgcctgccaaacagcagaaaattaaagaaaaccagaagacagatgtgctgtgtgcagacgaagaagaggattgccaggctgcctccctgctgcagaaatacaccgacaacagcgagaagccatccgggaagagactgtgcaaaaccaaacacttgatccctcaggagtccaggcggggattgccactgacaggggaatactacgtggagaatgccgatggcaaggtgactgtccggagattcagaaagcggtcggagcccagttcggactattatctgtcaccagccaagcaggagccaaagcccggtcgaccgcttgcagcaactgctaccagcctcccagtccacacagctgccatgctcaagttcccctcaggagaccacccagtctcgccctatgccgccggaagcacggagacttattgtcaataagaacgctggcgagacccttctgcagcggtcagccaggcttggctatgaaggaagtggtcctgtactgcttagagaacaagatttgtgatgtaaatcatcgggacaacgcaggttactgcgccctgcatgaagcttgtgctaggggctggctcaacatttgtgcgacacctccttgaatatggcgctgatgtcaactgtagtgcccaggatggaaccaggcctctgcacgatgctgttgagaacgatcacttggaaattgtccgactacttctctcttatggtgctgaccccaccttggctacgtactcaggtagaaccatcatgaaaatgacccacagtgaacttatggaaaagttcttaacagatttatttaaatgacctccaggggtcgcaatgatgatgacgccagtggcactttgggacttctatggcagctctgtttgtgaaccagatgatgaaagtggctatgatgttttagccaaccccccaggaccagaagaccaggatgatgatgacgatgcctatagcgatgtgtttgaatttgaattttcagagacccccctcttaccgggttataacatccaagtatctgtggctcaggggccacgaaactggctactgctttcggatgtccttaagaaattgaaaatatctctcccgcatatttcgctgcaattttccaaacgtggaaattgtcaccattgcagaggcagaattttatcggcaggtttctgcaagtctcttgttctcttgctccaaagacctggaagccttcaaccctgaaagtaaggagctgttagatctggtggaattcacgaacgaaattcagactctgctgggctcctctgtagagtggctccaccccagtgatctggcctcagacaactactggtgagcaagctggacccaccatgtacagtgtgttatagtgttaatccttgtgcatatgtgtcataatacacctatttctgtaaagaaagggcactattacatattaaaatatctcttctttatataagagaaattactccagtcagaagggcttagaaacatgtttttttcctttttaacttttaagtcagtttttatgaagttggtataatgtttcttttcttttcaatgcacacatactttggcatacgttttgtttttacttggaacatttgtttcttttcttttttaaggagaaaaaaaaatgagtaaaaggagctccacactttgacttaatttcatacaaagctctgatgacaggccatgactgtagagtggtcagaactgtgtggttggtttgagggagcgaattcggggaaaggcacttggtgatataactttgttttgtttaccagaggtacctgctcgggccaggtaaaatgctattggatgtaatcccagtagtgtgtaaatataaattcaaaccatatcccacacacaacaactaattgtatgaaactttttatatcctaatttaaaagctgtgaaattagttttcacgcatcaaaccggattgtttatatgtttaaacattttatgctcttatttaaagaagactttgagctatttttttctgtaccctgtaaaatattgaaaactaacataatatgttgaggttgcttggaaatgtacataaaactaaaatttttctgaatcgtgtgtttatgtttgaaatctgtgttttaactttgtaagtaaattctctgcctttgtatttatattttacaaaaattttcttaaaaggcaataaaactgttgaggaaaggagaaaaaaaaaaaaaaaaaaa

SEQ ID NO: 155902 - DNA, 1125 bp, Homo sapiens
  misc_feature (1)...(1125): n = a,t,c or g
aagctactcaggtggctgagacaggaagaattgtttgaaacctgggaggtggaagttgcagtgagctgaaatcgcaccattgcactccaccctggatgatagagggagactccatctaaaaaaaacaaaacaaaacaaaaacaagaaaaaggaagccacagggatcccactcccactgtcaggaggtccagactgggtgtagcaaaattgtgaagtcagccaagtactacctatatcccacttccccctcctccaggatatactcccaccactgccctatttgggggcaaatggccaggcaggggagcagggggcgactgatggacattagccactactacagagtcacatagagccagtgtggggtgcaggatcccatggctgtgtcagagacccctagctctggccctcagtttcttcctctgtgaaatgcgaactattccataggtttcttttccctgactgttgaaaagatgagaaactgtgagcctgaaagtgctcttgccatgacagatgaaatgcaagcctcagagggagaactgttatgtccattcttagcaccaggtaggcccattcctggtcggggactgcccccttctcactctcagggtggggcggaatgcagctggcccctctccccagaggagcccctggcactcatcctgtgaaccagagccctatcgctgatcagcaccaaatggctgaggatttcctggggctgatagaggggctcagacccttggttctcagaccccctgtgcccctggaaaatccactggacatctgggttgaggccacactgaccacaaggcatgtccagtgccttcagtttgtcaagtgctttcacagtcaccatctcgtcggagctccacagcagctggtgaggtaggtgaagactaccagtcccattatacagaggaggtagataggctcagagaggcaatcggacttgccaaggtcacacagttgctagctagcagagccaggcacagcctggaaatcactaattcttgggggcagagtagcacaggctttgtggctttgggccaggtactgagctactttgaccctcagtcataacaaatgaaaaatggggataggtgggggcacangtgtcacgcctgt

SEQ ID NO: 155903 - DNA, 702 bp, Homo sapiens
tgagatgagttttgctcttgttgcccaggctggggtgcaaaggcataatctcggctcactgctacctctgcctcctgggttcaagtgattctcctgcctcagccttccaagtagctgggattacaggtatgcaccacccacgcctggctaatttatgcatttttagtagagacggggtgtcttcatgttggtcaagctggtctgaaactcccaaactcaggtaatctgcccacctcagcctccgaaagtgctgggattataggtgtgagccattgtgcccagccaggcacggccactcattctaatactgtcttgtcaggccttttctgttgacttcaatcccacagttgtggttttctgtcttctagttttctctaaaattcaaataaatgaatttaaaagttttcctgtcagcctgattatccctatagccagcgaaggttttcagagaatggggatagaatggagaaaaaaggggagtggctccaacctacctccagatgattctgacaccaaacataggtcctgccctgtattcttcccagcagacccgaggtcagcagatgtgtcgccacccaccaagttcataccctggctcccaacttgtcagcagagccaaggaacaagcattaagggaaggcagtagagactttcatctactatagggaggacattacccatcagtgcatttcctgtccttgc

SEQ ID NO: 155904 - DNA, 593 bp, Homo sapiens; identical to SEQ ID NO: 151947

SEQ ID NO: 155905 - DNA, 594 bp, Homo sapiens
  misc_feature (1)...(594): n = a,t,c or g
gatgcttatttcctctgccttccttggctgcccacatggatgcctaagtgttcttctccgggatagagtgtcctccgtgcacatgctgaagagttgtctttcttgacgtaggccagaggcattgatgtgcagcaggtttctttagtcatcaactatgaccttcccaccaacagggaaaactatatccacaggtaagcgtagatctggaacactcccctaccccttcacacctggccctccctgggcttaaagctcctgatattcctcatccccttccttgttttccagaatcggtcgaggtggacggtttggccgtaaaggtgtggctattaacatggtgacagaagaagacaagaggactcttcgagacattgagaccttctacaacacctccatttgaggaaatgcccctcaatgttgctgacctcatctgagggggttgtnctgccacccagccccagccaggggttcaattttctggggggctgaggagcagcaggaggggggagggaagggagccaagggatggacatcttgtcattttttttctttgaataaatgtcactttttgaggcaaaagaaggaaccgtgaaa

SEQ ID NO: 155906 - DNA, 1020 bp, Homo sapiens
  misc_feature (1)...(1020): n = a,t,c or g
ggaattccaacgtggaacgagaggagtggaagctggacacactatgtgacttgtatgaaaccctgaccatcacccaggcagtcatcttcatcaacacccggaggaaggtggactggctcaccgagaagatgcatgctcgagatttcactgtatccgccatgcatggagatatggaccaaaaggaacgagacgtgattatgagggagtttcgttctggctctagcagagttttgattaccactgacctgctggtgagtagagggaactgatagcaaaggcagaagggaggatccaaggtgattccctctccaaggggacatcagtgcctctcaggaaagtagcagcttggaatataatctggcatgcctaaggcctttggggaactgggatgcttatttcctctgccttccttggctgcccacatggatgcctaagtgtcttccctccgggatagagtgtcctccgtgcacatgctgaagagttgtctttcttgacgtangccagaggcattgatgtgcagcaggtttctttagtcatcaactatgaccttcccaccaacagggaaaactatatccacagaatcggtcgaggtggacggtttggccgtaaaggtgtggctattaacatggtgacagaagaagacaagaggactcttcgagacattgagaccttctacaacacctccattgaggaaatgcccctcaatgttgctgacctcatctgaggggctgtcctgccacccagccccagccagggctcaatctctgggggctgaggaacaacangaggggggagggaagggagccaagggatggacatcttgtcattttttttctttgaataaatgtcactttttgaggcnnnnnnnnnnnnnnnnnngggggggccgttttaaagaacccttgggggggccaaattttaccggggatggcgagggaatagttttttccttatagggggccatataaaaacctacctgggaatctttggaaagaaaccttacttctggggggagacaac

SEQ ID NO: 155907 - DNA, 1838 bp, Homo sapiens
atgtctgcgagccaggattcccgatccagagacaatggccccgatgggatggagcccgaaggcgtcatcgagagtaactggaatgagattgttgacagctttgatgacatgaacctctcggagtcccttctccgtggcatctacgcctatggttttgagaagccctctgccatccagcagcgagccattctaccttgtatcaagggttatgatgtgattgctcaagcccaatctgggactgggaaaacggccacatttgccatatcgattctgcagcagattgaattagatctaaaagccacccaggccttggtcctagcacccactcgagaattggctcagcagatacagaaggtggtcatggcactaggagactacatgggcgcctcctgtcatgcctgtatcgggggcaccaacgtgcgtgctgaggtgcagaaactgcagaatggaagctccccacatccatcgtgggtacccctggccgtgtgtttgatatgctttaccggaagataccctgtcccccaaatacatccaagatgtttgtactggatgaagctgacgaaatgttaagccgtggattcaaaggacagatctatggacatatccaaaaggctcaacagcaccaccaagggtagttttgctgtcagccacaatgccctttgattgtgcttgaggtgaccaagaagttcatgaggggacccccattccggattcttgtcaagaaggaagagttgaccctggagggtatccgccaggttctacatccaacgtggaaccagaggaattgcaacttggacacactatgtgacttgtatgaaaaccttgaccatcaccccaggcaagtcatcttccatcaaccacccggagggaaggtggactggcctcacccgagaagatgcatgctctgagatttcactgtattccgccatgcattggagattttggacccaaaaggaacgtagaacgtgattatgaagggagttttcgttctggctcctaaccagagttttgaattaccccactgaccctgcctgcccagagggcatttgatgttgcaagcagggtttccttttagtcattcaaacttatgacccttcccccaccaaccaggggaaaactattaatccacaggaatcgggtcgagggtggaccggtttggccgtaaaggtgtgcctattaacatgttgacagaaagaaaacaaagaggaatctcgaggacattgagaccttttaacaacacctccatttgaggaaatgcccctcaatgttgcttgacctcatctgagggggctgtcctgccaccacagccccagccagggtctcaatctctggggtgctgaggagcaccaagggggggcggaggggaaggagcccaagggatggacatcttgtcatttttttttctttgaataaactgtcactttttgaggcaaaagaaggaaccgtgaacattttagacacccttttctttggggtaggctccttgccccaggcgccggctcttctcccaaaaaaaaaaaaaaaaaaacactaatccatttccctaacctagtaacctccagatcccagaggctctcctcacctcagctgagctcctttgaaagtgattcaagggactatgtcactcagcctcatttgctggaccaaatctggagggagaacccctaaaacccctaagtgaggttgcccagggggttgctcccaggtggggggaagcaggggagagaaaatggtagccatttttacatggttttgtatagtatttattgattcaggaaacaaacacaaaattctgaagtaaaatgacttggaaactgccaaaaaaaaaaaaaaaaaac

SEQ ID NO: 155908 - DNA, 498 bp, Homo sapiens
  misc_feature (1)...(498): n = a,t,c or g
ntatgnaattgggctgttgnaaattcgnacagnaaatncttttggacccaaagncaccctagtgtagnctactgccttggtgaacttagnctgttctttatagnccaaatgctatgaaggaggagattttgaaaaagactgctgaattatacaaaagggcaatggnaaataaaagnaagcagaaacatcactcttgggtggnaaaagctccttcacggccattcatcaagtgggagacacgtttaggcttaaaaacagctcattctcctaatgttttccttcagcaaggacaaaggtaatagcagcagttagaattctttgcaaatgtaccttaagacaaaataattaaacatttggaacatttgaatttgaaactttaaaaaaatgttgtacgaaattttactacgtgtgatttactgctatttgtatgaagttgtttggnttcattaagttggaattgtgatttgctgtttngttgtttaaagatttnctatttat

SEQ ID NO: 155909 - DNA, 2046 bp, Homo sapiens
atgccggagatctctctttctgtgcatgcacaaagaagagatcatgtcagcatatggtgtgacggcagtgcctacacgccaagggagaccaaagaaaatgaaattcaggacttactgagggccaagagggagttggagagcaaacttcagaggctacaggctcagggtatccaagtatttgatcctggggagtctgattcagatgacaactgtacagatgtcactgctgctggaacccaatgtgaatattggactggcggagccttgggaagtgaaccttccataggaagcatgatccagcttcagcagtccttcagaggccctgagtttgcccatagttctatagatgtggaaggaccctttgcaaatgttaatagagatgactgggatattgctgtagctagtttattacaagttactcctctgttttcacattctctgtggagtaacactgtcagatgttacctcatttatacagatgaaacccagcctgagatggatcttttccttaaggactattcacctaaacttaagagaatgtgcgagacaatgggatattttttccatgctgtttattttccaatagatgttgaaaatcaatacctcactgtaagaaaatgggaaattgagaaaagttctttagttattttatttattcacttaacattaccaagtcaggacagagtgacttggagaagtgcagatgaactcccgtggctttttcagcagcagggaagtaaacagaagctgcatgattgccttcttaatctctttgtgtctcaaaacctttataaaaggggacactttgctgagttgctgagttattggcagtttgttggcaaagacaaaagtgcaatggcaacagaatacttcgattcattgaagcagtatgagaaaaactgcgaaggcgaggacaacatgagttgcttagctgatctttatgaaaccttggggcgatttctcaaggatctaggccttctcagtcaggccatagtacctttgcagaggtctttagagattcgagaaacagctttagatcccgatcacccaagagtagcccagtccctccaccaactagcaagtgtatacgtgcagtggaagaagtttggcaatgcagaacaactgtataaacaggcgttggaaatctcagaaaatgcttatggtgcggaccatccatatactgctcgtgaacttgaagcacttgcaactttgtaccagaaacaaaataaaacagctgaccagtttctgaagcgttccttagaaatgagggagcgagttctaggaccagatcaccctgactgtgctcagtctttgaataatctggcagctctatgcaatgaaaagaaacagtatgataaagcagaagaactttatgaaagagctttagatattcggagacgtgcattagctcctgatcacccttctttggcatatacggtgaagcatcttgccatcttgtataagaaaatggggaaacttgacaaagctgtacctttgtatgaattggctgttgaaattcgacagaaatcttttggcccaaagcaccctagtgtagctactgccttggtgaacttagctgttctttatagccaaatgaaaaaacacgttgaagctttgccattatatgaaagagcattaaagatttatgaagatagcctgggtcggatgcatcctcgagttggagaaacactgaaaaatttagctgtgcttagctatgaaggaggagattttgaaaaagctgctgaattatacaaaagggcaatggaaataaaagaagcagaaacatcactcttgggtggaaaagctccttcacgccattcatcaagtggagacacgtttagcttaaaaacagctcattctcctaatgttttccttcagcaaggacaaaggtttgtcatgactgtatatctagaaaacgctgtcgtctcagcccaaaatctccttaagctgataagcaacttcagcaaagtctcaggatacaaaatcaatgtgcaaaaatcacaagcattcatatataccaataacagacagagagccaaatcatga

SEQ ID NO: 155910 - DNA, 334 bp, Homo sapiens
tcatgatttggctctctgtctgttattggtatatatgaatgcttgtgatttttgcacattgattttgtatcctgagactttgctgaagttgcttatcagcttaaggagattttgggctgagacgacagcgttttctagatatacagtcatgacaaacctttgtccttgctgaaggaaaacattaggagaatgagctgtttttaagctaaacgtgtctccacttgatgaatggcgtgaaggagcttttccacccaagagtgatgtttctgcttcttttatttccattgcccttttgtataattcagcagctttttcaaaatctcctccttcatag

SEQ ID NO: 155911 - DNA, 1586 bp, Homo sapiens
ccatatactgctcgtgaacttgaagcacttgcaactttgtaccagaaacaaaagaaatatttttaagctctttcattttaggaaaaaatcctttatgggtcatcagagagctataaagaaaaaaggcaacttgtacggatttgcccttttacgtagacgggctttacaggtagaagagcttacattaggtaaggacacacctgataatgctcggaccctcaatgaactggggggtctctactatcttcaaaataacctggaaacagctgaccaggttctgaagcgtttcttataaatgagggagcgagttctaggaccagatcaccctgactgtgctcaggctttgaaataatggggcaggctcttatgcaatgaaaaagaaccagtatgataaaccagaagacctttataaaagagctttagatattgggagacgtgcattagctcctgatcacccttttttggcatatacggtgaagcatcttgccatcttgtataagaaaatggggaaacttgacaaagctgtacctttgtatgaattggctgttgaaattcgacagaaatcttttggcccaaagcaccctagtgtagctactgccttggtgaacttagctgttctttatagccaaatgaaaaaacacgttgaagctttgccattatatgaaagagcattaaagatttatgaagatagcctgggtcggatgcatcctcgagttggagaaacactgaaaaatttagctgtgcttagctatgaaggaggagattttgaaaaagctgctgaattatacaaaagggcaatggaaataaaagaagcagaaacatcactcttgggtggaaaagctccttcacgccattcatcaagtggagacacgtttagcttaaaaaaccagctccatttttcctaaagtttttccttcagcaaggacaaagtgtaatagcagcagtttagaatttcttttgcaaatgttaccttaagacaaaataattaaacatttggaacatttgaatttgaaactttaaaaaaatgttgtacgaaattttactacgtgtgatttaactgctatttgtatgaagttgtattgggattacattaagttgggaattgtgattatgtctgttttagttgtttaaaagaatttttcctattatatgggtatccaagggatggtagacacattagaattataagaagacatgaggagcaaatcatgaagagcggattggtctttgttcaacaagagctggcagagtagttaagacaaggagttcaaaaattcccatgaatcttggcccaggcatggtggctcatgccctgtaatccccacccactttgggagggtgatgcaggaggatcacttgaggcccaggagttggagaccagcctggccaacatggtgaaaccctgtctctactaaaaatacaaaaaaaaattagctggacctggtggcgcatgcctgtaatcctagctactcaggaggctgaggcatgagaatcgcttgaactcagcaagtggaggttgctatgagctgagattgtgccagttcattccaccctgggcaacagggtgagactctgtctcaaaaaaa

SEQ ID NO: 155912 - DNA, 827 bp, Homo sapiens
gcccggccaacatggtgaaaccctgcctctactaaagatacaaaaaattagccgggcaaggtggcacatccctgtaatctgagccacttaggaggctgaggcaggagaattgcttgaacctgggaggcagaggttgcagtgagacgagatcgtgccattgcactctagtctgggtgacagggcgagactccatctcaaaacaaaaaacggcagttgatcaagcagaagaaagagttagtgagcttgaagacaggctttttgaaaatacacaatcagagaagacaaaagaaaaaagaataaaaataagcacactacggggatttagaaagtagccttgaaggggcaaatctaagagttattgtctgtaaagaggaggtagagaaagagataggggtaaaaagtttattcgaaggaataataacagagaacttctcaaacctagagaaagatattaatatccaagtacaagaaggttataggacactaagcaaatttcacccagagatgtactaactcgagacattgaataataaaattcccaaaggacaaggataaagcaaggatactaaaaggagcaagagaaaagaaacaacatacaatggagctccaatatggctggcagtaaacttttcagtagaaaccttacaggccaagagagtggcatgacatgtttcaaatgccgaaggaaaaaaccttttaccttagaatactatatccaatgaaaatatccttcaaacatgaaagagaaataaagactttcccagacaaacaaaagccaagggattttatcagctccagacctgtcctacaagaaatgctaaagagct

SEQ ID NO: 155913 - DNA, 432 bp, Homo sapiens
gctgatggggataaggaggctgtgagcaaaggggcaggtggctctcgggaggcctggggcgagaatgcagggaggctcaaaagtggtgggcgtccttgctgggccagggagccggtctgaggcagggactgtcccctcctatcctgcggcccagacccggccccaccccccaccgcagcccttgcttatcttcaggagtcctggtgttgtccctaatggccaccaaggcccgcccaactccactgcctcctcgaagcagtgcaacttgaggtgttggggtctccccaccgtggccaggcaccctaagtctggacagagaccccagcgcggccgacccggtagccaggccctagtcctcagggtcctacacctgggaggaagaatccagagaggccctagctggtacagcaatgaccaagggcaggacagacc

SEQ ID NO: 155914 - DNA, 361 bp, Homo sapiens; identical to SEQ ID NO: 122889

SEQ ID NO: 155915 - DNA, 406 bp, Homo sapiens; identical to SEQ ID NO: 122890

SEQ ID NO: 155916 - DNA, 660 bp, Homo sapiens
atggccagtccaggaggtcttagtgctgtgcgaaccarcaacttcgcccttgttggatcttacacattatcattgtcttcagtaggaaatactaagtttgttctggacaagataaattatgatgtaagagagcgagagctactgggctatttgttccaggaaaaggtcccctgttttatcttcttatggagggcatatttatttaaagataagatgtccagtggattcccagtgttggaagaagaggttttctaaccatatttgaagatgtaagtggttttgggtgcctggcatcgaagatgttgtgttctttctggagactgtatatcctattgggcttatccagatgatgagaaacgcaagaatcccataggaaggataaatctggctaattgtaccagtcgtcagatagaaccagccaacagagaattttgtgcaagacgcaacacttttgaattaattactgtccgaccacaaagagaagatgaccgagagactcttgtcagccaatgcagggacacactctgtgttaccaagaactggctgtctgcagatactaaagaagagcgggatctctggatgcaaaaactcaatcaagttcttgttgatattcgcctctggcaacctgatgcttgctacgaacctattggaaagccttaa

SEQ ID NO: 155917 - DNA, 4723 bp, Homo sapiens
atggttgccattatcactatcatcatcattatcaaggtagaaaccaaagacatagtgggatggagacacactgagctgagactcacttttctcttcctgaatttgaaccaccgtttccatcgtctcgtagtccgacgcctggggcgatggatccgtttacggagtcctggcgcagcaagagtgaggcgcaggcctgcggaacgggtcctgctggaagcagctggaatgccctgcagggcggggtccggggccggtgactcagtgcggctgccgccgggaaaggcgaaactgctggagcgaacccgtgccaggcgagagaatcttcagagaaaaatggctgagaggcccacagcagctccaaggtctatgactcatgctaagcgagctagacagccactttcagaagcaagtaaccagcagcccctctctggtggtgaagagaaatcttgtacaaaaccatcgccatcaaaaaaacgctgttctgacaacactgaagtagaagtttctaacttggaaaataaacaaccagttgagtcgacatctgcaaaatcttgttctccaagtcctgtgtctcctcaggtgcagccacaagcagcagataccatcagtgattctgttgctgtcccggcatcactgctgggcatgaggagagggctgaactcaagattggaagcaactgcagcctcctcagttaaaacacgtatgcaaaaacttgcagagcaacggcgccgttgggataatgatgatatgacagatgacattcctgaaagctcactcttctcaccaatgccatcagaggaaaaggctgcttcccctcccaaacctctgctttcaaatgcctcggcaactccagttggcagaaggggccgtctggccaatcttgctgcaactatttgctcctgggaagatgatgtaaatcactcatttgcaaaacaaaacagtgtacaagaacagcctggtaccgcttgtttatccaaattttcctctgcaagtggagcatctgctaggatcaatagcagcagtgttaagcaggaagctacattctgttcccaaagggatggcgatgcctctttgaataaaagccctatcctcaagtgctgaagatgcgtctttggttaatgcctcaatttccagctctgtgaaagctacttctccagtgaaatctactacatctatcactgatgctaaaagttgtgagggacaaaatcctgagctacttccaaaaactcctattagtcctctgaaaacgggggtatcgaaaccaattgtgaagtcaactttatcccagacagttccatccaagggagaattaagtagagaaatttgtctgcaatctcaatctaaagacaaatctacgacaccaggaggaacaggaattaagcctttcctggaacgctttggagagcgttgtcaagaacatagcaaagaaagtccagctcgtagcacaccccacagaacccccattattactccaaatacaaaggccatccaagaaagattattcaagcaagacacatcttcatctactacccatttagcacaacagctcaagcaggaacgtcaaaaagaactagcatgtcttcgtggccgatttgacaagggcaatatatggagtgcagaaaaaggcggaaactcaaaaagcaaacaactagaaaccaaacaggaaactcactgtcagagcactcccctcaaaaaacaccaaggtgtttcaaaaactcagtcacttccagtaacagaaaaggtgaccgaaaaccagataccagccaaaaattctagtacagaacctaaagaagtgatacgtgaaattgagatgagtgtggatgatgatgatatcaatagttcgaaagtaattaatgacctcttcagtgatgtcctagaggaaggtgaactagatatggagaagagccaagaggagatggatcaagcattagcagaaagcagcgaagaacaggaagatgcactgaatatctcctcaatgtctttacttgcaccattggcacaaacagttggtgtgagtttagtgtccacacctagactggaattgaaagacaccagcagaagtgatgaaagtccaaaaccaggaaaattccaaagaactcgtgtccctcgagctgaatctggtgatagccttggttctgaagatcgtgatcttctttacagatctcaaagattcaaagaaacagaacgtccatcaataaagcaggtgattgttcggaaggaagatgttacttcaaaactggatgaaaaaaataatgcctttccttgtcaagttaatatcaaacagaaaatgcaggaactcaataacgaaataaatatgcaacagacagtgatctatcaagctagccaggctcttaactgctgtgttgatgaagaacatggaaaagggtccctagaagaagctgaagcagaaagacttcttctaattgcaactgggaagagaacacttttgattgatgaattgaataaattgaagaacgaaggacctcagaggaagaattaaggctagtccccccaagtgaatttattgccatcccaaaggatcagtttactttgtcagaaatccgcttgccctaaaaagcagattttgtctgcagtacggttcagaaaccagatgcagcaaattactattacttaattatacttaaaagcaggagctgaaaatatggtagccacaccattagcaagtacttcaaactctcttaacggtgatgctctgacattcactactacatttactctgcaagatgtatccaatgactttgaaataaatattgaagtttacagcttggtgcaaaagaaagatccctcaggccttgataagaagaaaaaaacatccaagtccaagaaaagcaacattcattcttcagtcatggccagtccaggaggtcttagtgctgtgcgaaccagcaacttcgcccttgttggatcttacacattatcattgtcttcagtaggaaatactaagtttgttctggacaaggtcccctttttatcttctttggaaggtcatatttatttaaaaataaaatgtcaagtgaattccagtgttgaagaaagaggttttctaggctgccctggaggagggcgactccaaccaaagagacagaccatatttgaagatgttagtggttttggtgcctggcatcgaagatggtgtgttctttctggaaactgtatatcttattggacttatccagatgatgagaaacgcaagaatcccataggaaggataaatctggctaattgtaccagtcgtcagatagaaccagccaacagagaattttgtgcaagacgcaacacttttgaattaattactgtccgaccacaaagagaagatgaccgagagactcttgtcagccaatgcagggacacactctgtgtttaccaagaactggctgtctgcagatactaaagaagagcgggatctctggatgcaaaaactcaatcaagttctttgtgatattcgcctctggcaacctgatgcttgctacaaacctattggaaagccttaaaccgggaaatttccatgctatctagaggtttttgatgtcatcttaagaaacacacttaagagcatcagatttactgattgcattttatgctttaagtacgaaagggtttgtgccaatattcactacgtattatgcagtatttatatcttttgtatgtaaaactttaactgatttctgtcattcatcaatgagtagaagtaaatacattataggtgagtttgctaaatcttaatttataagcctcattttcctagaaatctaattattcagttattcatgacaatatttttttaaaagtaggaaactctgagctgtcttcttggagctgtaggtcttgaagcagcaacgtctttcacgggttggagacagaaacccattctccaatctcagtagttttttcgaaaggctgtgatcatttattgatcgagatatgacttgttactagggtactgaaaaaaatgtctaaggcctttacagaaacatttttagtagtgaggatgagaactttttcacacagcaaatatatattggcttaaagcatgaggctgtcttcagaaaagtgatgtggacataggattgaatgtgtgagacttgggggttcaatattttatatagaagagttaataagcacatggtttacatttactcagctactatatatgcagtgtggtgcacattttcacagaattctggcttcattaagatcattatttttgctgcgtagcttacagacttagcatattaggttttttcctactcctacaagtgtaaattggaaaatccttatattaaaaaagtaaactgttatgaagctgctatgtactaataatactttgccttgcccaaagtgtttgggttttgttgttgtttgtttgtttgtttgtttttggttcatgaacaacagtgtcctagaaaacccattttgaaagtggaaaattattaagtcacctatcaccttttaaacggcctttttttaaaattataaaatattgtaaagcaggggtctcaacttttaaatacactttgaacttctttctctgaattattaaagttctttatgacctcatttataaacactaaattctgtcacctcctgtcattttattttttattcattcaaatgtattttttcttgtgcatattataaaaatatattttatgagctcttactcaaataaatacctgtaaatgtctaaaggaaaaaaaaaaaa

SEQ ID NO: 155918 - DNA, 376 bp, Homo sapiens
  misc_feature (1)...(376): n = a,t,c or g
ttgctgcatatagctgcctgtctactattaagagaactatccatnaaattaaggcattttgttatttcaagtgtaagaggggcaagaacataagggnattatnaaaaccccaagntgactcatttaaaaaaagaatgtttatctttgcatttggcaagagtatcttcaagataactaccacttttcaaagcactattgttgggtaggttttattaggggagaggacttagaaaacatgactttcctcacccaaaaccaaaaataaatgagggcttaaaaatatattatttaagaagatagtggccagaaataaagaccatgaccaacaagctttggggccatcaagatgaaaagacctttcctttnttcaanatct

SEQ ID NO: 155919 - DNA, 421 bp, Homo sapiens
tcttaggcgtttcagaccacactgttcgtgatatttcgtgtgttttagctacaaacacttatctaagatgctgtcttcgcagtgccatgcctacaatggcaagcgtgaagctgtctacacttcatcccattgtgaatcatccacattacgaagatgcagacttgaggcctggttgcagtatgcttgaaatctgggatgtggaagacccttccaatgcagctaaccctcccttacgtagcatcctgctcgaagatgccaggctcgaagatgccagtatttcagaatagtgtgtacagagtattgaaggttaactgagaaggaaactacccattacactatggcacaatgccgtgtgtcaaaaacaatcaccctttggcttatttacattaataaaaatcacaagctttaataacagaaaaaa

SEQ ID NO: 155920 - DNA, 2069 bp, Homo sapiens
  misc_feature (1)...(2069): n = a,t,c or g
caagcatcaagctgtctacacttcatcccatttgtgaatcatcaacattacgaagatgcagacttgagggctcggacaaaaatagtttattctacatatagtcgaanatctgccaaagaagtaagagataaattgttggagttacatgtgaattattatgttttagaagaggcatggtgtgttgtgagaactaagtttatacttcaagatggaccaggagttctacaagctgctgagaaatgatgccagatggtaactcagatatacaagaaatactcaaatgcgctggaaatggcctggttgcagtatgcttgaaatctgggatgtggaagacccttccaatgcagctaaccctcccttatgtagcgtcctgctcgaagacgccaggccttacttcaccacagtatttcagaatagtgtgtacagaggtattaaaggttaactgagaaggatactaccccattttactatggcacaatgccgtgtgtcaaaaacaatccaccctttggcttattcacattaataaaaatcacaagctttaataacagacacttaaaaataagataaaaatggattggaaatttttctgattactaaaaggtaaattacttttctgttcattgaatgtcagccttattaagcttgtcatataagttattaaatcattcatgtcatactgcataaacaaatgttcatttcagaattttaaagagaaatgtatataaaagaacaatgaattttaataaatcaggggtatgtaagtcctttttcatccaactaggtgaattgcttcagattttctctagtaccagagggtacctcctcaaactctttgaaccacttaaggcagaagaatgcaagctctgaaatgacatccttaaaatgctgatactggtcacagcctctttacctctgtgaggaaattgtaacagtgtgtcttttaaggtgtttttattttaccagcccttaagaaagatctctaataccttttaatacttttttttaataatttcaagttgaagtgtttttaaaaacactttgttttgtaatgttttgaatctcttgagatgtgtttaccccactagatacatatttgccactggttagttctccatctaagctcaagaggttattcatctctctttagattccagtggcttttcttttaacatccaggtaaaacagaaactgctatggtatacaaccaagttttggggttaaacataatcagaaaagaaaatccagttaaatttatgaagtgagattttcagatcctagatcttgaataaaggaaaggtcttttcatcttgatggccccaaagcttgttggtcatggtctttatttctggccactatcttcttaaataatatatttttaagccctcatttatttttggttttgggtgaggaaagtcatgttttctaagtcctctcccctaataaaacctacccaacaatagtggcttggaaaagtggtagttatcttgaagatagatactcttgccaaatggcacagataaacattctttttgtctgctttataaatatgaaatatgccagatctatagtattttaatgtgcatctactttaaatgagtcatcttggggtttttataatccccttacattcttgcccctctacacttgaaataacaaaatgccttaattttatggattagttctcttatagtagacaggcagctatatgcagcaaaaccaataaagttatttttcaactttcatagttgtaaaatatcttataacagaatacaaaacagctaagaaaacatgccacattttattttaagcattttcaaataatttgtttttggtgtaagcacaggataaaaaaggagagcgtcaaagaaaagagactttaaaaaataacattcataaaaattaacaaagtatattttggatgatgtttttacaggaaatattttaaataagttggtagaacttttaaaatggtactgtattagctaataaaatattcagtacaaatatatgtttggatttatgcattaaaaaactaataaaattatttccaactttaaaaaaaaaaaaaa

SEQ ID NO: 155921 - DNA, 478 bp, Homo sapiens
gttactatctttctcctcctgagtccatgggcgccatctttgaggatcctggcgcatgtcgttgtttatatcatcttcatgttggggtcatgtgcattcttctctaagacatggattgaagtgtctggttcctcagccaaagatgtagctaaacagctgaaagaacagcagatggtaatgaggggccaccgagatacctctatggttcatgagcttaatagaccaaaagtgaagttaagaaggtggaagggagaaggaagacattttacaaaaaggatactcttctactaaaagataaccccgcacggcatttcacacttgcctacgtcaccctgctttccacgcacctcctcagagggaggggctgttattgttcctgttttatgaaaaaagccgagagaggctacagaacctgtttgatgtgatagctaattatggtccgcggagcctcataccgagtcgggcctgtgactccgag

SEQ ID NO: 155922 - DNA, 2765 bp, Homo sapiens
  misc_feature (1)...(2765): n = a,t,c or g
gcgcgttgatctgcccattaagtcggcccgttaccgaggacagtacagcagctaccccatcaaactcttctacacctccaacatccccatcatcctccagtcggccctggtgtccaacctgtatgttatttcccagatgctgtctgttcgatttagtggcaactttttagtaaatttactaggacagtgggccgatgtcagtgggggaggacccgcacgttcttacccagttggaggcctttgttactatctttctcctcctgagtccatgggcgccatctttgaggatcctgtccatgtcgttgtttatatcatcttcatgtttgggtcatgtgcattcttctctaagacatggattgaagtgtctggttcctcagccaaagatgtaagctaaacagcttgaaaggaacagcagatggtaattgaggggccaccgagatacctctatgtttcatgagcttaataggtacatccccaccgcagctgcgtttggcggtttgtgcattggcgccctgtcagtgctggctgacttcctgggggccattggatctggcactggaattctgctagcagtcactattatttaccagtattttgaaatatttgttaaagaacaggccgaagttggtgggatgggtgctttgtttttctaaatgttcaaatattttcattttgtgcgtgtgaaaggggaaaacactttgacggatcgttttttgtcagatgacactgggaggctccccttttctccccctcacagtttcttgtttcgagtgcctgactgacccgtttctgaaatgggcaccgagcctaagtctgtgtgcagcattagtacccgctgccttaaaactcaagtttacattattcattaaaaaaagtacatctagtgttgcctgtaatgctggaaaccagtgtatctaccttgctgtgttaaatcatgacagtgagacggtgagatggattcgttttgcacacaacattcaaaacacttcatattgcccccacttgttgaaaaataaatgtagttcaaattgccactttccagtatttttgagcttatttaatgagttctggaacatttatatctaatctatattttagataattactttttatacttttttaactcatggtatcccactcccccaccccccacctcattttttatttgtcccttctcaaagcagccacttagcccacatgggcgaaaaccaagtctccagttatttctgccacaactgcttctaaggcctcctcccnttctccgtcctcctcttcctcttcctccttttccttctcctcctcctctcttcccagtgacagcaatcatcgtgctgtttgcctgtattggctatgccttctaactccaaccagtcacttgagaatattctttcaagattatgggccccgattcttttctgtttaaatccctaaagcaaagatctaattcctcaagcaaatggtctggtagttcagtgggggtgaacaatgaatatattcatgctaggaatttgtgtctgttgttgtactcacagcagcaacatgagtgtaaacagtagacaataaacttttatttaagaaaactgattcagttgtgttggaaaaaataaagaaatctgatattaaacgttttctaagatcatttgtataggttcagtgtattcataagaagtccaccctgagatgcctgtaaaaagtcaaatcgtaattacacttcaagcctttaatccttaaattattgacagatagatagatagtgacccaacttaaggggtaatcatatatgtgacttaacatttggggagggaaacagggaaaacaggtggtctcaaaaacaaacaatatttcccaggtctccattttgaaagaagcattagatcttgggtaaatcattttgaaaacctatgtgctttatttcccaaaaagatcaaacttaatttttaaaagacacccttttcagaagtatggggttttcattgctgtttagtttcttaggtgtggtatgtcttacgtagcttatgcttacaaagccaaataatcgcagggcaaggcagataaaggcaggcaggatagtgacagtggctcggtgagcatccgccaagggcctcagaccactgttaccattaaaaactttccaccccagtgttatgacgtccgattttttttttccctttaagaaggtggaaatattggcttttaatacatagggaaaccttcagttttttaaatgcagggcaaataaacattttttaaacagtgccagccagactgccagttctcaaacagactgaatttccaaagcacaacctttttcatgtttataaaaaatagaaatggcatttagggatacattctaggatttggctctgacttctaagttgcactcttaggaagaaggagaggataagcttaggtcagctgcagaggtcattcccatgggggagtggcctgggggaggacctggggctatgtggaacagcactgggctgcgcccgtctacggatgccttctctcttgatttcaatgattgatagcatgtggctttcagacctaaggaagagttagagctttggagaatcacaatgcctgtgattgaaatcaggatttaaaaaagggttagaggcataggggaaggctaccattacaggaagtagttggatcttaattttcacatgtatagggctagacagcttcatctgtaaagttctgtatttccataattgtcctatctttaggaagtccagtgtaaagatcttccagctcgtgcc

SEQ ID NO: 155923 - DNA, 1066 bp, Homo sapiens
tgttctattttgtattttttttttctcttagagactaccataaaatagcatttttaaaaatttatttttagagatggaggctctctgtgttgcccaagctggacttgaactcttgggctccagcagtcctcccacatgagcctcccgagtgactgggactccagggtgcgtgccaccaagccaaacttccctttcagttcttgacattccttttctgctttgtatcatgcatctccccagatctcccctaaacttcattcaaccatgtaggttttataaggggccagcaggactatctaggggaggcagggagtagcatggactttaaagtgatttctctgtggccaatctctggcaactggggttcctttggcaggctctgacagattaccgggcagagcttccggggatggacccaatcatcagcacacacttggccaagttgtatgataacttactagaacagaatctgatccgagtcattgagcctttttccagagtacaggtgagaaccctctggggactccatttctggccaggcattctcactgtagccacctcccttccacacctgtccagaatgggaactcacttctaggggtgtgcctggtgggcaagaggccaccaagagcttgggcctctgttgataaaatgaacaaaaatcgaggagagagatgctgtggttagaggcatgtgggttgcccctgcatgtgttctgagcagtttcctcctcgcttttagtcactgcatgtgttgtacctgttttctgtattgggtgtgcgggataagagtctgtttattgtgtgtagcagtgaagggcaggcagatgggcagagaacaagagacttaagcacggccaaggagggtcttacattaaaattttgagaaatacagcagatctccccctgttccctcccttctcttattggaggcaaaagtaaaactttcaggggtggagtctctctgccttttcttttagattgaacacatatttaggcttattcaactcttccaagaaggagttttaaggccttctatgaagaaatgacacggtggcaagaagggt

SEQ ID NO: 155924 - DNA, 1439 bp, Homo sapiens
  misc_feature (1)...(1439): n = a,t,c or g
cccacgcgtccgcccacgcgtccgcccacgcgtccgctcttccagaccgaggagcagggacccgagccccaggagggcgcggctaaggtggcagctgcgctggaaaccaaggtggtgcccgagacccccaaagacaccaggtgtgtggaagcggccaaggacgcgtcctcggtcaagcgcaggaggctcaaccggattcccatcgagccccatcctaaggaggagcccaagcacccggagaaggagcagcaggaaggcgtccccaacagcgacgagggctactgggactccaccacgccaggcccagaggaagacagctcgagcagcgggaagaaggcgggcatcccccgggatagctacagcggggacgcgctctatgatctctatgctgacccggacggaagcccagcaacccttcctgggagggaaggacaaacgaggagacgtcctccctgtcccggttaaagcccgtatctccaggcaccatcacctgtccactgcgaacaccaggcagcttgctgaaggactctaagatccctattagcatcaagcacctgaccaaccttccatctagccatcccgtggtgcaccagcaaccctccaggagtgagatgcccagaacaaaaatcccggtttccaaagtgctggtccgcagagtcagcaaccggggcttggctgggaccaccatcagagcaacggcctgccacgacagtgcccaaaaagttgtgaggtcttccaggccaaggtggatgggccccatgccaaggaatacaacttttccctgggaaaccactaaagtaagttttgcttttcctaaagaaagtcttttaggacaccacccgtcccacgccctgctccagagcgtggaccgaggaggtctttgtgccctgagtagggaccggataacaccagaaagagggatgctacacgggggtttctcctctcaagataagtccctgagaattattttcaagcacttttttcttttttacctttaagtttttcttccttttgctttaatatactgaacacttgggaagtcacctttacttgcctttgcagaaaacagaacttaggccaaacctaagtaaggagtcatgcctgggatattggggataagccagtgtctaggagggcctggaagggaaccgctggaaggaaccaggagggaggatctcctntttcccaaggacacgtttccttccttcccttctttcctctttcctttccagttaaaaaaaaacaaaaacaaaaacaaaaccctttgctgtatcactgtgtggaaaatacctccaaagctgaaagagccaggtatttacctgatgagcagaggggaccactgattggcagaaaacttccctacgttcagttgttagatatgcaaattgataaggatctaacactaggaaaataaaggcgagttttggtttggttggttt

SEQ ID NO: 155925 - DNA, 399 bp, Homo sapiens
gtgcagtggcatgatctcggctgaccgcaacctccacctcccgggttcaagcgattctcctgcctcacccctcctgaagtagctgtgatcataggtgcccggccacccacacccgactaatttttgtgttttttagtagagacagggtttcactatgttggccaggctggtctcgaactcctgacctcaggtgatccgcccaccttggcctcccaaagtgctgggattgcaggagtgagccaccacgcccggcctaattttctaatttttttttttaactaaagaagggcccccaggaagtcaaaagtgcctataacccatgaaagtctaaatgaggacaacggaggctgggcatggtggctcactcctgtaatcccagcactttgggaggccaaggtg

SEQ ID NO: 155926 - DNA, 1321 bp, Homo sapiens
  misc_feature (1)...(1321): n = a,t,c or g
ttttttggtagcaagagtagcgggcagtgggggagatggtcttactctgttccccaggctggagtgcactagtgtcatcacagctccagcctcaatttcctgggctcaaggcgatcttcccgcctcagcctcccaagtagctcagactgcaggggcatgccatcacagctggccagtttttacgtcttgcgtagagatgggttttccctgtgttccctaggctgggctcgaactcctgggctcaagtcctcctgcctcagcctcccaaaatgttcagattacaggcatgaggcagcatgccaatcctgtttttgcattttagtaacacaaattgtaatgttaactttttaaattatgaaagcatctaaaatataaaattatttgtaaccccactgtccttttgggcttctataaatgaatatacatctaaaatgtggggggtttagcttaattgattgttttccataggaaactagggttttatggggaaggatgggttgggatagacttgttttcactttaaagggtctggatttgtgtagggnccaaaccccaccatatggtaatcgtgcccagtctgttctctggcatgacataattttccagcaatagctgtgtggtttttggtaancccctatcatcctagtcagttccaagatcttgcaacactgtgtgattcctttgctccgtagttcagtcttgttgaacatgacacaggtgtttactttcctgttcttgcatctagtttcattctaataatgttcctctgttgaaaaagctggcttcaatttattgagccaagatgctggtgttatccatctaacataaaacctatcttataaataaagtgttgacacatgtaatgagtactgtactgaaaaatgggtgggtatgtatatggtttgtactgattatgtatcgcttttataccatcaaaaagttgaaaaatcataaagttgaatcatcctaaaatgggtacattctgtactatgtttccaaggcttcggaagtgttgcatacacattcctagccagctgatagtgctaggagccaacagtagtctcccccgggggccaagaggagggcgaaatctctactatggtatatgatgttctcgtgggccaagtatgagggtgatatttcattgttggcactgggtttctggaatccatcctcttcaccagggagatttaatgaaccaaatgagatctgatgggagaaatttgagtgtaacgtttttgttctgaaggaagtaattgagttttagttcatttgttttttaggaatcgtaataattaaaatttcattttaaatgccatga

SEQ ID NO: 155927 - DNA, 603 bp, Homo sapiens
gtctcactctgttgcccagattggagtacagtggcgtgatctcggctcactgcaaccttcgcctccgggattcaagcgattttcctgcctcagcctcccaagtagctaggactacaggcatgcaccagtacacccagctaatttttttatttttagtagagatgtggcttccccgtgttagccaggatggtctcgatctcctgacctcatgatctgccctcctcggcctcccaaagtactgggatcacaggcatgagccaccgtgcccggcctaatttttgtatttttagcagagacagggtttcaccatgttggccagtctggtctcaaactcctgacctcaggtgatccgcccacctcagcctcccaaagtgctgggattacaggtgtgagccaccacgcccggcctgaagtttacttcttctgcccttaaatgccactggcctctttggggttgatgttggtcgtgtgagcaaggggaggtagaattgaagagaaagccatgcctcttgacccacccttcgtttgccatcttgtttcccttaaaaagaaatagtagcttctgttctgttgactttatcctatcaacagtacctcgtcctg

SEQ ID NO: 155928 - DNA, 444 bp, Homo sapiens
  misc_feature (1)...(444): n = a,t,c or g
ccaggttttggagaatccacacttcccaagggggtgagctccgcccccctcttggtgatatccttcggggttttataaatccaaccgcccccgggcatgttttaacccccggagcctggccccccgtgggccccatcaaggtttttttttccccccgggacctttatgtcccacccccaccctttttgggccccccgtatgggtcccgattttttccttcagagcattttcaaaaagtccaaccgttgaatcagcctccttttttgtccttaaaaaaccccccttaaaggttcccatttttttttcccnnnnnnnnnnnnnnnnnnnnnnnnnnnnnnnnnnnnnnnnnnnnnnnnnnnnnnnnnnnnnnnnnnnnnnnnnnnnnnnnnnnnnnnnnnnnnnnnnnnnnnnnnnnnnnnnnnnnnnnnnnnnnnnnnnnnnnnn

SEQ ID NO: 155929 - DNA, 2501 bp, Homo sapiens
atggaggatgcgtgggggattcgcaaagagacaggaagagtcaaagaagaagctgagaaagtaacaggatggggaaacaactggagaaatgtagagaaaagctccatgtccagaaaggtgaaggcagcaagaccaggattcaagaagttgcccatgacgtcagatatccctcctaaatgtacaatcaaggatttgctaccaaaagagaagagcagtacagaagcagtattccacacagtggtgttggaaagacacgaaagccctgacattgaagacttttccttcaaggaaccccagaaaaatgtgcatgattttgagtgtcaatggagagatgacacaggaaattacaagggagtgcttatggcccagaaagaaggtaaaagagatcaacgcgacagaagagacatagaaaacaagcttatgaacaatcagcttggagtaagctttcattctcatctgcctgaactgcagctatttcaaggtgaggggaaaatgtatgaatgtaatcaagttgagaagtctaccaacaatggttcctcagtgtcaccacttcaacaaattccttctagtgtccaaacccacaggtctaaaaaatatcatgaacttaaccatttttcattactcacacaaagacgaaaagcaaacagttgtggaaaaccttataaatgtaatgaatgtggcaaggcgttcactcagaattcgaaccttacaagtcataggagaattcatagtggagagaagccttacaaatgcagtgagtgcggcaaaacctttactgttcgttcaaatctaactattcatcaggtcatccatactggagaaaaaccttacaaatgtcatgagtgtggcaaggtcttcaggcacaattcataccttgcaactcatcggcgaattcatactggagagaaaccttacaagtgtaatgagtgtggaaaagcctttagaggacattcaaacctaactacccatcagttaattcatactggagaaaaaccgttcaaatgtaatgaatgtggcaagctcttcactcaaaattcacaccttataagtcattggagaattcacactggagagaaaccttacaagtgcaatgagtgcggcaaagcctttagtgttcgttcaagcctagcaatccatcagacaatccacactggagaaaaaccttacaaatgtaatgaatgtggcaaagtctttaggtacaattcatacctcggaaggcatcggagagttcatactggtgagaaaccttacaagtgtaatgaatgtggcaaagccttcagtatgcattcaaacctagctacccatcaggtcatccatactggaacaaaacctttcaaatgcaatgaatgcagcctaggttttcactcaaaattcacaacttgcaaatcatcgaagaattcatactggagagaaaccttacaagtgtaatgagtgtgggaaagccttcagtgttcgttcaagtctgactacccatcaggcaatccattctggagagaaaccttacaaatgtatcgaatgtggcaagagcttcactcaaaaatcacaccttagaagtcatcggggaattcattctggagagaaaccttacaagtgtaatgaatgtggtaaagtcttcgctcaaacatcacaacttgcaaggcattggagagttcatactggagaaaaaccttacaagtgtaatgactgtggcagagcctttagtgatcgttcaagcctaacttttcatcaggcaatacatactggagagaaaccttacaaatgtcatgaatgcggcaaggtttttaggcacaattcataccttgcaactcatcggcgaattcatactggagagaaaccttacaagtgtaatgagtgtgggaaagcctttagtatgcattcaaacctaactacccataaggtcatccatactggagagaagccttacaaatgtaatcaatgtggcaaggtcttcacttcagaactcacaccttgcaaatcatcaaaggactcacaccggagagaaaccttaccgatgcaatgagtgtgggaaagccttcagtgttcgatcaagcctaaccacccatcaggcaatccatactgggaaaaaaccttacaaatgtaatgaatgtggcaaggtctttactcaaaatgctcacctggcaaatcaccgaagaattcatactggggataaaccttacaggtgtacagagtgtgggaaagcctttaggagacagggtgtcactcctgggcccagtctggagtgcaatggaacaattctggcttacagcagcctcaagtttgtgggctcaagtgatacccacattagcctcctaaggagccaggatgacaggcaggtgctaccacacctggctaatcccaatttcagagaaggtctcctgcctgcctttctgctgctctgttcagactctcacttcctgcagttctgcagtcagtttgccccacgcaagacccaaggatctgggtctgtgaataatattcaagccaacatcattgccaagtga

SEQ ID NO: 155930 - DNA, 3539 bp, Homo sapiens
  misc_feature (1)...(3539): n = a,t,c or g
atgccgcatcaactgggcccgaacctggtcccagatatccctcctaaatgtacaatcaaggatttgctaccaaaagagaagagcagtacagaagcagtattccacacagtggtgttggaaagacacgaaagccctgacattgaagacttttccttcaaggaaccccagaaaaatgtgcatgattttgagtgtcaatggagagatgacacaggaaattacaagggagtgcttatggcccagaaagaaggtaaaagagatcaacgcgacagaagagacatagaaaacaagcttatgaacaatcagcttggagtaagctttcattctcatctgcctgaactgcagctatttcaaggtgaggggaaaatgtatgaatgtaatcaagttgagaagtctaccaacaatggttcctcagtgtcaccacttcaacaaattccttctagtgtccaaacccacaggtctaaaaaatatcatgaacttaaccatttttcattactcacacaaagacgaaaagcaaacagttgtggaaaaccttataaatgtaatgaatgtggcaaggcgttcactcagaattcgaaccttacaagtcataggagaattcatagtggagagaagccttacaaatgcagtgagtgcggcaaaacctttactgttcgttcaaatctaactattcatcaggtcatccatactggagaaaaaccttacaaatgtcatgagtgtggcaaggtcttcaggcacaattcataccttgcaactcatcggcgaattcatactggagagaaaccttacaagtgtaatgagtgtggaaaagcctttagaggacattcaaacctaactacccatcagttaattcatactggagaaaaaccgttcaaatgtaatgaatgtggcaagctcttcactcaaaattcacaccttataagtcattggagaattcacactggagagaaaccttacaagtgcaatgagtgcggcaaagcctttagtgttcgttcaagcctagcaatccatcagacaatccacactggagaaaaaccttacaaatgtaatgaatgtggcaaagtctttaggtacaattcatacctcggaaggcatcggagagttcatactggtgagaaaccttacaagtgtaatgaatgtggcaaagccttcagtatgcattcaaacctagctacccatcaggtcatccatactggaacaaaacctttcaaatgcaatgaatgcagcaaggttttcactcaaaattcacaacttgcaaatcatcgaagaattcatactggagagaaaccttacaagtgtaatgagtgtgggaaagccttcagtgttcgttcaagtctgactacccatcaggcaatccattctggagagaaaccttacaaatgtattgaatgtggcaagagcttcactcaaaaatcacaccttagaagtcatcggggaattcattctggagagaaaccttacaagtgtaatgaatgtggtaaagtcttcgctcaaacatcacaacttgcaaggcattggagagttcatactggagaaaaaccttacaagtgtaatgactgtggcagagcctttagtgatcgttcaagcctaacttttcatcaggcaatacatactggagagaaaccttacaaatgtcatgaatgcggcaaggtttttaggcacaattcataccttgcaactcatcggcgaattcatactggagagaaaccttacaagtgtaatgagtgtgggaaagcctttagtatgcattcaaacctaactacccataaggtcatccatactggagagaagccttacaaatgtaatcaatgtggcaaggtcttcactcagaactcacaccttgcaaatcatcaaaggactcacaccggagagaaaccttaccgatgcaatgagtgtgggaaagccttcagtgttcgttcaagcctaaccacccatcaggcaatccatactgggaaaaaaccttacaaatgtaatgaatgtggcaaggtctttactcaaaatgctcacctggcaaatcaccgaagaattcatactggggagaaaccttacaggtgtacagagtgtgggaaagcctttagggtaagatcaagtctaactacccatatggcaatccacactggagaaaagcgttacaaatgtaatgagtgtggcaaggtcttcaggcagagttcaaatcttgcaagtcatcacagaatgcataccggagagaaaccttacaaatgagtgtggtgaggtcattaggtacaattcactcctttcacatcagttaatttcattcttgacagaatccttacaaatgtagtgacagtggccaatccctcatgagttgaagcattaatagatatgagaggccataagcaagagacatcatgtaaacatatgtggcagagggtctatccaggcctcgcaggttactaggcatcaagattttatatctttgatgaaacgaaacaaatgtaatatgcatcctgaggccattacccagtgaccgatggtaagtgaggattcctaggaggaataacagtctctggtttccctgtttgcctttgatattatacactgtagaatactcacaagtccaaatatgctaaaaattatatatttttaactcacatacgaaaaggttgcaggatatttgtagggcagtcagttaccttcaccttatgaaaatgtttcacttgagttatttgangggttttttgggaaagcctacttttgcgtttcaaatgtggaactttgaaatcttattgtgcatccttacacaccttccatggtgctttcttggaaagatcattgggatggaaggatcattgattgggtgaagatcattgattaggtgaaggattatttctatccaatttgtgaagaaggaggactttgcttttaaaattaagtatcatctgaattagcatttggggagtgggcgaaaaacaatgtaaaacttatgatgtcactcaccattctgataatgttcaggggtgcctttctcctaccaggagagtactgtggcttagaggaaagaaatggtctatcaactgaacatgaaatggagcaggccaagaccttaggacattgggatttttgtgggaggagagtaataggtaattagacactgattgtgtggtagaaatactgcaggggaaaaggtcgcccctcttatgcatcaaaggagcaatacctgttgtttagcaaaagagtgatgaaaaattgatcttgttttgaaattgaagagagaggccaggcgcggtggctcacacctgtaatcccagcacttttgggaggctgaggcaggtggatcacctgaggtcgagagttcgagaccagcctgacccaacatgggagaaaccccaattggtactaaaaatacaaaattagccgggccgtgggtggccaggtgcctggtnaaccccagctacttgggaggctgaggcaggagagtgcttgaacccaggaggcggaggttgtggtgagccaagatcatgccactgcactccagcctgggcaacaagaacaaaactccatctaaaaaaaaaaaaaaaaaa

SEQ ID NO: 155931 - DNA, 436 bp, Homo sapiens
  misc_feature (1)...(436): n = a,t,c or g
cccctaaaaaaaattattttccccttcaccttaaggggcccaaaacaaagggcgtttttttccannnnnnnnnnnnnnnnnnnnaaaaaggagtttccctttgtaacccaaggtggaatgccgtggggccatttgggtttccttccacccccccctcctgtggtcaaatgatttttgtgccccaacccctggagttaatgtgatttcaggcccccctccccccggccgggttatttttgtttttttaataaaaacaaggcccttttggccagggtggtttttaactcctaaccccaggtgatccccctgtttcaaccccctaaaatggtgggatttcagggattaacccccctggccggcccnnnnnnnnnnnnnnnnnnnctttattgagacagtcttgctctggagttcagtggcatgatatgatctcggctca

SEQ ID NO: 155932 - DNA, 873 bp, Homo sapiens
tctggatgcatttgaaaaccataacgtatgatttctttttctttctttccctcctctctcatttaagatgaccttgaatgatgccatgaggaacaaggcaaggctgtcaattacaggaagtactggagaaaatsgacgtgttatgactccagaatttccccaaggcagtgcatgctgtcccctttacgtgaagtcctggccatgggaatggaatgtccagtgtgactgaatctctcggtggattgataaggacccttttgagtgccctaccacaatggttttcctgtgtgtttattgtccaaagtggtgagaggcatcccagtatccttgaagacttttcctttcagcccaagaattccttaaatatgtggagttccatcttgaaattgtaaggaatgattaattaaaacacaacatcctttttcctactcggagttacagaccaaagcgtggtggacatgcacagctaacatggaagtactataatttacctgaaggtctttgtacaggacaacaaaccctgttttctgcagcccactattgttagtctcttgattcataatgacttaagcacacttgacatcaactgcatcaagatgtgacatgttttataaaaaaaggaaaaaaaacatttaaaactaaaaaatatttttaggtattttcacaaacaaactggcttttaaataaatttgcttccatattggttgaataagacaaaaacaattaaactgagtgggaagtgaataaaaaaaggctttaggtatcgattccatatttttcaaagccaaatatgtaaatgctaaggaaagtaaacaaagaggaggattccaatcttgtaatttaatattgttattaaaactttaatgtatccta

SEQ ID NO: 155933 - DNA, 620 bp, Homo sapiens
  misc_feature (1)...(620): n = a,t,c or g
tagagacagggtttcgccatgttgcctaggctggtctccaacctggtctcctgggctcaagcgatccgccgcctcggcctcccacagtgctgggattccaggcgtgnntaccgcgcccggcctatttacttttcttactaagctggggatcaccgtcgccctcggcttggcaggaaggcgggggtaggggagcggtgggaaaggggggtgggcgacgactctgatagagggaaaagaggaagggaaagttggggcttactgcagggcaagctccttaggagaaggtggggaggaggaaggagggaggtccaggcccttcttccatcccacgtcctccacttccccaagtgcaaagaagaaaagaggtacagaacacccagaggtgcccctcgattccgtcttgcactttgcccttctcccaccgtccagcaataaagcgagagaaacaagtgcaggaaactggccggcagtcatgggagaagccaaaaagacaggtgagcagcgcgtccgcctcccgcgcacaggtgagggctcacttctgcctgtcggcggcggcacacacaggaaagagccaagcgcgtgcacgcgggcccgcccctaggccttgcggcggcttcagc

SEQ ID NO: 155934 - DNA, 1356 bp, Homo sapiens
  misc_feature (1)...(1356): n = a,t,c or g
ctagtctcgagttttttttttttttttttttgtagagacagggtttcgccatgttgcctaggctggtctccaacctggtctcctgggctcaagcgatccgcccgcctcggcctcccacagtgctgggattccaggcgtgagctaccgcgcccggcctatttactttttttactaagctggggatcaccgtcgccctcggcttggcaggaaggcgggggtgcaagaagaaaagaggtacagaacacccagaggtgccctcgattccgtcttgcacttgcccttctcccaccgtccagcaataaagcgagagaaacaagtgcaggaaactggccggcagtcatgggagaagccaaaaagacaggagttcagtggcatgaccagggctcactgcaaccttgatctgggctcaagtgatcctcctacctcagcttcctgagtagctaggaccacaggtgtgcaccaaccacacccgactaatttttgtagagatgagatcccactatgttacccaggctggtcttgaactcctgggctcaggtgatcatcctgccttggctttcccaaagtactgggattataggcttgagccaccgtgcctgggcctgtgatcagaattctcattttttttagtcactaaaaatgctgggggggcactccattctccattatgtggattagttcacattggcatgcttgtattcaaaacatcatattattaccccacaaatatatacaaaaaactttaaaattttaagtattaattgctcaggaaaaaattaaaatgctggggtgctgaaatctcaagggccccattacaaaactccttaggaacctcgccctctctctgctgtaaggactggttccagaatgagagaatttaaaagacattccccgcccaaaatgttcataatgtcaccccgggaaacctgcgaatatgttatattacatgaccccagggagaaagtnaaggttgcagatggccagtgaaggtttnctcaatgggctgaccttaagataaggagatgatcctgggattatctgggtggacccaatgtaatcacaagggtcccttaactgtgggaatagtgaggtggcttgagtcagaggcagagtgatgcaatgacttgaaagactttaacccagcccatcacccggcttttgaataccgggaagaccggtcattgagccagggggattgcaggcaggctctgggagctgaaaaaagcaagaaaatggattctcccctggagcctccagaagggatgcggtcctgccaacccccttgtcagtgagccatttcagatttctgacttccaggactgtaagaaaataaacttgtcttgttttcagccacca

SEQ ID NO: 155935 - DNA, 844 bp, Homo sapiens
ccagggtctcatcagtcatgtctacaagcctggaagagattttcaattgcatctttgatgcccatgttcctccgctctggggaaaggcatacccctcacaaaagccattggctgcctggacccgggacttggccatgcgtgtggagcagtttgagctgtgggccagccgggcccggcctcctgtgatcttctggttgtctggtttcacctttcccactggcttcctcactgctgtgctgcagtcttcagctcgccaaaacaacgtttcagtggacagcctctcctgggagtttatcgtttccactgtggaatgacaagcaacctaagtgtatccccccaaggatgggtgtctgggtccggggcctgtacctggaaggtgctggctgggaccggaagaactcctgcttggtggaaggcagagcccatgcaagcttgtttggctcatgcccacgatccacttccggcctgcagagagccgcaagaagagccccaagggcatgtactcctgccccctgctattactatcccaaccgggcaggcagctcagaccgagcctcctttgtcatcggcattgacctgcggtctggggccatgacacctgatcattggatcaagaggggcactgctctactcatgagcctggacagctgagacctcctccttttctccgcttgagagagagggtcagggactccaggagctaagacagatgttgcacctaggactgaggccggacctcactcagactttgaccttggccgaatttgtgtgatgtggccctggagatacctagttgtgttagccataaaagtgaaagagttgtattggaaaaaaaaaaaaaaaa

SEQ ID NO: 155936 - DNA, 497 bp, Homo sapiens
tttaccaaagacaaggaggatttcttcaactcacagtgtgacctcactacacaacaaatcctgccctacattgatgggttccgccacatccagaagatttcagcagaggcagatgtggagctcaacctggtactacggcgttgtgacactggtgtccatcctccaggaagctgatccagttcgggcttatgaagaacctcatcaggcgactacagaagtatcctgtgcgggtgactcgggaagagcagagccaccctgcccggctttatacaggctgccacagctatgacgagatctgctgcaagacaggcatgagctaccatgagctggatgagcggcttgaaaatgaccccaacatcatcatctgctggaagtgaggctggtagtgactggatggacacattgctgtgggtagtccctcctactaggaggcttgtcatactgtctagatgttgactcttagttctgtaaataaagacatccatttcaaacaaaaa

SEQ ID NO: 155937 - DNA, 1370 bp, Homo sapiens
gacgcctctgcgcgaggaacgaggagctacgggcctgggcccggttattgccatgggcagcggctgccgcatcgaatgcatattcttcagcgagttccaccccacgctgggacccaagatcacctatcaggtccctgaagacttcatctcccgagagctgtttgacacagtccaagtgtacatcatcaccaagccagagctgcagaacaagcttatcactgtctagagagcagcttcgtgtccatggaggagagcaagcagaagttggtgcccatcatgaccatcttgctggaggagctaaatgcctcaggccggtgcactctgcccattgatgagtccaacaccatccacttgaaggtgattgagcagcggccagaccctccggtggcccaggagtatgatgtacctgtctttaccaaagacaaggaggatttcttcaactcacagtgggacctcactacacaacaaatcctgccctacattgatgggttccgccacatccagaagatttcagcagaggcagatgtggagctcaacctggtgcgcattgctatccagaacctgctgtactacggcgttgtgacactggtgtccatcctccagtactccaatgtatactgcccaacgcccaaggtccaggacctggtagatgacaagtccctgcaagaggcatgtctatcctacgtgaccaagcaagggcacaagagggccagtctccgggatgtgttccagctatactgcagcctgagccctggcactaccgtgcgagacctcattggccgccacccccagcagctgcagcatgttgatgaacggtcagaggagaatttgctggggcatttgggagttacctgagggaagctagaccctttatgtctctcaggagccctggatcatggggcactgccaatccaagcaggcttcctggagatgatgggctacagagacaaaattgaagggagactacaggaaagggttggcctgcctgaaagaaggcctggccagggcgtcaccccgtcctctgatcctcaccctaggaagctgatccagttcgggcttatgaagaacctcatcaggcgactacagaagtatcctgtgcgggtgactcgggaagagcagagccaccctgcccggctttatacaggctgccacagctatgacgagatctgctgcaagacaggcatgagctaccatgagctggatgagcggcttgaaaatgaccccaacatcatcatctgctggaagtgaggctggtagtgactggatggacacattgctgtgggtagtccctcctactaggaggcttgtcatactgtctagaggttgactcttagttctgtaaataaagacatccatttcaaacaaaaaaa

SEQ ID NO: 155938 - DNA, 630 bp, Homo sapiens
  misc_feature (1)...(630): n = a,t,c or g
tgcactctgcccattgatgagtccaacaccattcaactgaaaggtgattgagcagcggcagacccntcgggtggcccaggagtatgatgtactggtctttacaaaagacaaggaggatttcttcaactcacagtgggacctcactacacaacaaatcctgccctacattgatgggttccgccacatcagaaagatttcagcagaggcagatgtggagctcaacctggtgcgcattgctatccagaacctgctgtactacggcgttgtgacactggtgtccatcctccagtactccaatgtatactgcccaacgcccaaggtccaggacctggtagatgacaagtccctgcaagaggcatgtctatcctacgtgaccaagcaagggcacaagagggccagtctccgggatgtgttccagctatgacgagatctgctgcaagacaggcatgagctaccatgagctggatgagcggcttgaaaatgaccccaacatcatcatctgctggaagtgaggctggtagtgactggatggacacattgctgtgggtagtccctcctactaggaggcttgtcatactgtctagaggttgactcttagttctgtaaataaagacatccatttcaaacagc

SEQ ID NO: 155939 - DNA, 587 bp, Homo sapiens
cacaccatccacttgaaggtgattgagcagcggccagaccctccggtggcccaggagtatgatgtacctgtctttaccaaagacaaggaggatttcttcaactcacagtgggacctcactacacaacaaatcctgccctacattgatgggttccgccacatcgagaagatttcagcagaggcagatgtggagctcaacctggtgcgcattgctatccagaacctgctgtactacggcgttgtgacactggtgtccatcctccaggaagctgatccagttcgggcttatgaagaacctcatcaggcgactacagaagtatcctgtgcgggtgactcgggaagagcagagccaccctgcccggctttatacaggctgccacagctatgacgagatgtgctgcaagacaggcatgagctaccatgagctggatgagcggcttgaaaatgaccccaacatcatcatctgctggaagtgaggctggtagtgactggatggacacattgctgtgggtagtccctcctactaggaggcttgtcatactgtctagaggttgactcttagttctgtaaataaagacatccatttca

SEQ ID NO: 155940 - DNA, 693 bp, Homo sapiens
agctgcagcatgttgatgaacggtcagaggagaatttgctggggcatttgggagttacctgagggaagctagaccctttatgtctctcaggagccctggatcatggggcactgccaatccaagcaggcttcctggagatgatgggctacagagacaaaattgaagggagactacaggaaagggttggccctgccctgaaaagaaagccctggcccagggcgtcaccccgtccctctgatccctcacccctaggaaagctgaatcccagttcgggccttatgaaagaacctcatccaggcgacctacagaaagtatccctgtgcgggtgaactcgggaagagcagagcccaccctgcccggctttatacaggctgccacagcctatgacgagatctgcctgcaagacaggtggaggcaggcgggcagtcagggtgggttcagggcagggtgcgccaggccaaggccactgacctctcctccaccaccccacccaggcatgagctaccatgagctggatgagcggcttgaaaatgaccccaacatcatcatctgctggaagtgaggctggtagtgactggatggacacattgctgtgggtagtccctcctactaggaggcttgtcatactgtctagaggttgactcttagttctgtaaataaagacatccatttcaaacagcaaaaaaaaaaaaa

SEQ ID NO: 155941 - DNA, 1364 bp, Homo sapiens
gaattcggcacgaggcctctgcgcgaggaacgaggagctacgggcctgggcccggttattgccatgggcagcggctgccgcatcgaatgcatattcttcagcgagttccaccccacgctgggacccaagatcacctatcaggtccctgaagacttcatctcccgagagctgtttgacacagtccaagtgtacatcatcaccaagccagagctgcagaacaagcttatcactgtcacagctatggaaaagaagctgatcggctgtcctgtgtgcatcgaacacaagaagtacagccgcaatgctctcctcttcaacctgggcttcgtgtgtgatgcccaggccaagacctgcgccctcgagcccattgttaaaaagctggctggctatctgaccacactagagctagagagcagcttcgtgtccatggaggagagcaagcagaagttggtgcccatcatgaccatcttgctggaggagctaaatgcctcaggccggtgcactctgcccattgatgagtccaacaccatccacttgaaggtgattgagcagcggccagaccctccggtggcccaggagtatgatgtacctgtctttaccaaagacaaggaggatttcttcaactcacagtgggacctcactacacaacaaatcctgccctacattgatgggttccgccacatccagaaagatttcagcagaggcagatgtggagctcaactgggtgcgcatttgctatccagaacctgctgtactacggcgttgtgacactggtgtccatcctccagtactccaatggtatattgcccaacgcccaaaggttcaggcacttggtagatgacaagtccctgcaagaggcatgtctatcctacgtgcccaagcaaagggcacaagagggccagtctccgggatgtgttccagctatactgcagcctgagccctggcactaccgtgcgagaccctcattggccgcccaccccccagcagctgccagcatgttgatgaaacggaagctgatcccagttcgggcttatgaaagaacctcatcaggcgactacagaagtatccctgtgcgggtgactcgggaagagcagagcccaccctgcccgggctttatacaggctgccacagtctatgacgagattctgctgcaagacaggcatgagctaccatgagctggatgagcggcttgaaaatgacccccaacatcatcatctgctggaagtgaggctggtagtgactggatggacacattgctgtgggtagtccctcttactaggaggcttgtcatacgtgtctagagcgctgactcttagttctgtaaataaagacatccatttcaaacagcaaaaaaaaaaaaaaaaaaa

SEQ ID NO: 155942 - DNA, 520 bp, Homo sapiens
ttttgaaacagagtcttactctgttgcccaggctggagtgcagtggtgggatctcggctcactgcaacctccacctcccgggttcaagcgattctcctgcctcagcctcctgagtagctgggactacaggcgcccgccaccacgcctggctaatttttgtatttttagtagagacggggtttcaccatgttggtcaggctggtctcgatctcttgacctcgcgatccactcgcctcagcctcccaaagtgctgggattacaggcctgagccactgcgcctggcagaccacctatattacttttaaccacaaatgaaatagatgacttcttagaaaaacataaaagcagagctgtctcaaaaaccaacagaatatctgcatagcctaaaaaccataaagaaagcagataatgtggttcccgctgtctctccagtgaactttgggtcccacccttttggttaatttaaacccctataaattattccagaatatattaaaaggtagaaaatcgaacgcgtggg

SEQ ID NO: 155943 - DNA, 1233 bp, Homo sapiens
cccgggtcgacgatttcgttcgccattcgtgctgcacttttaattttattaaaaaagaagcaagtatcttcttcataccaaatgctttcacatttctgcctgcaggcactgaccacaaaaatacagacccaacacaacaaaagcaattaacacaagataattaagtggtagttacaagtggtgggcaggggaaagtgcaagaggccagctggctgagcaagtggagtcatcacatgtgtcctcaacattgtgggtttagggatccagtgcaatcagttcacttctaagaggactggggttgaggactcgagctaggctgctctaaacttgtacaaacagaattacaaatcagagtgccaatttatctgtagggtttgtttaagcagttcaaatctgaaagactgctggcagagcccgtgaactggactgagaacaaacgtttttatgagccatcatcatccacctccacaaagtgcctgccttactgtagggtttttctcagccaaatctactcatctgatcaggatgccctcttgcctggacaatgtcagaggaacaaggaaaacaactgagctttccagctcttccttttcaacattccatgttagtccccaaaaagtaacacataatggaaattctctagattacagcttatttcctgtttagtgcattctgtgttgatgtcgtcctttaacagtgaggtagctcagggcatccttagagagactgaagtgttcttggtctgatatctgataccagcaacacatttctttcttttttttttttttttgagatggagtctcactctttggcccaggccccactgcagtggcactatctcggctcgctgcaagctccgcctccctgcaagctccgcctcccgggttcacgccattctcctgcctcagcctcccgagtagctgggactacaggcgcccgccaccatgcccggctaaatttttggatttttagtagaggcggggtgtcaccgtgttagccaggatagtctcgatctcctgacctcgtgatccacctgtctcaagcctcccaaagtgctgggattacacggcgtgagccaccaacgcccggcctttttttttttttgaagatggagtcttgctctgttggccccaggctgggagtgcagtcatggtgatctccggtcaatgcaagctctgccgcctgggttcgagcaattctcgtgcctcagcctcctgattagctgggattaaa

SEQ ID NO: 155944 - DNA, 1165 bp, Homo sapiens
tactactaaattcgcggccggtcgactttttttttttttttttttttttgagccacagtctcgctctgttgtccaggcgggagtgcagtggcacaatctcggctctcggctcactgcaatctccgcctcccgggtccatgccattctcctgcctcagcctcctgagtagctgggactacagacacccaccaccatacctggctaattttttttttttttgtatttttagtagagacagggtttcaccatgttggccaggatggtctcaatctcttgaccttgtgatctgccagccttgggctcccaaagtgctgggattacaggtgtgagccaccacgcctggccggcttatttttatccacagtaaatcttcagcaactcattgtctccaccagatagtatttttctgtaaatgaaatgctgacttcgcctcttcctgctgtatgctcatccctgcactgagcacagatatgacaagcagtagccatgggggaggtgggtgacaaagataggaccccgggagggggcgcaggtacatgctagtttccaattaccacagtattcctagagacgggttgccaatgaccaaggggggccaaatgaaatccaatgccaagatttcttaataatgggccagacggaaaaatgttaaaccaccccaaacgggctgctgataatattttaaaataaacttatttgtcttctttttgcattgtgaaaaaaaacaaaataaattttgtgtgataattttgatgatggaaaggtggaagttctacctagatttgaatgagtgtttttttaagggaatgagaatgtcatggtgctaaacctgacaaataagagatcattgaaatgctgaaaattttaacgagtcttcttaaaagtattgagggggcaaaaaattaccaattatggtatacaaaaataagcctataaatgtgtttcacattgctaacttgagtttcagttgattcaagtttgtaataactagtaatgagcttctgtttacaataaaaattctgataaattgaaaaaaaaaaabbbaaaaaaaaaaaackctcgttttwaaattcaagaaaaattgtgtttatctttagaattttgtattcaatactttatgtactatgtgcctaatgcttctggataaataagcaccaaatatgta

SEQ ID NO: 155945 - DNA, 646 bp, Homo sapiens
agttttttttttttttttttgctgttaaaatagatatatatttaatataatatgtgtgattgtggttacagataacatatttggtgctttatttatcscagaagcatgagtccacatagtacataaagtattgaatacaaatttctaaagataaacacaatttttcttgaatttaaaatatatggggataaatgcttacaaatgggatttataaacctttcacttctacttcaattctcctggbctgtgtcttccgaaggatgagttgctagttgcaacattaaaaaaaaaaatagcttctttcaaatcctggacactatatggacataaaaaagaactttttgggcaaattatttattcaggattgacttgtctccagtgggcaaatttgctcaggcatttactctttgttttgtctatggccttaggcctgtggcatttttctagaaagggaagttaaatggcttttaatgtattaattattacattattgaagttggacccaaatatgttaaatatttcctcttgcaaagggagaagaggaagggaggaacaggggcaaggtggggaggaaaaaaatacctcaggtgagagaacaagtaacttgcaagaggcttattaaactgtatataaatgttgaagaggc

SEQ ID NO: 155946 - DNA, 984 bp, Homo sapiens
cccacataaccttgggcaaaatttccttaaatatgaaccctcaggttctcccatcctgtaaaatggggataaataatgatatctaccttcacagataaaacatttaagtagaatactggacatgcagtaaagtcgttagaaaacatgaaaattccctggttcgtgttatctagcttggccccttgaatttcctgaggggtaggccttgaactagggaagggctggggactgggcttgttccacacccctcatttttaccccatcctgctttagaaataccagatcctattatataatggagatgtagacatggcctgcaatttcatggggggatgagtggtttgtggattccctcaaccagaaggtaaggtagagattcctggccctggaatagagcccgccggggaggaatggggagcgggtatgcctgggagtggccagctggctgcctggctctgggcccacagagggcaagtgtggaggaattcccagccctaaggtcttgctggtagctgtgagcaaggatgcagctgctgtaggctgatgtctttcctggtggggcagatggaggtgcagcgccggccctggttagtgaagtacggggacagcggggagcagattgccggcttcgtgaaggagttctcccacatcgcctttctcacgatcaaggtagggactgggcctgctgagagataactgggccagaggcaaaggagcaggacccacccgtcctttccctctggctgccttttaggctgggtcatgggtcaccatctggcccctgtatgggcaagtttttttggagaggggtggggagggttctgggaagaataaagggtttgggatgaaggaattgcccccgagtgagcagttatatggggaggagggaatggtggggtcaggagctcacgaacattgctcctcagggcgccggccacatggttcccaccgacaagcccctcgctgccttcacccacgcgtccg

SEQ ID NO: 155947 - DNA, 1149 bp, Homo sapiens
  misc_feature (1)...(1149): n = a,t,c or g
ggaacaggctttggtcttctctccagacccactgctgctctcaaaacaagtgtaacttctatgacaacaaagacctggaatgcgtgaccaatcttcaggaagtggcccgcatcgtggcaactctggcctcaacatctacaatctctatgccccgtgtgctggaggggtgcccagccattttaggtatgagaaggacactgttgtggtccaggatttgggcaacatcttcactcgcctgccactcaagcggatgtggcatcaggcactgctgcgctcaggggataaagtgcgcatggaccccccctgcaccaacacaacagctgcttccacctaccctaacaaacccgtacgtgcggaaggccctcaacatcccggagcagctgccacaatgggacatgtgcaactttctggtaaacttacagtaccgcgtttttctaccgagccagaactccaggttatctgaagctgcttagctcacagaaataccagatcctattatataatgggagatgtagacatggcctggcaatttcatgggggatgagtggtttgtggattccctcaaccagaagattggaggttcagcgccggccctggttaagtgaagtacggggacagcggggagcagattgccaggcttcgtgaaggagttctcccacatcgcctttctcacgatcaagggcgccggccacagtggttcccaccgacaagccccttcgctgccttcaccatgttctcccgcttcctgaacaagcagccatactgatgaccacagcaaccagctccacggcctgatgcagcccctcccagcctctcccgctaggagaagtcctcttctaaggcaaagtgcccctggnaggccgggttctgccgccaggacttgcccccttcccagaagccctgtacatcccagacttgggcccaggggtctcccattagacagcctgggggcaagttagcactttattcccgcagcagttcctgaatggggtggcttggctcccttctctgcttatagtatgtcctttatgatgcactgattccttcccaggaacccaacagtgcttaggacagcccacagtgatgtgttggacggactgtaattgttagtttgattatggaacttaattggttacagcttcaaaaaaa

SEQ ID NO: 155948 - DNA, 519 bp, Homo sapiens
ttttttaagagatgttatcttgctggcacccaggccagagtgtagttgtgtaatcataactcactgtttctcccactgaactcccaggctcaagtgatcctcccagctcagccttcaattgtagctgggaatataggtgcgtgacaccatgccagctaatgttttaatttactttactttctatagggatagggtctacgttgcccaggccggtcttgaactcctcgcctcaggtgatcctcgcgccttggccctcccaaagtgttgagattacaggaatgagccattgtgcctagacctaaattagctaacttaatattggaaaattggagccttcagataagagatttgttaggggttcagtccttcctcacaaatatgcatttgggatgaaattaaaatggaagaggcctggttcctaccgctaagcattatgttaacatcccctccccaggaaggcattccttctacaaaaaacatatttactgggtgctgaactaaaaagtatagtgctaaaca

SEQ ID NO: 155949 - DNA, 2451 bp, Homo sapiens
atgcccttcccgcccatgccgccgccgcccgcccccgccccgggggcccaagccgcgcgccagttaccccggaggccctgcgccgcgggggacaagaagaagaggcccccacagcggcccgaggggctcctctccagctcctggccctccgccacgctcaagaggccgccggcccggcgcggccccggcctggacaggacgcagccgccggcccctccgggcgtctccccccaggccttgcccagccgcgcgcgggccccagccacgtgcgccccgccccggccggcaggctccggccacagcccagcgaggaccacctatgcggcgacctcggcggggacggggaccaccgccgcgggcacctcctcgggggcggggccttgtccagactccgctgcgcgcttctgcctgaatctcacccccgaggccgtcctggtcatccagaagcgtcatctggagaagcagctgctggcgcggccccgcaggcccttcccctcaccctcggccgaacccaggcgcctactcgccccgtgtctcccggctagggccgcgggcccgcggaggggcggccccgccagcgaccccgacgcaccccccaccgccggccagggccgccgcgcgcctccgcccggcgcccagctgctgcacggcggcctgcaggttccccagctcagcccgcggcccggggccctgcggccgatgctcaaggtgtcgctgctcaacgagcggcacaggtacgacgacgtggagtacgaggaggagccagaggcggtggacgagggcctggggccctcgggggagaccgcaggctcctctggccgccagcgcccactttcgggacaccagtgcgcaagctggcccacgtggggcgcagccagactcgcccgacggccacggcccccctcctgccctcgccagccggcagcccgggcctttctcgttcacaccggtggtatctaccccagatgcctgcctctgcccccactctggcctcctcttggcatcgccgagcatccatgcagttcgtggggaattaagcaactgagaaaatgcctcttggtgccccgacccccagggttcgtctaggtcccagagaccctctgcctggaggcgggccttccccagggctacatctgcacgccccgtggtgtcaccctcagccggcgccgggcaccctggacagtgcggtgggcgatggcccaggtgggtggccgcgacggtggcctcctgcagagctgggacccggtcctacattcgtgattttgttttctcccaagtcagaaaaatgttgagggtattagacatccctgaaactcagttaaccgaatttccagtctccaaagcggaagggtaggcatcgccaggcgctggtgagccctggtcaatgagcgcttccatggaaaccgctcggctgattacattttttctgtgtattatttgaatagagagtaaagctcctccgctgtttcgtaaccatatcctttcccccgcttaactggaggctgatttctacatatttcttccatgtatctgagaatatctaacttagaaggatgagaaggaaataaaatgttattaatccagttaaggctggttataaaagagtaatgtattacctcaatttttgactgactttgtaaaagccaataactggtttaatgtttatcttgatagactttaaatgtatcaagtcttaattgtattttaaattgaaggccttacatttttaaaacaggttttgtatttttcttgtgggagggtctttgctctaataaccacacacacactgtctctctctctctctctctctctaattctaggcacacatttagttagatgtgaagcatttaattcattgggagctaggtcagctgccagatgagttgcaaaaacagaaaaaaacctacccattgaataacttctttgaatttggagataagttttcttttacttaaaatgaatatattaattctagaggggcaaaactagcaatgcttatgcaagtgacggtgctgctcttgttccacccccacccagatggtctctgagtgcgccgtcctgggcagggcacacggtctggagctgagagggtggagcaagagtgcactgactccgagccgagggcaggagtggctcaacttggtctcgtcttgcacttagtgcaaataccaataattaagatgcctaagacttctgcccttggtcacagtaacaacaacattttggaagacttttcccctggtggcatcctagagggaccgactttctgcagcctctgtcttccaagctgagcttctgctgcagtgtggctgtcactgcacctgtgtgtctccctgacgtccctgtcagctgcttcattttgatttccttttcttctcccgccctttctgtaggctctgtcccagcatctcctgttcttaactggccacaatacaacactaagcgcatttt

SEQ ID NO: 155950 - DNA, 251 bp, Homo sapiens; identical to SEQ ID NO: 121834
  misc_feature (1)...(251): n = a,t,c or g

SEQ ID NO: 155951 - DNA, 1929 bp, Homo sapiens
gaatactaggctttcctttttttgtgagatgggggtctcacactgtggctcaggctggagtgcagtggtgtgatcatggctcactgcagcctcgaagccccggggtcaagtgatcctctcacctcagcctcctgggtagctggaaccacaggcacgcaaccaccactcctggctagttttgtttttttagtagaataaggtctcactgtgttgcacaggctggtctctaactccttacctcaaaccatcctcctgccttggcctcccaaacatgttgggattacaggtgtgagccactggacctggccaaatactgggttttcagtgctcactgccactaataaaaatctgaaattctttcattatgcaatttctaagtgcctggtgagggccaagctcagttctaggctcttgaagattgaagagagaaacaaggctctgtctgctcctgttgtctctgtgagcatctttgacagagtgctcagattgttgggatatagtgcatcggactggcagcctgaatttgtggagaccgcagtcagtaactttgtgatatatggaatatttagaggacagtaacccatttccctacagccctacctgatcacatcgtgccctgctgggccataccccaaacagcccaccttcctctaggcctggccatggccctgtgcctgccacattgaggattaagtcaggatatcttgagccctctcaaatccctgtttattcaggcctctgccacatatagagccagccttctgtccccaccacttccactaccatggagcccacttaagtaaaacgctctctggggcccagcttcgccagaaaagacaccaggggaagcaaggctcaaaaccaggggcagctaaatctgatcttgtgggaccagtctctaagtaagggctttcagcgtcggctgtctgtccattgctttccaaataggatgcagcaatgattggtacatgggtattaagatcggtagtaggggctagtccaagtttagcaatagccaaactggagagcctctgaagtatgagagtcccagagggatttgtcagctcctggcagacatcctgattttcaccttcctgagtctaccctaccccagagggtgccagtctcactgtggtgaatggttagcccagtgttgtgctgcactcacacaccaggacggtgtccggtgcttgcaggctggtgggatgctgtcctctgggttaagactgtctcccttctcgggagcactgggagggttctccatcttgcgtgtttcagtgggaagttggcagatacggaaaacaggcccctataggggaaggcagttccatgtaaaatgaattaatttctttcccaaaagacttaaaattttttcctatttcaattttcctttcaaaaaaggaaatacattcatgtagttcaaaacttaagaaaacaaaagtctgttcagcaaaagactcccactccgtttccccaaacgctgagccccaccccccatccctggtagccaagaagtgtttccaaattttaaggtttaaagaaacaaagtcccctggatttgtgttagggatgtcttccctgagagtgggttgtgttcccgtttgaaccctggcggttgaacctcggccccactaggatcatgcccgccctctcccagggaggagggcctccccatcaccctgtacaattggcacccccagccactggcactgcccgcccttgctcagcgtacctttcccaatgggactctgacgtactggatgtttggtttctgaagttactggctgtttaccctgccgggatgtaagcccctccagggcaggggcttgtctcgtgttcagtgctgcatcccagcttgctgggcacggtacctggtccatggcgttcaataaatcaccccttggatgagtgaaaaaaaaaaaaaaaaaa

SEQ ID NO: 155952 - DNA, 1444 bp, Homo sapiens
  misc_feature (1)...(1444): n = a,t,c or g
ttgtttnacataatacagaatatatagtggctaccttgtatcttggtctggattctctctctgagaccccggattttactttctctttggagggcgctgggacatacatctctcaatccagcttcctccgcatcctcccatcttgccccatttctgccacgtcagacacttcctgagagtctcaccttcaaaatgacaccgctgcccatccattgctcaatggtacagagtgtggggtcagtccaccacccttgacctcccggcagggcaaggtgaggaggcggacccaaagcagtaccagcaggacttgttgccagtgataccaaaacagacttttccccaaccagtgcttcacatgtctgctggtgtggctttgggattctcctgccccacccccccgtccatggcagccccctccccaaggctttgctcacacctgagacaggaaggaggaaggggatccaataggaatatgggccccggaggggaagtcatgcacccccaagccaccaccccccagccttccacgcacatctcctggctggaagagagccctccaaaaaggggacacaggctgccccggcccctcaactgcatccacaccccatcctctcatcttgggtcccagccaggcccccccaaaaccaaagccccctcaagtcctggggtcccagcatgtgctcccagcttcctgccctaccagccccgagcatttctctcacagagaaagaacaagcaagggctccagggggacaggatggggcagggcatacagtggggggtgggggggcagctgggaggagggagggacaaaacaaaacattttcctttgggttttttttttctttcttttttctcccctttactctttgggtggtgttgcttttcctttccttttccctttgagattttttttgttgttgtttcctttttgtattttactgatatcacccaggatagtttactctcctgtctagcttttactcttaccgacacactggataacacacacatacaacacccacaaaaatgctcatgaacccaatccggagaaggttccagcaggtcccccaccctcccctcctcctcctacttctcctcttgaacagcgaggacaggaagggggacaaggggacacctggggcagacccgccggctctccccccaccccaccccgcccctcacatcatactccaatcataaccttgtatattacgcagtcattctgatgttggagcggccgcgcctacctaagtaccatttacagaaagtgactctggctgtcattattttgtttatttgttccctatgcaaaaaaaaaatgaaaatgaaaaaagggggattccataaaagattcaataaaagacaaacaaaaaaaaaagaaaaaagaaaaaaatgtataaaaattaaatcaagctatgcttcgactcttaaaaaaaaaaaa

SEQ ID NO: 155953 - DNA, 397 bp, Homo sapiens
  misc_feature (1)...(397): n = a,t,c or g
tttttgggcccctcaaaattcccccccccggggttcccccctttttttcccccacccccccgggaaagggggaatcagaggnnnnnnnnnnnaccgggnnnnnnnnnnnnnnnnnnaaaaaaaaacgggggttcccccgggttaacccggaggtttttttccccctcccccctaaaatttnnnnnnnnnnnnnnnnnaaaaaatttgtttaaggggtttggtccaatttnnnnnnnnnnnnaannnnnnnnnnnnnnnnnnattgaccnnnnnnnnnnnnnnnnnnnnnnnnnnnnnnnnnnnnnnnnnnnnnnnnnnnnnnnnnnnnnnnnnnnnnnnnnnnnnnnnnnnnnnnnnnnnnnnnnnnnnnnnnnnnnnnnnnnnnnnnnnnnnnnnn

SEQ ID NO: 155954 - DNA, 390 bp, Homo sapiens
  misc_feature (1)...(390): n = a,t,c or g
ctaattctaaataccaagcggccggcctttatatttgatttgttgcataatttggatccaaaagaacaagcttatgcggatttggtttctgcatacacattaaattcaatgttttggctttatttggcaacccaaggagttaatcctaccgaccatccagtaaaacatgaattggacacaacacagcctgtatgaacagannnnnnnnnnnaacagacaaaaaaaaggctggtttgctgtacagaggggcagcttcaaaatttgtaaaaaatgccctttgggaaccaaaatcgaaaaatgcataaaaagttggcaataaaggaaaaagcccaacctccctttttgggtttgatgtacacatattcaaaaagaacatgttgcccccccccg

SEQ ID NO: 155955 - DNA, 1551 bp, Homo sapiens
atgccggagcgagatagtgagccgttctccaaccctttggcccctgatggccacgatgtggatgatcctcactccttccaccaatcaaaactcaccaatgaagacttcaggaaacttctcatgacccccagggctgcacctacctctgcaccaccttctaagtcacgtcaccatgagatgccaagggagtacaatgaggatgaagacccagctgcacgaaggaggaaaaagaaaagttattatgctaagctacgccaacaagaaattgagagagagagagagctagcagagaagtaccggggtcgtgccaaggaacggagagatggagtgaacaaagattatgaagaaaccgagcttatcaacaccacagctaactacagggctgttggccccactactaaggcggacaaatcagctgcagagaagagaagacagttgatccaggagtccaaattcttgggtggtgacatggaacacacccatttggtgaaaggcttggattttgctctgcttcaaaaggtacgagctgagattgccagcaaagagaaagaggaagaggaactgatggaaaagccccagaaagaaaccaagaaagatgaggatcctgaaaataaaattgaatttaaaacacgtctgggccgcaatgtttaccgagtgctttttaagaacaagcatataagcggaatgagttgttcctgccgggccgcatggcctatgtgcaaggttgactgccccaccatggaggcccagaccatactgaccacaaatgatattgtcattagcaagcttacccagttgctttcatacctgaggcagggaacccgtaacaagaagcttaagaagaaggataaagggaagctggaagagaagaaacctgctgaggctgacaggagtattttcgaagacattggggattatacaccctccacaatcaagacaccttgggacaaggagcgggagagatatcgggaacgggagcgtgatcaggagacagagaccgtgaccgagagcgagagcgagaacgagatcaggagcgagaacgagatcgggaacgagaacgagatcgggaacgagagacctgggtcggccaaggagttgatcaagtccatcaatgaaaagtttgctgggtctgctggctgggaaggcacagaatcgctgaaaattgcagaagacaaaaagcagctgagagatttctttggcatgtccaacagttatgcagagtgctatccagccacgatggatgacatggctgtggatagtgatgaggaggtggattatagcaaaatggaccagggtaacaagaagagaaccttaagccgttgggactttgatacccaggaagactacagcgagtatatgaacaacaaagaggctttgcccaaggctgcattccagtatggtatcaaaatgtctgaagggcggaaaaccagacgcttcaaggaaaccaatgacaaagcagcgctcgattgccagtggaagattagtgcaatcattgagaagaggaagaagatggaagctgatggggttgaagtcaaaagaccaaaatactaa

SEQ ID NO: 155956 - DNA, 3165 bp, Homo sapiens
atggaacagtttctatggcaggaactctttgccgaatacaaccgacaggcctccgcccaagtggatttgggtgaggatcgcacggagtactacgaccagttctgcaaggatgtgccaccgaaaaacgaagagaccgaggaagttctggtcaacaatgggccgacgtggagcgcccgcaccgtggacagtcacctggggcaaaaggatctcagccgcctgcaaaaagttttcgtggacggatttggttccagtgacctgcagtcgatcttcttctccagcctaaacattcaactgactgatgccactcagaaggagccgttgtgcaagaagattgctacgctgcattccgaatccaagctgaacagcttcgaaaaagactactactacattggtgctagcagaaacctgggttgctccgctaagattgacgagggtctgctttccaaggtgtatagttccctgaactcggagctcggcagctctcaggagatcttctaccgcgtggtcacccacaaagtgctcggcgtggagatcaatgaagccactcaggaaaaactagtgaagcgtttgcaagaactgctcaagaaggacgacacactcagcggcctgggatacgctttcaatgttgctccacttctgggtgccagtgcctcctttatcgcaaatcgcgtggaggatgccatcgtgcaagcagatgaagttgacggcaagctcttgcaattcgaaggcggtctcagtatcacatccctgatcatcaatggtgctttcggtgtgagcaagacctttaacaagcccgtgcccattactgctgaccaggcagttaagtttgctaactacttccttagccgccgatccgtccaaaccgccaaaggagctcatgtgctaatcgaggcgctgaagactattagtggagccgataaaattgctcccgtttgtgtgcagctcattggcaacggtcaattggacgctcagtcgccgactctgaacgtagccgttgttgatctgctcggcaagcctttgtcacctgcccccaaagtcatcaatgcaaaggttattcgcaagaaggacagctctgttttagctgataaaatcactgtggcctcgaaatcctcggacaaaaccacctatgtggctgatttggccagcttaaagccagctcgcggcgtttaccaggcggagttgagtgcagatggtgtctacacccagacactgcagttcaaggttcttggccgcgtcaaggttcaatctctcgaggtgggcattgcggaatctgatgctagcgctgctacccgcaagcagagtgtgacctatccaggaaaactgcaggaggttctctccgctgacagcacccagaagcttttgctgaaggccgttctggtagatgaatccaccagcaagcctctggctgtccatcaggcattcgttcgactctacaacaagaaaactgacaaggagatcatctttgtggccgagcaggatagcagcaaggcgtacaaattcgacatggatgttggcaacaacggaaagaactttaactaccagagcggcacctacagcatttacttgaccgtgggcgattcctctttgtccaactccttcgagtggttagttgctgaagtccaattgaaattcaacgaggataaggaagtcaagcctaagaacacttctggtcccctgcccgaaatcatccatcagttccgagtgcccgataagcgcccgccccgcattgtttctgatatcttcaccggactgtgcataaccccgcttgtgctgcttttcgttttttggggaaaactgggcatcaatgtatctaacctgacgctggcaccgagtacgatcgggtttcatctgggtttcggtggcattctggtgctgttcttcgtgttctggctgcagcttaacatgttccagacactgcgcctgctgattcccatcgcagtattcacattcctggctggcaaccgattactgagacgtctttacgcacaacgtaactcgaaggcaagtgcgtcgtataacacagatgttctggaacaggaattaaaagaaattaaggagtgtgcccagaccacactgaccacaaatgacattgtcattagcaagctgacccagatcctttcatacctgaggcagggaacccgtaacaagaagcttaagaagaaggataaagggaagctggaagagaagaaacctcctgaggctgacatgaatatttttgaagacattggggattacgtaccctccacaaccaagacacctcgggacaaggagcgggagagatatcgggaacgggagcgtgatcgggaaagagacagagaccgtgaccgagagcgagagcgagaacgagatcgggaacgagagcgagagcgggaccgagagagagaagaggaaaagaagagacacagctactttgagaagccaaaagtagatgatgagcccatggacgttgacaaaggacctgggtctaccaaggagttgatcaagtccatcaatgaaaagtttgctgggatggatgacatggctgtggatagtgatgaggaggtggattatagcaaaatggaccagggtaacaagaaggggcccttaggccgttgggactttgatacccaggaagaatacagcgagtatatgaacaacaaagaagctttgcccaaggctgcattccagtatggtatcaaaatgtctgaagggcggaaaaccaggcgcttcaaggaaaccaatgacaaagcagagcttgatcgccagtggaagaagattagtgcaatcattgagaagaggaagaagatggaagctgatggcactttggcctggtgctcatcattaggtgtcactactgcttcctggctggatgccacgctgccactgtctaccctgagcccaagatttgtggcctcaccagatccaagaaagctagaaagtcaccttagccattaccttgtctttgattatattcaccttgtccttctcagcatggaccgcacttgtgaggagaggcccgctgaggatgggagcgacgaggaggacccagactccatggaagccccaacccggatccgggacactccggaagacatcgtgctggaagctccggctagtgggctggcgttccatccggcccgtgacctactggctgcaggggacgtggacggggacgtgttcgtgtga

SEQ ID NO: 155957 - DNA, 3549 bp, Homo sapiens
atgccacgcaagaagcgcagttccagccccacggagttctttgatgacgacttcgatgaggatgccagttctcaaagctcccaaccgccggtgcagcgaaatgcggcaaatgcccgggagcggatgcgtatgcgggttttatccagcgcctacggacgtttgaagaccaagctgcccaacattccgccggacacgaagctctccaagttggacacgttgcgtttggccacgctctacatcaagcagctaattacggctgtggagacaggcagccactcgcagaaccacccgcacaaccacaaccagcaccacagcctcaaccacagtcactcgagtaccaccagttccgaaggcctggacacaagtcacatggcagattcgtccggtggaggcaattataatttccacaacaacggacacggcatgaaggaacgcagcacggccaccttcaatccccgggagttctccgttctgtgggccggcggcgaggagcgattcaaggagaagaaggccctggagaaattgtttttggaggatccagcccttcaggacgacttgcccatttcctatttgtcacacaaggagctctatgagcacagcttgcgcaaagcctgcatcataggagagaagatccgcaagctacgtgctgatggcgaggatggagtggatacttacaatgctctgcttggtggatccttgggatcggctattctaaaggagggcaatccgcttgcgctgcactacgtgatgttcgtgcccaccatcatgggccagggaacgatggatcagcaggtggaatggctgagcaaggcctgggactgtgaaatcattggcacctatgcccaaacggaactgggacacggaaccttcctgcgcggtctggagaccagggctgactacgatgccagcacccaggagtttgttataaacactccatcactcagtgcatacaagtggtggcccggtggattgggacacactgctaaccatgcggttgtggtggcacaactctacaccaagggcgagttccgtggtctggctccttttattgtccaattgagggattccgatactcaccgtcccatgcccggcatcgacattggagatattggtaccaagctgggcatgaagggtgtcaacaatggctatttgggactgaagaacgtacgggtgcctttaaacaacatgctgatgaagaaccagcaagtgctgcccgatggcacatatgtggcgccgaagaatagcgtgcttacctacggaactatgatgtttgtgcgttgtgctcttatccgtgataccgctcagagcctggcaaaggcatccactattgccactaggtattcagctgttcgccgacagagtcccattgatcccaatcaaccggagccccaaatcatggaccataccacgcagcagttgaagttgttcccccagatagctaaagccatcgttttcaaaacgacgggtgatggcatctggaatatgtacaacgtgatatctggcgagattgagcagggtaacttggatcgcctgcccgaaatgcatgcattgtcctgctgccttaaggccatctgtagtgccgatgccgccgccggcgtggaaacgtgtcgtctgtcatgtggcggacatggctacatggactgctccaacttccccacgatatacggcatgaccacggccgtttgcacctatgagggcgagaacacagtgatgctgctgcagactgctcgctatttggtgaaggtttatgggcaggccttgaatggagagaagctggtgccaacggtttcgtacatcagtgatgcaataaaccaaaccaagtttgttaactttgacggatcattgaggtctattgtcaaggctttccaattcgttgccgccaacaaaacccgaattgcctatgagcagattgaactgcgccgcaagcaaggttatggtaccgaggtggcagctaatctatgtggcaccttcctaacagcagctgcagatcttcatggacgcgccttcctagcgcagactgcctatacggagcttttggccttgtcgcgcgaggtgtccccagaactagctgaagtcctaaaggtggtgctggagctgtatctggtagacgcctgcctcaaccgcattggcgacttcttgcggttcattgatctcactgatcaagatgtcacgaaactggaggttcgcctggagaactgcttaaaacgattccggccgaatgccgtcagcttggtggacagctttgatcttcacgatcgcgtgctagattccgcattgggtgcctatgatggaaatgtttacgaacacatcttcgagtctacgaagaagaacccgttgaacaaggagccagtcaacggagcattccacaagggtttagaggccaatgaacgaaaacgtacgttaagggacgtctatgctctaaaggttggtgacagcgaaagaacgataacaaaatgccggagcgagatagtgagccgttctccaaccctttggcccccgatggccacgatgtggatgatcctcactccttccaccagtaatcgtcacctccacaaagagcgactcgctgtataccgttggcatgctagctttatctgttcgggcaatacgatgcccattgtacttgttgactggtctgatattcgtgagcaaaaacgacttatggtattgcgagcttcagtcgcactacacggtcgttctgttactctttatgagaaagcgttcccgctttcagagcaatgttcaaagaaagctcatgaccaatttctagccgaccttgcgagcattctaccgagtaacaccacaccgctcattgtcagtgatgctggctttaaagtgccatggtataaatccgttgagaagctgggttggtactggttaagtcgagtaagaggaaaagtacaatatgcagacctaggagcggaaaactggaaacctatcagcaacttacatgatatgtcatctagtcactcaaagactttaggctataagaggctgactaaaagcaatccaatctcatgccaaattctattgtataaatctcgctctaaaggccgaaaaaatcagcgctcgacacggactcattgtcaccacccgtcacctaaaatctactcagcgtcggcaaaggagccatgggttctagcaactaacttacctgttgaaattcgaacacccaaacaacttgttaatatctattcgaagcgaatgcagattgaagaaaccttccgagacttgaaaagtcctgcctacggactaggcctacgccatagccgaacgagcagctcagagcgttttgatatcatgctgctaatcgccctgatgcttcaactaacatgttggcttgcgggcgttcatgctcagaaacaaggttgggacaagcacttccaggctaacacagtcagaaatcgaaacgtactctcaacagttcgcttaggcatggaagttttgcggcattctggctacacaataacaagggaagacttactcgtggctgcaaccctactagctcaaaatttattcacacatggttacgctttggggaaattatga

SEQ ID NO: 155958 - DNA, 2234 bp, Homo sapiens
atgccggagcgagatagtgagccgttctccaaccctttggcccctgatggccacgatgtggatgatcctcactccttccaccaatcaaaactcaccaatgaagacttcaggaaacttctcatgacccccagggctgcacctacctctgcaccaccttctaagtcacgtcaccatgagatgccaagggagtacaatgaggatgaagacccagctgcacgaaggaggaaaaagaaaagttattatgctaagctacgccaacaagaaattgagagagagagagagctagcagagaagtaccggggtcgtgccaaggaacggagagatggagtgaacaaagattatgaagaaaccgagcttatcaacaccacagctaactacagggctgttggccccactactaaggcggacaaatcagctgcagagaagagaagacagttgatccaggagtccaaattcttgggtggtgacatggaacacacccatttggtgaaaggcttggattttgctctgcttcaaaaggtacgagctgagattgccagcaaagagaaagaggaagaggaactgatggaaaagccccagaaagaaaccaagaaagatgaggatcctgaaaataaaattgaatttaaaacacgtctgggccgcaatgtttaccgagtgctttttaagaacaagcatataagcggaatgagttgttcctgccgggccgcatggcctatgtgcaaggttgactgccccaccatggaggcccagaccatactgaccacaaatgatattgtcattagcaagcttacccagttgctttcatacctgaggcagggaacccgtaacaagaagcttaagaagaaggataaagggaagctggaagagaagaaacctgctgaggctgacatgaagtatgtatcctagcccctggcatctgatcagagggagggggtctgtacatttcttgtgtctggcattttggggaggtgctgacatgagaatctggagaaatggtcagggggagtgaaggtgtatgtgtgaatttggccagctagtgatctccattttcccagtatttttgaagacattggggattacgtaccctccacaaccaagacacctcgggacaaggagcgggagagatatcgggaacgggagcgtgatcgggaaagagacagagaccgtgaccgagagcgagagcgagaacgagatcgttaactatgagcgagagcgggaccgagagagagaagaggaaaagaagagacacagctactttgagaagcccaaagttatattgttgggcccctggacctttgacaaaggacctggttctaccaaggagttgatcaagttccttcattgaaaagttttgctgggtctgctggctgggaggctacagaatcccctgaagaagccagaagaccaaaaagcagctgggggatttcttgggcatgtccaacagttattcagagtgctacccagccacgatggatgacatggctgtggattagtgatgaggaggtggatttatagcaaaatggaccagggtaaccaagaagggggcccttaggcccgttggggacctttgattcccccaggaagaatacaagcgagtttttgtgactaccaaggaagctttcgccaagggttgcattccgagtatggtatcaaaatgtcctgaagggcggaaaacccaggcgcttcaaggaaccccaatgaccaaagcagagcttgatccgccagtggaagaagatttagtgcagtaagtaggatggccccttgggtgggagggtttcagctgggagaagacattagcctgcagattcaggaacaggcaaggggctggagagccatggaaatgagaggtcagccttgggcctcaggtgagcttagatgggcagcttggtgatagactatcctgttgtttttgcagatcattgagaagaggaagaagatggaagctgatgggtgagcggcattattcttcctctgtgggactggtgggaattgcttagtgtattgatcttatactgacccatttctccttccattgcagggttgaagtcaaaagaccaaaatactaatcactagttacaaccagagatgctccacaaggatatgctccccacggttttctttctacaatttccaaaggttgcaagatgtttttttgtggatgaatataaaattttattgtgtaattacttggttccattaaaattggttaacttgcaaaaaaagaaaaaaaaaaa

SEQ ID NO: 155959 - DNA, 546 bp, Homo sapiens; identical to SEQ ID NO: 119987

SEQ ID NO: 155960 - DNA, 541 bp, Homo sapiens; identical to SEQ ID NO: 119882

SEQ ID NO: 155961 - DNA, 1074 bp, Homo sapiens
ttagctcagtggcaaaaactgccagtatcctctgcagagccggctgctggggtccatgccaataaacactaatggcacctttgctgtgaaggctatggtgaatcggcagatgccatatgggctgttgtaaccctcagtggcaaagtctgccaaggtgctctcattgttctgtaatggtggttttccacttttcttaccaataagctgctttgccttgtctatttgtgcttccaaatcctcctgtttaatttcacttttccccatttccacatacggcacaatcaggagctgtgctatgcgctctcctggctctgctttccagggaacagaagtagatgtaacaatttgaatttctccattgtaatctgaatcaatgactcctgtatgtatttgtactccttttaaatttaaattagaccttcctagaagtaatcctattgtccccgctggcaagggtccacagactcctgttgggaccttttgcaggggttccccaggcagaaggctcacagcttttgtgcagcataaatctaccacggcactaccagctgtggcaggggacagacattgcccaggggtgagggaatggcctgagccggaaatgctcccatttggaatggggcccgaaattgggttcccatctttatcaaagttagagtgacaccaattagcccaatgttttcctttttcacattttggacatatttcaggctcagcagttttcttttttcccctatctggcagcctgattcgctgattttttctacattcttttttagtatgaccatgcttcccacagttagaacaagctccaggaaactgagtatttcctttacccactctcagtcctgccattgcttgggctagcagagtagccttaggcagattacctacgataccatcacaggccttgatataatcaactaaatgtactttccctctaataggtcgcagagcagcctggcactcgggattagcattgccgaaagctaataaccgcaacgctatatcctgagcagctgaatctgcaatcacctttttaagagactcctgtaaccgagctataaaatccat

SEQ ID NO: 155962 - DNA, 1284 bp, Homo sapiens
ttagaatggggcccaggacgggcccataggtgtttcccgaaaccgggttcccacctttatcaaacttagagtgacactgattagcccaatttttttttttttttttttacattttggacacatttcaggctcagcagtttttttcttttttcccctatctggcagcctgactccttgattttttctacattcttttttagtatgaccatacttcccacagttaaaacaagctccaggaaatggagtatttcctttatccactctcagtcctgccattgcctgtgctagcagagtagctttatgcagattacctccgataccatcacaggccttgatataatcaactaaatatgctttccctctgataggtcgcagagcagcctggcaatcaggattagcattttcaaaagctaataactgcaacattatatcctgagcagccaaatctgcaatcatctttttaagagactcctgtaaccgagctataaaatcaacatatggttctcttggtccctgttttatagcactaaaggaaaggtattgttccccacctgaagtgattttttcccaagctctaatgcacactccactaagctgttctatggcatcatcctgcatgaccagatgtgcatctaaatcagcccagccaccaacccccaaaagctggtctgcagttatattaatttgaggttgggcctgggcattttgagcagcctgaatggaagcttcatctgcccaccaagttttaaattgtaagaaccatgagcatgggatgtgtttccatttgtttgtgtcatctctgatttctttcagcagtgttttgtagttttccttgtagaggactttcacctccttggttaggtatattcctaagtattttattttttttgcagctattgtaaaaggggttgagatattgatttgattctcagcttggtcgctgttggtgtatagaagacctactgatttgtatacattaattttgtatccagaaaatttactgaattcttttatcacttctaggagctttttggaggaatctttagggttttgtaggtatacaatcacatcatcatcaaacagagacagtttgactttctctttaccaattgggatgccctttatttctttctcttgtctgattgctctggctaggatttccagtaccggacggccactctgggcgctgtcacaggaataggctccatgcagggcccacagcaggccagaccaggcatgaacgagtgagtgcaggatctgaccagccagcactccgggcgccat

SEQ ID NO: 155963 - DNA, 462 bp, Homo sapiens
cttattctcatggacaaggcatgggtccacagaagagagaaaccatgccagcagacctcatatcatctaggcttggaaatgatgcactgttacacctccaccacaagatactggccaaagcaagtcataaagtactcgagtgtcctccagcttagttccacgttctccaaccgtcgctccggtgacccttcgacctggattcgagcccccgtgatggacgccacttgccaagaccagctcagtgctaacccagtggtgctagaggaattaaaggcgcacacacagaaatatagaggtgtggagtgggaaatcaggagtctcacagccttcagagctgagagccccgaacaaagatttacccgcgtatttattaacagcaagccagtcattagcattgtttctatggatattagattaactaaaagtatcccttatgggaaacaaagggatgggccgaaataa

SEQ ID NO: 155964 - DNA, 1062 bp, Homo sapiens
ctaaagcctccagtttttcttgtctctagcattagatattgcattagcaactaggcgatcagccatttgattcccttcagtcaaaggtcctggaagaggtgtatgagccccaatgtgagtgatgtaaaaagggtgcattctacttctaactgctgtttgcaattggataaataaagtcatcagtttttcatctgtatgaaatcgtaactgagcattttcaattaactgtgtggaatgaaccatgtatgaagaatcagaaatcacgttaataggcatatcaaaagcagtgaatacctcaattacagctacaagctccactctttgagctgaagtataggatgtctggaaaactttactttttgatccagaataagaagctttaccattactagacccatctccgataccatcacaggccttgatataatcaactaaatgtgctttccctctgataggtcgcagagcagcctggcaatcgggattagcattgtcgaaagctaataactgcaacactatattctgagcagccgaatctgaaatcatctttttaagagactcctgtaaccgagctataaaatcaacatatggttctctgggtcctcctctaagccgttctatggcatcatcctgcatgaccagttgtgcatctaaaccagcccagccgtcgacccccaaaagctggtctgcagttatattaatctgaggttgggcctgggcattgtgagcagcctgaatggaagcttcatctgcccaccaagttttaaattgtaagaactgagcaggagttagacaagctcgagtaagagtgtcccagtcagtaggaattatccgactggaaacagtaacattctttaacagtcccattacaaaaggagaacctggtccatactcatttattgcttgttttaattttttgagtaatttaaaaggaaaaggctcaaatgtagctgtaatatttccctcttgatctggggggtgtattctaacagggaactgccaagcctctaaatcaccctctcgtctagcttgctgaattcctgcctggatagaactaagagccat

SEQ ID NO: 155965 - DNA, 999 bp, Homo sapiens
tcatttaatttcacttttccccatttccacatatggcataatcaggggctgtgctatacgctctcctggttctgctttccagggaacagaagtggatataacaatttgaatttccccattgtaatctgaatcaatgactcctgtttgtacttgtatcccttttaaatttaaactagaccttcctagaaggaatcctatcgtccccgctggcaagggtccacagactcctgttgggaccttttgcgggggttccccaggcagaaggctcacagcttttgtgcagcataaatctactgtggcactactggctgtgatggggacagatattgtacagggatgagggaatggcctgagctggaaatgccccgtttggaatggggcccaggatgggcccctcatgtcgtttcccgaaatcaggttcccatctttatcaaacttagagtgacaatgactagcccaatgttttccttttttacattttggacatatttcaggctcagcagttttcttttttcccttatctggtggcctgactcgctgattgtttctacattcttttttagtataaccatgctgggctagcagagtagccttatgcagattatctccaataccatcacaggccttgatataatcaactaaatgtgctttccctctgataggtcgcagagcagcctggcaatcgggattagcattgtcgaaagctaataaccacaacactatatcctgagcagctgaatctgcaatcacctttttaagagactcctgtaaccaagctataaaatccgtgtatggttctcttggtccctgttttacaatgctaaaggaagggtattgttcttcacccgaagtgacttttttcccaagctctaatgcacactcctctaagctgttctgctctgttacttcttctgttacttccttatactttccttcttcttcatcatcagtgtgaaaaggttccaaggtggaacgaaccagagcccacactagtcccat

SEQ ID NO: 155966 - DNA, 1617 bp, Homo sapiens
ctggatcttagaaccaaatttcacccagcaccaactaccactggggaggtgcagagtatggagaagacctgatacagtgacagccaaaagctgagcatgcagcactaaatctgaggaagactttccaacacgccagccataccccacccttttcagcacagcaataaaatccacaccgtccgcatcagccttggctatagcatgccctggtgcagcactgttcatgttctgacatgcaaaggcccagtgcttctggcccatagctcctggaaccttctccagatggagcagctgtaagatgccagtgccaccaccagcacaggttcctaagtcattgtgtggagtactaagctcctcttgttgacccggcaggcggtccccggggccagctgagcctcccagccgggcctgcaggccctgcaggcaggacagcgggcagctcaggctggtggtccatgcaggcaggacagcgggcagacccggcaggcggtccccgggacaagctgagcctcccagccgggcctgccagcaggagagcgggcaatcccggcaggcggcccctgcagacaggaccgcgggcagcccaggctggcgagctcggcaggcgggcactgtaggcagcttagagggcaaccccggcaggtgggccttgcaggctgcacagcgggcagccccggcaggcgggccctgcaggcaggacagcgagcagctcaggctggcgggccctgcaggcaggttagcgggccgacacggcaggcggtccccggggccagctgagcctcccagccgggcctgcaggcaggagagcgggcagctcaggctggtggtccatgcaggcagcacagcgggcagacccggcaggcggtccccggggccagctgagcctcccagcagggcctgcacgcaggagagcgggcaatcccggaaggcagcccctgcagacaggacagcgggcagcggaggctggcgagcccgctttcgcaactgctgtttcagggagagattaattctttccactatggcttgtccttgagaattgtatgggataccagtaatgtgtttaatattccacatagagaaaaatgtagctagagcttggctagtatagcctggggcattatctgttttaatagaagctgggatgcccatcaccacaaaacacgtgctgataactgtaatcagcggtgaaagcggcttaataatatatcgtgtgcacagccagtggataaaaagctgtgattccaatattgttgatgtgtgtggaaaagcttttccagccaggtttgaaggttcatcagctctgataccatcacaggccttgatataatcaactaaatgtgctttccctctaatagttcgcagagcagcctggcaatcgggattagcattgtcgaaagctaatgaccgcaacactatatcctgagcagccaaatctgcaatcacctttttaagagactcttgtaaccaagctataaactccacatatggttcttttggtccctgctctgtaacctcttctgttacttcattatactctccttcctcctcatcattagtgtgaaaaggttccaagatggaatgaaccagatcccacacttctcccagtgtcaccctcat

SEQ ID NO: 155967 - DNA, 766 bp, Homo sapiens
atgggacaagtgtgggctctggttcgttccaccttggaactttttcacactgatgatgaggaggaaggagagtatgacgaagtaacagaagaggttacagagcaggtttatttgccagctaaagctaaagtggcacaggaggaagaggttcatccctacccttctgcaccccctcattattattttgaagaaaaagagtggccagaccctccagatctttcttttctggaggacactgggcgaaaagtagttgccccagtgactgagcagcacctcgagcgactgctgtcagttctattcaggcaggagttcagcaggctagacgagagggatgatgccgtagagcagcttagaggagtgtgcattagagcttgggaaaaaatcacttcaggtggagaacaatacccttcctttagtgctgtaaaacagggaccaaaagaactgtatgcagattttatagcttggaatctcttaagacaggagtctcttaaaaaggtgatttcagattcagctgctcaggatatagtgttgcagttattagcttttggcaatgttaatctcgattgccaggctgctttgcgacctattagagggaaagcacatttagttgattatatcaaggcctgtgacggtatcggagctaagcaagacagtgaacggtttgcatttacaattcctgtggtaaacaatctgcagcctgctaagcattttcattatttcacagatgggtctagcaatggtaaagcttcttattctggatcaaaag

SEQ ID NO: 155968 - DNA, 1180 bp, Homo sapiens
atgagccagatgctgaggaagagattccgggaggatcccaaggacccctcggttgcagccatgtcgagactgatggctgaggaggaccccaactgtcacaagcaacacccgtctaacacagccacccacctggggacagatcaagaagctgtcacagatggcggaagaaaacctgaggaaagcgggacagccagtcacaatgaataatttaatggtagctatgatagtggttatcaccactactgaggaacaagagtatagtgaagtaacagaagaggttacagagcaggtttatttgccagctaaagccaaagtggcaaaggagggagaggttcatccctacccttctgcaccccctcattattattttgaagaaaatgaccccccaaatctttcttttccggaggacactgggcgaaaagtagttgcccccgtgactgttcgagcagcacctcgagggactgctcttagttctattcaggcaggcattcagcaagctagacaagagggtgatttagaggcttggcagttccctgttagaatacaccccccagatcaacagggaaatattatagctacatttgagccttttccttttaaattactcaaagaattcaaacaagcaataagtcagtatggaccaggttctccctttgtaatgggactgttaaagaatgttacagtttccagtcagaagattcctactgactgggacactcttactcgagcttgtctaactcctgctcagttcttacaatttaaaacttgtgctatgaaacagggaccaagggaaccatatgttgattttatagctcggttacaggagtctcttaaaaagatgattgcagattcggctgctcaggagatagtgttgcagttactagctttcgacaatgctcatcccgattgccaggctgctctgcgacctatcagagggaaagcacatttagttgattatgtcaaggcctgtgatggtattggagagtatacgccttctacttatgaaaagaaagttaactgtaaaacagcttcatgcaggtccttcaggaggtatccagaagaaggcattgttatcacaggagatgacagctccatgcgtgtcgttgtccctgaggaccttccagtggggcaagatgtggaggtggaagacagggatattgatgatcctgaccctgtgtag

SEQ ID NO: 155969 - DNA, 1086 bp, Homo sapiens
atgggacaagtgtggggtctggttcatttcaccttagaactttttcagactgatgatgaggaggaacaagagtataacaaagtaacagaagaggttacagagcatgtttatttgccagctaaagctaaagtggcaaaggagggagagttcttacaatttaaaacttggtgggcagatgaagcttccattcaggctgctcaaaatgcccaggcccaacctcaaattaatataactgcagaccagcttttgggggttggtggctgggctgatttagatgcacatctggtcatgcaggatgatgccatagaacagcttagtggagtgtgcattagagcttgggaaaaaatcacttcaggtggggaacaatacctttcctttagtgctataaaacagggaccaagagaaccatatgttgattttatagctcggttacaggagtctcttaaaaagatgattgcagatttggctgctcaggatatagtgttgcagttattagcttttgaaaatgctaatcctgattgccaggctgctctgcgacctatcagagggaaagcatatttagttgattatatcaaggcctgtgatggtatcggagtgttggaagttctggtcagggcaataaggcaggagaaagaaataaagggtattcaatcaggaaatgaggaagtcaaattatccctgtttgcagatgacatgatggtatatttagaaaaccccatcgtctcagcccaaaatctccttaagctgataagaaacttcagcaaagtctcaggatacaaaatcaatgcgcaaaaatcacaagcattcttacacaccaataacagacaaacagagagccaaatcatgagtgaactccctttcacaattgcttcaaagagaataaaatacctaggaatccaacttacaagggatgtgaaggacctcttcaaggagaactacaaaccactgctcaacgaaataaaagaggacacaaacaaatggaagaacattccatgctcatggttaggaagaatcaatattgtgaaaatggctatactgcccaaggtaatttatagattcaatgccatccccatcaagcgccaatga

SEQ ID NO: 155970 - DNA, 598 bp, Homo sapiens
tacattttggacatatttcaggctcagcagttttcttttttcccctatctggtggcccgacttgctgatttttttctacttttttttttttcagtatgaccatgcttcccacagttaaaacaagctccaggaaatggagtactttctgtatccactctcagtcctgccattgcccgtgctagcaggtggcctgatgcagattacctctgataccaccacaggccttgatataatcaactaaatgtgctttccctctgataggtcacagagcagcctggcaatcaggattagcattgttgaaagctaataattgcaacactatatcctgagcagccaaatctgcagtcatctttttaagagactcctgtaactgagctataaaatccacatatgattcttctggtccctgttttatagcactaaagaaagggtattgttctccacttgaagtgattttttttccccaagctctaatgcacgctcctctaagctgttctatgggcatcatcctgcatgaccatttgtgcatctaaaccagcccaactgccaacccccaaaagttggtctgcagttatattaatttgaggttggtcctgcg

SEQ ID NO: 155971 - DNA, 1164 bp, Homo sapiens
tcactggataatagctttagcttctttccaggtaatgttgtatctgcgtttgagaccagaggcattaacatgggttaaattgtgaaagtgtctagcattagatattgcattagcaactaggcgatcggccatttgattcccttcagtcaaaggtcctggaagaggtgtatgagccctaatgtgagtgatgtaaaaaggatgcattgtactcctaaatgctgtttgcaattgggtaaataaagtcatcagttgttcatctgtatgaaatcgtaactgagcattttcaattaactgtgtggaataaaccatgtatgaagaatcagaaatcacattaataggcatatcaaaagcagtcaatacctcaattaccgctacaagctctgctttttgagctgaagtataggatgtctggaaaactttactttttgagccaaaataagaagctttaccattactagacccatctccaatatcatcacaggccttgatacaatcaactaaatgtgctttccctctgataggtcgcagagcagcctggcaatcgggattagcattgtcgaaagctaataactgcaacactatatcctgagcagccgaatctgcaatcatctttttaagagactcctgtaaccgagctataaaatcaatgtatggttcttttggtccctgttttatagcactaaaggaagggtattgttctcccacctgaagtgattttttttcccaggctctaatgcacactcctctaagctgttctatggcatcatccagctgggggtccctggcttgcaaagtgaccgagaagaaaattcctacagcaataacaatgacagaatttgtgagatgcttactggatttcagactctgcattttgctaggcttattgggtttattcttcatcaccattctcattcctctgtcctcagggacttcctggcctgttggagacacagatgtacatggtatcatgacatattcagggctttgctgtccattatagagaacacatacaaactttccctggctctctacagccttgtaaatgttgaagtttgtgtagtttgctcgttctttacaatcccgcagagctccttgggtcagtttcagcacagggagcgctcgactattaagcatttttgaggaccctgggcaggaaatacccat

SEQ ID NO: 155972 - DNA, 2844 bp, Homo sapiens
ttagttgagctcatttggggttccatttgtaagatcatctgtagcttgatagcctcgatcctgctgtaggcaaagctgggccttcgacctagatgcctcgtacccttgatttgctagaaagctcaagaaatctagagtagcctgctggcatgaggcttctgaactggtagccaaaagtaaatcatccacatactgaaggaccagagtgcctggacttgagaagtggcctagatcttgagccagtgcctgaccaaagagatgagggctatccctaaacccttggggcaagatggtccacgtaagttgggatgtgtggtctgtgagatcctcaaaggcaaagagaaacctgggcaccataagttctgttgttggatcatctggttgggagcttctggcccagagaaccatcgtactctggggcagtgtgccttccagtgattgcttttccttttgggcctgttcttcttggcccctattatagaacactgaagttgccaggtttaataatgcctccagattttgttcagggcccagggctcgcttttggagctttcttctgatttctgcagctgattgggtaataagcttatcttttagaatcaattgaccctctagtgagtcaggtgacagggaagtatattttcttaaggcctcccgtagccaatcgaggaaggcagaaggattttcttcctttccctgagtcatggtggacatcattgaataattcatgggctttttcctaattatccttagtccttctagaacacaggtcaacagatgtttatgactccagtccccatgatctgagtcaaggtcccagtggggatccatactggggatggcttgctgaccagtagggaatttgtccctttctttggctgtcagtctatcatttacttgactaagataccaggtatctccaaactcttgggctgcagctaaagccacattcttttcagtaaaggccagggtttgatctaacaatagcatgacatctctccaatgagatcgaaggtttgccctagacccgttttggtttgtttgtttctccccctgcccaagaacctgtgatggtccctggaccctgctgatcggaatagttgcactcaccaacacagcaacagaaacactagttttcctcctacaccacaaggaggactgaggaaggtcagagttagtggcccttactgatgcattctcaaaaagctggacccttgcctgtcctccttttgatccagaataagaagctttaccattactagacacatctgtgaaacgatgaaaatgcttagcaggctgcaggttgtttactgcaggaattgtaaatgtaaaccattcacagtcttgctcagccctcatggcatttcccgaaatcagggtcccatctttgtcaaacttagagtgacactgattagcccaatatttcccttttttacattttggacatatttcaggatcagcagttttcctttttccccatctggctgcctgactcactgatttttttctacattcttttttagtatgaccatgcttcccatagttaaaacaagctccaggaaatggagtatttcctttatccactctcagtcctgccatttcctgtgccaacaaagtagctttatgcagattacctctgataccatcacaggccttgatgtaatcaactaaatgtgctttccctctgacaggttgcagagcagcctggcaattgagattagcattgtcaaaagctaataaccgcaacactatatcctgagcagccgaatctgcaatcacctttttaagatactcctgtaaccgagctataaaatctgtgtacggttcttttggtccctgttttacagcaccaaaggaagggtactgttctccacctgaagtgattttttcccaagctctgatgcacactcctctaagctgctctatggcatcatcctgcatgaccacctgtgcatctaaaccagcccagccgccgacccccaaaagttggtgtgcagttatatcaatttgaggttgggcctgggtgttgcgaggagcctgaatggaagcttcatctgcccaccaagttttaaattgtaagaagtctctcccgtactgctcaaaagatacgtagcggatgcccttgccaaagttggtgaagacgtgggagacctgtcggcagcccctctcagtccactgaaggaccgggtcaggtgaggctgagaacttgaccacttccttttcatacacatccagaaggcggacccggagctggtagacgcagccgcagttctctcgagcgccccaccagtcagccacacagatctcaatctgggcgctgtccagcagctcctgccacaccccttccatcaccaggtccacaagctgcctcttggagcaccattcgaaagaggtcacgaagcaggtctgcgaaggagccccaggcaccggtgttaggttcttttctatggcccagccgttcccgccatgctccacctcccagcctctgaagccctgctctccgcaggagttgaagatgagattgcggccgaagggcgcgcgcagacagtagcgcgccagggcgcacagcgggaactcctccttgtcttcgttgctgggcaggcagcgttgagccactgcgtagagtgcgcggccctcggcgctgcggtcgcgggccagctgcagcagccacacagtgggcccgtccactatgtcgcgccaggcgcggcacactgggcggcatcgcgtgaccaaggagcgtggcggcacgtggctcagcacctgcaccagcagctccgggggcagcgcgtccagggccagggatgggtccgccggcagccgtcgccgcgatagccgggcgcccat

SEQ ID NO: 155973 - DNA, 2518 bp, Homo sapiens
ctagcctccctccccgcgcttcgaggctgccaccagggccatctttttctggatggagtccaggggacaacagaaaacttcccaacactccacctcctcctcgggcgggaccaaggcctccgtctcgcgcaccgcctgcatgaacacccggtccaccatccgctggctcttggccatgacctccgggaacggggagcgcccctcgcggccccgcgccgtcagcacctggcgcccgtcgtccgggtcggcctgggtgcccaccagcacccgcgggacggccccgggttcccacggccggcgcaggcgcttgctcggcggcctcacggcccggaacgaggcctcgctgcacacgcccgggagcaccgcggagccgtcgccgtggcggatgtccaggtcctggagcgtgaccaggtgctcggcgcccgccgcgtccacgacctccagcaacgcgggcgccgcgttcgcctcgatctcctcgcggagccgctcctccgcccacgccgcgcactgctcggggagcggccgcacgcgaactgcgtgtccagcgtggtcctgcccactccacgctccccagcagcacaccccggcagccatagtgccgtataagatgtaaccgaaaatgcgtacactgacgcttaaacaagggttacttgtgtatgtggctgcctcgcactgattgactatatccggatggtctttctctcctgatggtgctttaattcgtggagaccttgtttctgggtcttctctgagaccccgaagactctggagccggcactctgtgcatcctccgtagactggccagaaccactctgaggtcggtggtctcttatcaggaggggatgctggttggtaaggttgtattgaaaatgcaaaaggaagcggcagcgtcagagtctggttgatgtcggggtggggtctgtggaccgcagtccgcaggggagaaagcctaagggcagctggctctagttgattatctcctggatctttctctgtggcttctgtctctttctgatcattttccttcacgcgtttcaggaagctatctcggctcatagagggcttaatgtgctcaatacgctcattaattctcttggcaggaatcttgcccttaacttgtttgttttcctcaggttttcttctgccatctgtgacagcttcttggtctgtccccaggtgggtggctgtgttcagcaggtgttgcttgtgacagttggggtcctcctcagcgtcagcctcaacatggctgcaaccagggggtcctcgggatcctcccagaatctcttcctcatcatctggctcatgataaggtttcaggtgtcttgatggtatccaaatcggctgttgattcggtcctctgatagcatcacaggccttgatataatcaactaaatgtgctttccctctaataggtcgcagagcagcctggcaatcgggattagcattgtcaaaagctaataactgcagcactatctcctgagcagccgaatctgcagtcacctttttaagagactcctgtaaccgagtcaccacggggactgctttaagagtacttggtgtcctccagcttagttccacgttctccaaccatcgctccggcgaccctttgacctggattcgagcccccacgaatggacgccacttgccgagaccagctcggtcagggacaccctcgggcgggatcagggcctccgtctcgcgcaccgccagcgtgaacacctggtccatcctccgctggatcttggccgtgacccccgggaacgggcagggcccctcgcgggcccgcgccatcagcacctggcgcttcggagtcccggtcggcctgggtgcccaccagcaccagcaggacggccccgggttcccacagcccgcgcaggcgctcgcgcaggccctcacggccgggaacgaggcctcgctgcacacgccccggagcaccgcgaacgcgtcgccgtggcggatgtcccaggtcctggagcgtgaccaggtgctcggcgtccgccgcgtccacgatttccagcagcgcgggcgccgcgtttgcctcgatctcctcgcggagccgctcctccgcccacgccgcgcactgctcggggagcggccgcacgcgaactgcgtgtccagcgtggtcctgccacgtcacgctccccagcagcacacccggcagctcctcatgtatgtccacgtccttaatcttcttggcgtgagacaatgaaccctgggtatttactccagacagcgatgccacttcatcagggggatagtggggaggggggatttcctgaagattgaggttgaaatattggtggtgagttccccagtaagttcctcttgaagttctcacagggaactgcaggtcagaacgtgagctgtcctgtgacacgactccaacatcagacccggagactccccacaagttccccattagatccatcttgcttgagttccacttggaatattcgacctggaaaaggcaggtgcggtgcctcacgaagcccactggacgcagctgacccttccacat

SEQ ID NO: 155974 - DNA, 406 bp, Homo sapiens
ggcacgaggaaccgccatcttccagtaattcgccaaaatgacgaacacaaagggaaagaggagaggcacccgatatatgttctctaggccttttagaaaacatggagttgttcctttggccacatatatgcgaatctataagaaaaggggatattggagacatcaagggaatgggtactgttcaaaaaggaatgccccacaagtgttaccatggcaaaactggaagagtctacaatgttacccagcatgctgttggcattgttgtaaacaaacaagttaagggcaagattcttgccaagagaattaatgtgcgtattgagcacatttaagcactctaagagccgagatagcttcctgaaacgtgtgaaggaaaatgatcagaaaaagaaagaagccaaagagaaag

SEQ ID NO: 155975 - DNA, 1205 bp, Homo sapiens
  misc_feature (1)...(1205): n = a,t,c or g
tcaatgcagcaaactttattgttgtcttatttttaaaaattgccatagccaccccaaccttccgcaaccatgacccagatcagtcagcagccatcaacatcaaggcaagaccctccaccaacaaaaaattatgacttgttgaaggctcaaataatcattagcttttttcagcaataaataattctttaattaagataggtatattgggtgttttttttttttagccataatgctactgcacacttaatagactacaggatggtgtaaatgtaacttttatatgcaggggaaaaccaaaaaacttcatgtgactcactttattgagatattcactttattgcagtggtctgaaactgaacccacaataactacaaggtatgcttgtaaataccttatttttaacaaaaagtgaaaatgatttccctgttatttactaacaaatagaccagacatttgcatcagacagtgagcataaacttctctgatcacctctcaagaggacatctcccatttcctcatttgactctcctcaagatttcctggtaagaccaaacttttatcttccatatggtctcacagggtcagtggttcataatataccatcaggttatacaacaggcaatttaatgaatctcaggggtggaaggacaaattgcccggtttctgaggtagagggccgggatagggtcaccggggatacttcattggaaactaatggattcttcaacttctcctggcctttcaacttcaccagaggaatattagacatccacttgttagtggttctctatggggggatcagtagaggaaagccaaatttggggcattaatagaacaaatcttatgttaaatcctcgtattatttttcttgagataatatgactacagctcagatataaccatatccaatttttaactacttcaaaccaaggtaattccatattattctcactactcctatctaattgtggtatcaattggctctaaaaatattaaacacatatatattacttgagacctctagactataaaatacttcaaaagtctagtccttaaaacgtagggcaaaaaatacctcaattttggccgggcgcnggtgtcacgcctgtaaacccagcactttgggaggccgaggcaggtggatcaggaggtcaggagtttgagaccatcctggccaacacagtgaaaccccgtctccacttcag

SEQ ID NO: 155976 - DNA, 469 bp, Homo sapiens
tcaatcaataaaaatattttattcaaaaaacagtctaatatcttattttacatgatttcaaaataaagttgattgtagtacagattgctgtggcctttttcccctccattttttacatgttctcatggttacaatatccagcataaagaggttgtgcagctattccacgttcgaccatcctgcagcggtgccttgtcagtctgtcataggcgtcatccatatctctgacatctttggaactccagagtctctcaccaacagcacttgcccgaggccataatcttggagtgaggttagttgcatccacatattctccccatagacaagcttctccaccaatgaaaagttgtttctgtttctgagtaccgccaaaatcaagaggttccactttatagtatttcctccaatcttgtccatagctaatcaaatctttgctttatcatcaaaaacctcctgccagacaatggat

SEQ ID NO: 155977 - DNA, 770 bp, Homo sapiens; identical to SEQ ID NO: 122866

SEQ ID NO: 155978 - DNA, 392 bp, Homo sapiens
gttaaagcaagcttatgtctttttgtatgagctctaggctgtatttatttgagggttttatttatgaaagataagttaacattctttaatttctttaggctctgaagaaagctgataagcaagttttggagcctctgatgaatcttgaggttacagtagctagagattatctcagccctgtcctggcagatctggcacaaagaagaggaaacattcaggaaattcagactcgccaggacaacaaagttgttattggatttgttcccttagcagaaattatggtaggtactttgtaactgaaaagtacatattcttcttaattcaggggatattatatgccaatgaatagacaatcagtaacctgaaagaaacattaaggctttgatttagag

SEQ ID NO: 155979 - DNA, 1578 bp, Homo sapiens
cgccatgcttggcacgagggttgagcggtgcctaagagtgttggatggtgcagtggctgaatttgatgcctctgctggtgtagaggcccagactctcacagtatggaggcaagctgataaacacaatatacctcgaatctgttttttaaacaagatggacaaaactggagccaagctttaagtatgcagttgaaagcatcagagagaagttaaaggcaaagcctttgcttttacagttaccaattggtgaagccaaaactttcaaaggagtggtggatgtagtaatgaaagaaaaacttctttgggaattgcaattcaaatgatgggaaaagactttgaggaggaaagcccctcttgggaaatgaatgatcccggaatttgctggaagggaaacaacttgaaggcaaggaatgcctttaattggaacaagttgcagatttggatgatgaatttgctgacttggttttagaagaattttgtgagaattttgatttgttaccagctgaaaagctacagactgcaatacatagagtgacactagctcagacagcagtgcctgtgctttgtggaagtgccctgaaaaacaaagggatacagcccttgttagatgctgttactatgtacttaccttcacctgaagagcgtaactatgaatttctgcagtggtataaggatgacttatgtgcattggcatttaaagttctccatgacaagcagcgaggaccactggtttttatgcgcatttactcaggcactataaaaccccagttggccattcataatattaatggaaactgcacggatcgtacccagattgccctcagtgtcaataatcacgaagtgcacatctataagaagaatgggcgccagtgtgtgaaagctcacgaactcaaggagcacaatggacacatcacagatattgactgggctcccaagcatgaccacatcgtcacttgtggggcagaccacaatgcctatgtctggagtcagaaagatggtgtctggaagccaacactgatgatcctgagaattaatcgcacagctacttttgtgaagtggtccgccctagagaacaaatttgctgtgggaagtgaagcacgactcatttcagtttgttactttgagtctgaaaatgactggtgggtgagcaagcacattaaaaagctgattcgctccacagtcctcagcttggattggcatcccaacaatgttttgctggcagcaggatcatgtgacttcaaacacagagtgttttcttcctacattaaagaagtggatgaaaagctggccagcatgccctgggacagcaagatgctttttgggcagctgatgtcagagtctggtggcggtggcactggtggctgggtccacgggttagacattccaaaacagagcatccaacgcaacatgtctgccatggaatgcttctgcaacacggacaagagggccacgactgagggctccaacatggctttgaagatgctgcgccagaatagcatcactcaagtctctatttatgaggtggatgagaaagattgtcgcaaatattgcactactggcatcgatggagagccatga

SEQ ID NO: 155980 - DNA, 1886 bp, Homo sapiens
tttttttttttttttttcaatccaataaaattttttaattcaaaaaccagtctaatatcttattttacatgattttcaaaataaaagttgattgtagtacagattgctgtggcctttttcccctccattttttacatgttctcatggttacaatatccagcataaagaggttgtgcagctattccacggttcggaccatcctgcagcggtgccttgtcagtctgtcataggcggtcatccatatctctgacatctttggaacctccagagtctctcaccaaccagcacttgcccgagggccataatctttggagtgagggttagttgcatccaccatattctccccataagacaaagcttctccaccaaatggaaaaagttgttttctgttttttgagtaccgccaaaaatcaagagggttccacctttatagtatttcctccaatcttggtccataggctaatcaaattctaaggtaccaaggacagaaagggatatcagggaaggccaaaagcttgggactcttactgagttcctcaggatatgcccccgcctttccatacctccaactattgtgccccggcgcaggctttgctttatcatcaaaaacctcctgccagacaaatggatccctctgggtattggttgcaataatatcccaaacccttttgaatgtagaaagaatctagtttctttaaatctgtgccaaaagcctttttgcctcatgaaattcttgaatttttggatttgattcccaacatttaaattccacttcatctccctccaaatgaaatgattgatctggaaacacctcactaatttctttgaaaaatgtagtaaggaagctgtatgttgtattcagagtagggtttataggtccaaaagagtccaacttgttttgtctactgtaacatggagtcaggaggtctttctgaccttttccccaagatagtgtatgcccaggggtatcaaattctggcaggactcgaattcctcgtaatctggcatattcaatcaccatacggacatcatttggtgtataaacatgagacaaagaatagcttcctttattgcttaactcaggaaaagtgatgctctgatatgggaaagactggtcatcaactatgtgccagtgaagaacattaaacttattaaaagccatggcatccagagttttaagaataatcttaactggcagataatgtctggatgtatcaatcaaaattcctctgtgagaaaaccttggagaatcaataatggtggattcattgatggtgaaagttccataagaatcttgataaactaactggctaaaggtctctaaacctcgtaatgctccccaaactctgttggccttaaggacagccactggttctttcacaagtaaagtataagactcatctgaagatatgttggggaaagcatcacactctgactgaagggtgattgagacaagaagttgctgaacctgggttttagcctggaattcagcaggttcatgatgccacttgtagaaaccaaaaatatagccatgatatcgtcgaaacgcttcctccagcagggtgcaggaggggcccgccgtggaattggggctgtggctgatgtagaagttctccggggcgagatgcagcaggttcggggtcatcttcaccgagagcggcaggggccacagcgccggccccggcttggccgagacgctcggggcccgagccgcctccgccacctgcaccaccagcgccacctgagtcagcagcgccaacatcgccgccagcagtgtcgccaacagcagcgccagcagcatgggcggccggggcagccccagcccgcacagctccatggccgctcggctgctttccgcccggtctgccgagccggagcctcgggac

SEQ ID NO: 155981 - DNA, 2976 bp, Homo sapiens
atggctctgaagaaagctgataagcaagttttggagcctctgatgaatcttgaggttacagtagctagagattatctcagccctgtcctggcagatctggcacaaagaagaggaaacattcaggaaattcagactcgccaggacaacaaagttgttattggatttgttcccttagcagaaattatggttgcagatttggatgatgaatttgctgacttggttttagaagaatttagtgagaattttgatttgttaccagctgaaaagctacagactgcaatacataagagtgacactaagctcagacagcagttgcctgtgctttggtggaagtgccctgaaaaaccaaagggatacagcccctggttagatgctgttactatgtacttaccttcacctgaagagcgtaacctatggaatttctgcagtggtataaggatgacttatgtgcattggcatttaaagttctccatgacaagcagcgaggacccactggtttttatgcgccatttaactccaggccactataaaaaccccagttggcccattccataatattaatggaaactgccacggagagaataagtcgtctgcttttgccgtttgctgaccaacatgtagaaatcccttcattgactgctggtaacattgctttgactgttgggcttaaacatactgccactggagacaccattgtctcatccaagtccagtgcattagctgcagctcgtagagccgaacgggagggagaaaagaagcacagacaaaacaatgaaggcagagagacttttattggctgggagtgggagattccaggaacctgttttcttctgtaccataggaacccccatcactgtctaaggcagccagatttgggaacatgcgtttgaaatgtctttcagcgtgaggatccccgttttgaaagtgaggctagatcctgactctggacaaactgttctgtgtggtatgggggagttacatatagagattattcatgatcgaatcaagagggaatatggactggagacctatctcgggcctctccaggtggcatatcgagagaccatcctaaactcagttcgtgccacagataccttagatagaactttaggagacaaaaggcatcttgtgactgtagaagtggaagcaaggccaattgaaacatcatctgttatgcctgtgattgagtttgagtatgctgaaagtatcaatgaaggccttttgaaggtctcccaagaggccattgaaaatggaattcacagcgcatgtctccaaggaccattgcttggatccccaattcaggatgtaggcaattacctttacattccctgacaaattcatccctgggcaccttccacaacttatgatttctgcctgtgtctcaagatgccgtgcaaaaaggctcttgaaagaaaagctgataagcaagttttggagcctctgatgaatcttgaggttacagtagctagagattatctcagccctgtcctggcagatctggcacaaagaagaggaaacattcaggaaattcagactcgccaggacaacaaagttgttattggatttgttcccttagcagaaattatgggttattcaactgtgcttcgaacgctaacatcaggctcagctacttttgccttagaactatctacttatcaagcccatgaatcctcaagatcaaaatacactgctcaaccggagaagtggtttgacctaaatgttttagtttttgggagaggaaattcagggaggcaccctaggctacttcatttttcagtaaggaacaatttttattgcctttatttattgggacggaataaaggtactgtttcaggtacattcaggggaacctagggataaaggatataactttaagctttgatagtggcactggagcccacccgttttaatttatataatgagaaatgtgctttgatgtttaaagccactgtacctgaatcatgctgttcatctatgaagttattactataagtagccttcagaagagtggtatcacaaagttgtgtttcttttgtgtccttaagcttgtctcacaagaaagatgccaggcctctaaatgtaataagatagagggtcaaaggttcaatcaataaaaatattttattcaaaaaacagtctaatatcttattttacatgatttcaaaataaagttgattgtagtacagattgctgtggcctttttcccctccattttttacatgttctcatggttacaatatccagcataaagaggttgtgcagctattccacgtctgtagataacatgaataaagatattttagattgatttagattgatatcattcataaagatattttagattgatattcatgtcatcttagaaacttaaattagaatcactaaatcacagcattactgaaaataagggaagaaaattaaagcaactcaagatggagttctaagttacaccaacattttttgtatctataaaacagtcacaagtctgaatatatctttacaggtattattacttacaaaaaaataattcctggtttcttctaattactatttgttaggtaacatacatttctatttatagcaaaagaaactaacactgaataagaaggttaaaaatcacactggacttaatagatttcttactcgaccatcctgcagcggtgccttgtcagtctgtcataggcgtcatccatatctatgacatctttggaactccagagtctctcaccaacagcacttgcccgaggccataatcttggagtgaggttagttgcatccacatattctccccatagacaagcttctccaccaatgaaaagttgtttctgtttctgagtacctaaattaaaatcattgaattaagttcagaagttcaaagcttatacacagaggcaatatttcatcaagatttgtttcctccatctttatcctagggcaacatttcttgcccgtggttagcaggaccttgggaaatgc

SEQ ID NO: 155982 - DNA, 2214 bp, Homo sapiens
gcgttgtcagaaagcaaaattcacacctgttaatcgtcgccaccattgccgcaaatgtggttttgttgtctgtgggccctgctctgaaaagagatttcttcttcccagccagtcctctaagcctgtgcggatttgtgacttctgctatgacctgctttctgctggggacatggccacatgccagcctgctagatcagactcttacagccagtcattgaagtctcctttaaatgatatgtctgatgatgatgacgatgatgatatgcagtgactaaggacacatttgggagtatttaatcaggtgaggctctctgagaaatcaactttgggggaaatgcaagactctgagctctctctctggattgttctagccatgaatttgcctgagaaacttggaacctatgtgcctcaatatattccatagaaagaaggtgcccctgccttctgccactcctcacactcttctacagggataggcttttgcaaatatatcagataaattttttgtttcttgtttatttttaggttattttcttggaaggttgggaaaagaggtttgtttaaccaggtcatgtactacggtgttgtttttcatgttctgttataagtaaaactaaaaagcacagaattggtgggaaaaggggctataatgtgggttccattaataatgttagcagcttttttctaaccatcctgtctaatggttaagacacccagtaacaaaaacacatgatttggaaatactttggctttttcatatacctagtggtgccttatcataatagcaccggtaacatgaaataagcccctaccttcttactttctggtttgttgaaaaaatacactggtgctctttgaagtgataaaatgagtgtttatgaatgggtgtaattaggaaatacttctcatctgacagctacaaataactaagttgtggaggtattttcactctatggtgaataaatatttttccataaaataggtgggaatatatttttgcgtttatatagggctccaaattataattggcgaatatatattgtaaattaataaaagctgtcattcttaggaatttggtttgaaatttatcagttatacagaattgtcatactgcattagcttctacctttagtaagacatattttttaggtataaattcttatgctttaacattatttctggattgaaaatcttataaaacccttgaaaataaacagtctcttttttacaaagcctgtgttagagcacagatttacctaggcttgaagatttggaagaaataatatgtaagaatggcctcaaggcagaccactttaagtttggctagacttcatatcgtggaagtattgtctatttcagtgtgaaactatcttgaatttgcaaatatagtgttatattttataaagttttgtaaaatcccaaacaatatttctatttttgtaaaacaattgtatgtataatctgtatttgaaatcattttgcaatctatggaaatagagtagcaattgctatttctaaattgtgaactttaagtcaatctagatttattttgagaagtaattgttcactctttacttttgaggcagccattaggttgaaagtatatatttatcatataaaacttgatgcgttttgcactactctttccatttatatgctgcaaacaactacagtctttgaaatatggaaaatcagcagtctaaagtttgttttaaattctaaatttaaaaaatcttcaaatctgaatataccgcaaatgtcatgaggaagtttgattcagtaacttggtgatggaggattctttgggtatcttactgtttgggttaagggcactaatttttacttacctattggattttgaaagtatctgagatataccaaatcctccccgtaggaaatgtgaaagaaaagccacaacaaaacctagggttttttgttccatttgccttgccttttatgattttttttggtttgttttaatatcaggtgggattttttgtttctaaggcaatatatacataaaatcaacccacatatctggaaaagggatcctggaaacctgagaaatgctaatggagatttgctggtacataggaatctagcaaattcaggaaccaaggggaaatgttgtgagataacatttacattgtcaacctttattgactttgtttttacaataaaaaatattttacaacttaaaaaaaaaaaaaaaaa

SEQ ID NO: 155983 - DNA, 424 bp, Homo sapiens
  misc_feature (1)...(424): n = a,t,c or g
gaatgtgtaccatctgtgtgcctgcagctgtgtagtgctggacagtgacaaccctttctctccagttctccactccaatgataatagttcacttacacctaaacccaaaggaaaaaccagctctaggtccaattgttctgctctaactgatacctcaaccttggggccagcatctcccactgcctccaaatattagtaactatgactgacgtccccagaagtttctgggtctaccacacccctgctccttcggaggacgtgccctcacccctcactggtccactggcttgagactcaccccgtctgcccagtaaaagcctttctgcagcagctgnnnnnnnnnnnnnnnnnnnnnngggcgccccgttaaaaggagaccagttaaacgcccgggggtggggaaggatatatttttttttggggc

SEQ ID NO: 155984 - DNA, 764 bp, Homo sapiens
  misc_feature (1)...(764): n = a,t,c or g
ggcagcggctcaggcgaccctgagtgtgcccccaccccgccatggcccggctgctgcaggcgtcctgcctgctttccctgctcctggccggcttcgtctcgcagagccggggacaagagaagtcgaagaactgaatgcactacaggaagagcttgcaccattcggtctggtcattctgggctttccctgcaaccaatttggaaaacaggaaccaggagagaactcagagatccttcctaccctcaagtatgtccgaccaggtggaggctttgtccctaatttccagctctttgagaaaggggatgtcaatggagagaaagagcagaaattctacactttcctaaagaactcctgtcctcccacctcggagctcctgggtacatctgaccgcctcttctgggaaccccaagaaagttcacgacatccgctggaactttggaagttcctggtgggccagatggatacccatcatgcgctgcaccaccgaccacgtcagcaacgcagatgacatctgtctactgagcgcagcagcctggggcagagaatactgagccgctatcatgcacatgtaggaggcttgtcagagaatcggctcaaccctttacataagaccttctatatagccactgccatgaagcaacattgcgcaccccatgtgcccctgtaccctcacagtcnaatggtnnctggcaccctcactagttttgggacatggccgctgagtgcagacctttcccccccaagctccccacgaaactttgcgg

SEQ ID NO: 155985 - DNA, 485 bp, Homo sapiens
cctatgtgtctttctgggaatgtgtaccatctgtgtgcctgcagctgtgtagtgcctggacagtgtacaaccctttctctccagttctccactccaatgataatagttcacttacacctaaacccaaaggaaaaaccagctctaggtccaattgttctgctctaactgatacctcaaccttggggccagcatctcccactgcctccaaatattagtaactatgactgacgtccccagaagtttctgggtctaccacactccctaaccccccactcctacttcctgaagggccctcccaaggctacatccccaccccacagttctccctgagagagatcaacctccctgagatcaaccaaggcagatgtgacagcaagggccacggaccccttagccttcggaggacgtgccctcacccctcactggtccactggcttgagactcaccccgtctgcccagtaaaagcctttctgcagcagctgaaa

SEQ ID NO: 155986 - DNA, 1806 bp, Homo sapiens
atggcccggctgctgcaggcgtcctgcctgctttccctgctcctggccggcttcgtctcgcagagccggggacaagagaagtcgaagatggactgccatggtggcataagtggcaccatttacgagtacggagccctcaccattgatggggaggagtacatccccttcaagcagtatgctggcaaatacgtcctctttgtcaacgaagagcttgcaccattcggtctggtcattctgggctttccctgcaaccaatttggaaaacaggaaccaggagagaactcagagatccttcctaccctcaagtatgtccgaccaggtggaggctttgtccctaatttccagctctttgagaaaggggatgtcaatggagagaaagagcagaaattctacactttcctaaagaactcctgtcctcccacctcggagctcctgggtacatctgaccgcctcttctgggaacccatgaaggttcacgacatccgctggaactttgagaagttcctggtggggccagatggtatacccatcatgcgctggcaccaccggaccacggtcagcaacgtcaagatggacatcctgtcctacatgaggcggcaggcagccctgggggtcaagaggaagaaggtgacttctcaataccaggatagggacaacaaatttcagaatgtagagagaatccctctttcggggagtcacagaacagtatgtatgatgggtgtgaaaggaaaagttaaaacgcaagctaagccactaagtggagaggagtctctggagctggaacaatcaggcttggccatggcggctggtgctgataaccatttcttggcagaagtgcccgccaaagctgtggccctagtcctcaccaccacagagagccagcaaggccttcaggaagtctccggaggtgtcaccctggcagaggcagagagcagagcgctgggccccctgccccgtgaggacggcaacctgatgctgcacctgcagcgcctggagaccacgctgagtgagccggaccacggccagctcttcacccacctgggccgcatggccctggagttcaaccgactggcatccaaggtgcacaagaatgagcagcgcacctccattctgcaggaatacaaagatgtgcaaagtacgctcctgcctcaggaagttcccagccagatgggcaatgcccgcaccagtcagacacatgctgtaccaggtggcaagcctcggagaggaccgtaccggatctacgaccctgggggcagcgtgccctcaggagaggcatccgcagcttttgagcgcctagtgaaggagaattcccggctgaaggaaaaaatgcaagggataaagatgttaggggagcttttggaagagtcccagatggaagcgaccaggctccggcagaaggcagaggagctagtgaaggacaacgagctgctcccaccaccttctccctccttgggctccttcgaccccctggctgagctcacaggaaaggactcaaatgtcacagcatctcccacagcccctgcatgccccagtgacaagccagcaccagtccagaagcctccatccagtggcacctcctctgaatttgaagtggtcactcctgaggagcagaattcaccagagagcagcagccatgccaatgcgatggcatcttttcacagcctagggaagtccctggctagaagaggcaaggaacagaggccaagtctgacggtggcttctaggctacagaggaatggagggagagcggggaggggccataaagaagagggtgtgggagaggacaaggaggaagtggtgccctag

SEQ ID NO: 155987 - DNA, 2220 bp, Homo sapiens
  misc_feature (1)...(2220): n = a,t,c or g
ttggttgcatgccaggnnnncgcaaatttttcaactgccaagctatttagagtggggtgtccccctttctcctttaaaattttatattttccctcaagggtttattctttgggggggggttggtccattttgttccccccccaaaataaaggttctttcccaaaattcccaagtaggtttttattaggccccccttaaggaaaaaagtttttccttgccagcccccgttaaatttgggccccccagaggatcctctaaaccggccgccccttttttttttttttttcagctgctgcagaaaggcttttactgggcagacggggtgagtctcaagccagtggaccagtgaggggtgagggcacgtcctccgaaggagcagcgggtggcatccctgcccaggggccttaaccctgaaatgcaactaaagggctggcccccctcaaaacaagcctcaagggaaggttcccccccacaaaggctttgggccccctcccctcatgaaagacgcccacccctgcccatgggagtccgtggcccttgcttgtcacatctggccttggttgatctcagggaggttgattctctctcagagagaactgtggggtggggatgttagccttgggaagggcccttcatggaagtaaggagtgggggggttggggagtgtggtaagacccacgaaactttcttgggggacgttcatcattagttactaatatttgggaggcagtggggagatggctggcccccaagtttgaggtatccgttagagccgaacaattgggacctgaagctggttttttcctttggggtttaggtgtgagtgaactattatcatttggagtgggagacttggagagaaagggtttgcactgtccagcactacacagcttcaggcacacagatggttcacatttcccagaaagacacataggtaggacacgtggctgtaccacccatgcaacaacacacacaatcaacgcaatacctgtaaggcaatgtgtgtaaaacaccccacattgcacccacaccccacatgcctggcagtacacagaactgtatgccatccatttgtgcccaggctggggccttgaagtgataggaaaggggtctgtgaatgggtagatagtgtgattggagacggcgattttcttcctgaacaaagtccctcccctacatggtggacatgggatgaaaacggccttcagttacttcctctttaaccccccagggctgcctgccgcctcatgtaggacaggatgtccatcttgacgttgctgaccgtggtccggtggtgccagcgcatgatgggtataccatctggccccaccaggaacttctcaaagttccagcggatgtcgtgaaccttcatggggttcccagaagaggcggtcagatgtacccaggagactccgaaggtgggaggacaggagttctttaggaaagtgtagaatttctgctctttctctccattgacatccccctttctcaaaagagctggaaaatttagggaacaaaagcctcccaccttggtcggaccataccttgaggggttaggaaaggatcttctgaagttctctcctggttccttgttttccaaaattggttgccagggaaagcccgagaatgaccgagaccgaatggtgcaagctcttccgtgtagtgcagttcagttcaagtgtacatggcccgtcaggccgtcagtagcgtggccacgttgacaaagaggacgtatttgccagcatactgcttgaaggggatgtactcctccccatcaatggtgagggctccgtactcgtaaatggtgccacttatgccaccatggcagtccatcttcgacttctcttgtccccggctctgcgagacgaagccggccaggagcagggaaagcaggcaggacgcctgcagcagccgggccagtgacggggtgggggcacactcagggtcgcgctgagccgctgcctgatccctggccaccgtccgtctgaggtgtccggcgctcccagccacctttcaagccctcgggtgtgattaatccgcggccaagccgagacccttgcagccaatcgctaggcggctgggatttcaggggcgggcgcgacttgccctcagctccccacctccccgtcccggggcgacagtgacataagcaaatctgggcagagaggtggaagtcaggtccctgtggacgtgggaggccggtcccttcctcttttggct

SEQ ID NO: 155988 - DNA, 406 bp, Homo sapiens
gatgctcctgcctctgcctcccagcccctcacccagcacagctctgcctggacttggagagatgggaggcagacccccaccaccatacatgctgtctgtggcccctcagacattctgtttcatctcccattcatctccctcctcccaccgtgtcagtttttctgcctttccctgctctgttcttccccctccttcccagaagtttttgcacagaacttcattttgaaagtgtttttctcattctccatacctcccccaagctctcctccgacccttccacaggctcagccctgctgtcctgagcgtctcctgggccagagagaggagatgggggtgggagggactgagttgatgttgggtttttcattcaataaattggtgatttcttaaaaaaaaaaaaaaaaaa

SEQ ID NO: 155989 - DNA, 1499 bp, Homo sapiens
ggcactttccctcctggcactgccaccagcctcaccgcctgcggcagggggaggccagcaggcccgggcccagcaccccttccctggcaccagggtctgcctctcactcgcccaggtcccgaaggacactgccacagggacgccttccctcccctcccctacagcccacccctgcacagcccctcctccttcccgcttttccccttctccctcctgctccaggcccaaggcgtgttggttttgccttctggtgcccatagtcccctggactgagtcccccaggccttccttcacccgacttccaaactcttccttgtggtatcagtttccttctcggaaatgagaaagctggaatcctggtccccagcaggagagcctagtcctcccccagcccctccagccaccagggtgtcctctaggatgcagctgccagatccactcactctgctgcctccagcaggacccaaggccactttcaactcttatggggttctccacctgccccagagcttctcaagggagggtaagggggcaccctgagcccacaggacccctacttcacagctcacaggggcaggaggcagctcccctgcctccaggaccctgttgctatggtgacacagcgtttctaggacagaggggcctccaagtctccccccaaccacccgtgcacgactttcctcaccaccccccaggttccctgcagatgtcgtgtgtgtcctgagtgtttctttggttctttgcacgccaagtctcttggttgtaccartgtgacacacccrtgttgcactgggtcgctgtcttcgtggcttccacccttgttaatgatgctcctgcctctgcctcccagcccctcacccagcacagctctgcctggacttggagagatgggaggcagacccccaccaccatacatgctgtctgtggcccctcagacattctgtttcatctcccattcatctccctcctcccaccgtgtcagtttttctgcctatccctgctctgttcttccccctccttaggccccagcctgggcccaagacccaatcctcccagccagggtttcccctccaggcagggttcctttccctccctgtcacctccctctcacccaaccccggggtctgaagcccctcattcctgaccgtccgtgttcctcaggaagtggttgaaggcaacagggcccccagcccagccctctgcaccccccaagcccggcaatttggggccccacaagcccctttggaagcttttctcttgtgcctctcactccttcccaagaagtttttgcacagaacttccattttgaaagggtttttttcattttccatacctcccccaagctctcctgccagccccttcgccagggctcagccctgctgtcctgagcgtctcctgggccaaagagaggaaatgggggtgggagggactgagttgatgttgggtttttcattcaataaattggtgatttcttaccgccaaaaaaaaaaaaaaaaaaa

SEQ ID NO: 155990 - DNA, 1216 bp, Homo sapiens
ggttcctcttctgggtcttccagatcccggcccccttccccgagtacgtcactgacctgtgcatctgcacaccaaccagcgccagccccaacggttaccttctggcccggaagggacaaagcccaacggctgttgggagcggctcagggtggtcttcccagcgggccctgcgggacggcgcttgagctggggaagccggggggcagcacgcccaacacagtcaccatggagatgcagtgtcccccggggaacgcctcttgagactccagcgcctggaggaggcaggggcaggaagcggcctccaagacccttcgccttgggacaggaatgggcacctgcttctaagtccatacaggagaagaaagatctgtttcctctcctcgggcctccttctccctgggctggggacttccaggggtggctgggagactgggcagccaccagcaaaacagaccctgtggcccctgcccggctcccccacccattctgctcccctagagacctcttgtacagaagttgcccccaggtggtggggcccctccttgccctaggctggttggtaaaagagaggaggtcaacacccagcctagccacctctgcctcttgggtcagccctccttgactgtgtcccagcccagcaccaggccagcagcctcatccctgccattcagggctgttccagagattcgatcctcttaaggcattatcagtgagccaaatgtgaaggaaatggtgtcctggaaagaaaagttctggttcaaaatgcccttgtagctaaagtctttctggcaaacaacctccccttcccccccgtcgaaatcatttgggtgacctttgatgggggggatttctggttatgttcaaggctctgggagacagggaaaaaggctttggccgccttgggtagttgaccatgccttttctgactccgggacgagccagtcctaggcatgcctccgggagcacttgaaggtatcccgcaaggccatgaaggacccactgggcaagcctcctggacagcctcttggctccaacccccaccccgaaagtggaacactggctccgcccttggccacctggggacttggcactgtggtgcacagtgggcccacatgtggccaacgggaagttttataaaaagacaaaaatgtatatcaataaaccattttataacttgcagccaggaaggcttcatgcccacaaaaaaaaaaaaaaa

SEQ ID NO: 155991 - DNA, 1041 bp, Homo sapiens
  misc_feature (1)...(1041): n = a,t,c or g
ggctggagtgcaatggcgcaatctctgctcactgcaagctccgcctcccgggcncaggtcattctcccgcctcagcctcccgagttcccaagtagctgggacttacaggcgcccgccaccaagcccggctaattttttatatgtttagtagagacggggtttcaccacggttaaccaggatggtctcgatctcctgacctcaggatccgcccgcctcggcctcccaaagtgctgggatttcaggcgtgagccaccgcgcgcagcccagctttacatttttcagactggcttgccatgtctttgtcagacattgccatttacctacctagcatccattcttcctagcagatccctgacttcactcagggctgggatgtcccagcttaaaatactttccccaactctcttacagcaagggatggctatgtgattcagttctgtcccatgagacatggatggaagccactaagtggggcttccagagattttaaataaggacacctttgactgacatgctccatttggtctcttaagcttcatcttcttcctgcttgaaatgtagatgtaatacttagaggtgaaataacttttctgagacaatgaggatgaaagccactcaccaaagatggcagaatagagcaataaatggaccttgagttcttaataacactgttaaactgccatatcagttatggattatgtaaccttggatttattacgtgaaaaaataaactcacagtgaagctagtaatcacaggaatttttgtttcttgcaaccaaatatgttcctatctgatacagtatccccacttatttaatattccatctttttataccaatttgacatgctaccttcatcaccttcccatgtataattaattgggtataattctggaaaccctcctgtttcattgacctaaatgacttaaatttttaatagctaatataataacagccaatgtttgttgaatgccaaaactattctgtttattacattaattatctagttcatttaaccctcacaacagcgcgaattgcacg

SEQ ID NO: 155992 - DNA, 5264 bp, Homo sapiens
ttacaattgaaactctgggaattcaaaattaacatccttgcccatgagcttcttatagacaccagaaaagggttcaaccttgtgttccacattgttctgctgtgcttcgtccaaatgaatctttatgaggtggctgccatccagtttcacgtggattctcttgcccacaatttcgcttgggaagaccaagtcctcaaggatggcatcatgcacagctgtgagagtacagctcctgggaagcttttgcttattgtttgtacagcttttttgagttggcttaggcagaattctccttagctggacttgggttttctggaaagatttcagttgaggaacgggaacaaagattatgatagctttccgaccaccaccaacttcaatttccttggctgccgtaatattcagctcccagagctgagccttgaggtccaagttcatctccagctccagaagagcctgggagattccggattcaaactcatccggcttctcgccattgggcttcacgatcttggcccttgaactgaacatggtcttctccttgctgagcgctgtgttggtgaggtttgttgatgagtcccataacattgtgtctagttgatcttcttcctcttctccttcttcttcttctccttcttcttcttcttcttcttcttcttcttcttcttcttcttcttcttcttcttcttcttcttcttcttcttcttcttcctcctcctcctcctcctcctcctcctcctcctcctcctcttcttcttcttcttcttcttcttcttctttttttttttttttttgagacagggtcttgctctgtcatccaggctggagtacagtgacgcgatcatgggctcactgcagccttgacctctctagctccagtgatcctcccacctcagcctcttgagtagctgggaccacaggtgcacgccaccacacccagctaatttttgtattttttgtagagacaagttcttcctgcgctggccaggccagtttcacacgcctgggctcaaacagtcctcctgcctcaatctccccaagtgctaggattgcaggtgtgagctgccacatctggctttttactttgtatccttattctataagctcttttcttttcttttttcttttttttttttgagacggagtctcgctctgttgcccaggctggagtgcagtggcgcgatctcggctcactgcaagctccgccttccgggttcacgccgttctcctgcctcagcatcccgagtagctgggactacaggtgcccgtcaccgaattttttttgtatttttagtagagatggggtttcaccgtgatctcgatttcccgacttcatgatctgcccgagggattacaggcgtgagccactgcacccggcccttttctttttttttttttttttttttttttgagacggagtctcactctattgcccaggctggagtgcaatggcgctatcttggctcgctgcaacctctacctcctgggttcaagcaattcgcctgcctcagcctctcgagtagctgggattgcaggcatgcaccaccacgcccggctaattttttgtattttagtggagatggggtttcaccatctctaacttgaactcctgatctcaagtgatccacccgcctcggccttcaaaagtgctaggattacaggtgtgagccaccgcgcctggcctatacgcttttttctgttaaaaaatatttttaagtttttaaacttttgttaaaaattgagacagaagcaaacacattacttactaggcctacacagagccaggattatcagtatcaatcccttccgcctccacatcatgtcccactggaaggtcttcggggcagtaacggacatggagctgttatctcctaacatgccttcttctggaatacctcctgaaagacctgcctgaggctatttaacagttaactttttttttatatgtaagtaggagtactctaaaataacaatataaaatgtagtacaataaaataaataagccagtaacgtagttgtttattatcaagtatgtactgtacataattgtatatgctagacttttatacagctggcagcacagtaggtttatttataccagcacctccacaaacatgtgagtaatgctttgcacttgaccttctgtcagctatgacatccctaggttgcaggatttttcagcttcattataatcttatgggaccatcttcatatgtgagtggtctcttgacccaaacattgttatgtagcacatgactgtaaattttggaatcaccttgtcagtatttacaaaatagctttctgagatttagtggcaggatctcagctcactcctacctgcacctcccaggttcaagcgattcttatgcctcagcctcccaagtaactgggattatagacgtgcaccaccaagcatggctaatttttgtatttttagtagagacagggttttgccacattggccaggctggtctcaaactcctggcctcatgtgatctgcccgcctcagcctcccccagagtgctgggattacaggtatgagccactgcgcctggccaaaattgcctaaatttttaaaatcctaaattggtgttgaattttgtcaaatgctttcctgcattgattttgatgatcacttgatttttctccattcttttgttaatgtgctaaattatgttgcttaatttttgaatgaaaaaataatcttacattcctgaaataatttcggtttggttgtgatgttttattcattctatttcgtgctgaattcagtttgctaatattttgtttaggaattttgcatctatgttcatgagacagatcggcctgtaattttacttttttgtaatgtccttgtcaggtttaggcctcaaagttatgttgactttataaaatgaactgtgaagtatttcctcttttttatgctttagtttgagtaagattgattttttttaaaacttatgtcgtccttaaatatttattagaattcactagggaagttatcttggcctgttactttctttcttgagtaaattttgttttcattctttttttatagttaagtatattgagttagaatgcatacacaaacaaatgcacacaacttaaagtccagttctatgaattttgactaatgtataaacctgtttaacttccactgtaagcaaaatatagtgaattttcgtcaactaaaaagtccccttgtacccatttaccttcagtacctatccctaccccagccacaggcaacaaatgattttcatgtgcttatttgccatctgtatacctctttggttagttttctgtttatatcttttgcccatttatttttttttttttttgagacagagtcttgctatgttgcccaggcaggtcttgagctcctgggcttaggggatcctcccgcctcagcctcccaagtagttgggactacaggcacacactactactcttggtttgcctatttttaaatcaggttgtttgttttcttattattgtgttctctacactgtaggatattctacctttcctagaatttcatgtaaatggactcagacatactgttgtgtctggcctcttttgttcagtgtaatgtttttgagcttcatccttgcatgttatgtgtatcagtgattgattcaatttttattgctgcatagtattggattgtatagctataccacaatttgtttattcattctcctgttgatggaatattggttgtttccagtatttagctattattattattattttttttttttgagacggagtcttgctctgtcaccaggctggagtgcagtggtgcaatctcggctcactgcaacctccgcttcccaggttcaaacgattctcctgcctcagcctcctgagtagctgggactacaggtttgtgccaccacgcccagctaatttttatatttttagtagagacgggatttcaccatgttagccaggatggtcttgatctcttgacctcgtgatctgcccaccttggcctcccaaagtgctgggattacaggcgtgagccaccgcgcctggtcttttttgtttgttttgttctttttttagacagagtctcactctgtagcccaggctggagtgcagtggcatgatctcggctcactacaagcctgcgcccctcaggttcaagtgattctcctgcctcagcctcccaagtagctgggactacaggcgcccgccactacgcccggctaatttttttgtatttttagtagagactgggttttgccatgttggccaggctggtcttgaactcttgacctcaagtgatcttcctgccttggcctcccaaagtgttgggattacaagcgtgagccaccacacccggccagggatgtcattttttataactagccataaactttagctttgaagtaaaactatttctagcaagtgattcttacctgatattttttgttgttcttgcccatattttaattgggttgtgttattatggttctctatgtattctagatttaagtttttgtatatggtgtgaggcaagtgtcaagtttaattttttttctacaaacatcctgttgttccagtaccttttgatgataagactgtcttttcccccattgaattatcttaacgccctcatgaaaagcaattggccatatgtatgtggatctacttttggactctcaattctgttccagtgatttatatgtccacccttatgtcaataccacattattttgattattgctgctttatagtaagtgacatcatgttgcctgaaatcacgttttccacctttattcttctgttgatggttgctttggcaattaggggtcctttgcattttcgtagacattttagaatcaacttatctattgctactaaaaatgcttgattgggattgtggtaaatctagaaactaatttaggaagaatggtcatattaacagtttcaagtttcagatccatgagcatattttcactctccattaggtcttttaaaatttatcctagcagtgttttatggtttttactgtagaggtcttacacattttgttacatttgttgctatgtgtttgaccttttttgatactagtgtaaatggaaattttttcttttatgttctagttgttcattattacactaaatcatctttgggtgactactaaacattctattgaaaatttgtgaatggcgtgaacccgggaggtggagcttgcagtgagccaagatcgcgccactgcactccagcctgggcgacagagcaagctccgtctc

SEQ ID NO: 155993 - DNA, 503 bp, Homo sapiens
ctgcagcctcagccgtcctggactcaaccaatcctccctcctcagcctcctgagtagctgggactacaggcacatgccaccatacccagctaatttttgtatattttccagagacaaggttttgccacgttgcccagactggtctcgaactcctgagctcaagtgatcctccctactcggcctcccaaagtgctgggattacaggcgtgacgaccgcgcctgacccaggttcacactttgtactggacttattagaggtcagcatggagagaagggacttgctcaaggccacaatgtcagagcctcatccagcatccagggcagtgtggtcacctgggggcttaggggtctgttcttccctcatcattgaaccagggaaagtcccctctgtgaggctaccttcatcatcagctggggtctgggagagaatatctggtgataaaaaccttaggagttgaagtgagtgggcaacatgcctcagggaaagcaaagccacttcatac

SEQ ID NO: 155994 - DNA, 419 bp, Homo sapiens
gcctgaggaattccgcacgagagacagcaagccagagacccctgacctggagcagctggagccgtctttggaagatgtggaaagcatgaatgattttgatcccttgttttcagaggaaacacctggagtggagaagccggtcaccactgttcaggtttgacttctacagcccagaacatgcttattctttgaaggtgttgacctaaatggctgggctagtctgtttctttaggacttaaaactgttatgttttttagaaaattgggtaccaatacttaaaacatctgaaatcagggatttttttcccccggtgattgatcgattggttctagtaccaagatctgtgaatctctgagaaacagtccacccggcagaaacatttggtaaagtaattgggaacttgagatctgaatactggc

SEQ ID NO: 155995 - DNA, 1806 bp, Homo sapiens
atgcagatcttcgactacaacagtgagataactgaccctggaattcagcaggaggcagcgggcctagaaggcaccaggaagccatggaacatctccatgctgttgacaacaaggaacatctctctttgccagtggttctccaagtgtggccctgagccagatacatcaacgtcatggggaacccctcaaaaagaacactgtcaccttgtgaataaagtcggagtagactccttaaggatgagaggctacatgcacggaataatccagccactcaacctgttccaggaatcccagctgatgccccagacattgtttccatttcataactttcaaaattgtttctttgaagaattacacaaatggcggtgtcctgattattatgagaataacgtccgcaagatgcagctcccattttccagcaagctcctgggcagcactctgacctctgaggagaaacaagaaaggcggcagcagcaattgcggcggctgcaggagctcaatgcccggcggcgggaggagaagctgcagctggatcaggagcgtctggaccgactgctatatgtgcaggaacttctagaggatggccagatggatcagtttcacaaagctctgatagagctgaatatggactccccagaagagctgcagtcctacatccagaagctcagtatagcagtgggagcaggctaagcagaaaatcctccaagcggaagtcaacctcgaggtgggatgttgttagacagcaagccagagacccctgacctgggagcagctggagccgtctttggaagatgtggaaagcatgaatgattttgatcccttgttttcagaggaaacacctggagtggagaagccggtcaccactgttcagcccgtgtttaacttggcagcatatcatcagctatttgttgggacagaaagaattcgagctccagagattattttccagccatctctcataggagaagaacaggctgggattgcagagactcttcagtacattctggacaggtacccaaaggacattcaggaaatggctggttcagaacgttttcctcactggcggcaacacgatgtatcctggcatgaaaagccagaatggagaaagaactggtggagatgagacccttcccggctttctttcaaggttaacttggcttcgaacccttgtgctggaatggctggtacggggggctcgtgaactgggccttgaaccacctagatgataatgaagtttggatcaccaggaaagagtatgaagaaaagggaggagagtacctcaaggagcactgtgcttccaacatctatgtccccatccgcctgccgatgtcatgcctcccgctcctcagatgccccaggcatcccagccaaggctccgctgctggtggaggtggtgctgggtgagcaggcatagcagaggccctccagagagactgccctgcacgcccatgccttgggccacgttggcagtgtgacaggactgtgattgtgctagatgtacctgccccaagtctgctggtcacatttggcagcaaaatggatttctcctggggagaacaaagttaaaggacccctgagacctgcccttcagaattcggttcacttgggggcttctgtggtagagactaactggccttctgatgtctttgttcaactgtggccagctgtggcatcagcttcctggagcagtaaatgaagacagagtggaggacacaaatgtacaaaatgcacaagactgatttcttaccacattttagtctttcattgttttaaaaaaaattctttaaaatttaaaaaaaaaaaaaa

SEQ ID NO: 155996 - DNA, 304 bp, Homo sapiens
  misc_feature (1)...(304): n = a,t,c or g
atcctcctgcctcagcctctcaaagtgttgggattacaggcataacccccaactcaataaaaaagtttttaaaaatttccaaagctcatatttgatccagctaggattttaccctgccctccagcctgagtgacagagtgagacccccatctccaaaagaaaaggctatcaatacaaaagtttatttaaatttctgtacagctatacaatggaatactctacaaaatggagagatccataagataaagcaaatgaataaagcaaaatgcatgtgttgcccnnnnnnnnnnnnnnnnnnnnnnnn

SEQ ID NO: 155997 - DNA, 898 bp, Homo sapiens
ctcagctctcaaagtgctgggattacaggcataaaccacaactcaataaaaaagtttttaaaaatttacaaagctcatatttgatccagctaggattttaccctgtacatttgtatttcttgtaggctggcgcacagatatcttaaatggctactaattgctgctgtgtatgaaaacaaatggctatcaaggccgggtgcagtggcttacagatctggtcttgaatctcaagtccagaccagtccagagttcaagacccagcctgggcaacatggtgaaacccccatctatacaaaaactcggcaaggcatgggtggcatgcacctgttgtcccagctactcgggggctggggcaggaggatggcatgagcccaggagcttgaggctgcagtgagctgtgattgtgccactgcactccagcctgagtgacagagtgagacccccatctccaaaagaaaaggctatcaatacaaaagtttatctaaattactgtacagctatacaatggaatactctacaaaatggagagatccataagataaagcaaatgaataaagcaaaatgcatgtgttgacagctgttgtgatacctcagttcttgtcttcttggtttaaaagaatttaaatgagacagcaaaggagatgcagcataatttattgcaaaagaaaaggagtattttgaaagttaggtgcagaacagacagtacacctgagagagagaattcagggccggctgctcgtaagggtgagacagcattgattattgctggagaaactccctttaatggagttttgcattattattcataaggaggggaggtgttgcagtaatcatgtcctgggtggtcctctgcacaggtgcagtagctggtaatgcttgttcatacaccacatgtctc

SEQ ID NO: 155998 - DNA, 719 bp, Homo sapiens
cgacaggaaggggctggagtccagcccagaaccaccctctgactgcagacgacctcctggcatggacttattagccatctcggccagtactcctagccccaagcccacagccagtcccccaaagttggccaagcggctgatgcgggaggcaggcaccttgcgttctcgagagcggtcactcagctggggccggggtgtcttcctgggacgggcctcccgtgccctgcaaatgtcctcctcacccaggcctctcccaggcccatcctggtaaaacttttgggcccaagaacctccacatggtccccagcggtggggcccaggccccagggccccacaaggccaaccaacagtcctggcccagctgtccaccggtcccccgaagtaggccccccaccttcagccacattgcggaaaatccaatggagcgtaagtcatttgctcagggtagcggagctgggaactggcagaggaaggtctcgaacccacacccgtgggaactccaagtctttgaaagtccgtcccgcccctgcgtgaagaatgggcgcgcggctggactcgtcaccgggggttttagggaaggttgaacttgtcattcaaccgtgtagggagggtggtttagtcacaggggtggagggagggggcccactggcgcgccaccaggaccccggtgccctagatgcatacctggccgcgctacgaaatcgtcgacccgggaattc

SEQ ID NO: 155999 - DNA, 615 bp, Homo sapiens
ttttttttttaaacagacagggtctggctctgttactcaagctagagtacagtggcatgattatagatcactgcaagcctcaaatttctggggctcaagtgatccttcccgtctcagcctcctgggtagctaggcctacaggtgtgtaccaccatgcctagctaattttttttaagtgggggagggaggtagagacagagtcttgctatgttgcccaggctggtcttgaactccttgcttcaagcgatcctcccacctcaacctcccaaagggcttgggattacaggcttgagccactgtgcctggcctgcttaatctctttaagccatagtttcttccttcataaaacagcgatgatgacaatagtaactactttataaaattacggtaaggattaaaggagataatacatataaagtgcttaacatgatacctggcacatagaggttcaaaatataatgacttctattatcataatttttgcagtgaatcattaagttttatagattaaaaaaagatttttaaaaatgttgacttttgctagtgacaaacagacccaaattcacataaagcacaggtgtgtacagccataccacaaattaaggtatcttttct

SEQ ID NO: 156000 - DNA, 386 bp, Homo sapiens
atttttcatgtactgaaaaactgtcaaactagatctatatatctggcactaatgtctttcaaaaatgaaggtgaaataaagatgttttcaaacatacaaaagctgaaagaatttattactgacagatccaaatacaagagatgttaaagaatgccctctaggcagaaggaaaatgataccagatggaaatctaattctaaccaaaaggaataaagagaactagaaatgataaatacctgagtaaaaatatgaattttttcttattaagtcttttaaaatatatatttgacaatttaaacaaaaatagcagcaaggttacgatgtttataatatatatgtagaagtaaaatgtatgtattgtaagttgtgagcgcggccgcgtcgac

SEQ ID NO: 156001 - DNA, 487 bp, Homo sapiens
ttttgagacagggtctcactcccatcttctgggctggagtgcagtggtacaatcacagctctctgcagcctcgacttcctgggctcaggtgattctctcacctcagcctcccgagtagctgggaccacaggtgcacacccccacgcccatgtaatttttctatttttagtagagacgggttttcatcatgttgatcaggctggtctcaaactcttgggctcaagtaattcacccgcttccataggggtgagtcactgcaccctgccaacatttttcaaaagtaaaaaataaattaaaaaaaaagtctttagtggattgctgagtcccctctgacaggaggtaccaaatgtgcttttcctgaggacaggggaagagttcactattcagccatacctttgcatattttacaaaattcacttctaccaaggatgcctctccacaaaatgaggagtagcacaaagaacacctaagaaaccaggcctgaccc

SEQ ID NO: 156002 - DNA, 1899 bp, Homo sapiens
atggtcagtcagggctgcagaagcagagaaatgcgggatgcccatgctggctgggactcgcccactgccctgcacatggcgagaggacttggacgcagggtcttctctgctccccgtcacacagagggtggcacacccgatgggaactctcatttatcaccaaaccaaaagatggagaaactgacagagaagggctgcaagcagctacggcagggcgggctgtgtgtaagagtcagtgacagaactgtacgcagcgtgcaagagacaactgccatcactgccaccttgaagggcagcctgggcacatactgtcgagggacaaggaacttgctgacagcagaaggcttcatgccacatgcttcggtctgtatacagtccaaatccggcaaagtggcacgcaacactgtccaggggttcactgcacatggcaaagctgtcctagaggccgccgtctctgcttctggccctgccgggacttggggctgcctgcgcattaaatggcccaggtctgtgtcctggttactcaagcctgagagagctgccacccttgtaggtcatggctgcaggaaatcaggctgtcccccaggtctaggtgggtctgccaaaatgccccgagacatcaatcggctgcccccgctggaaggggacgctgtccctgctggggtccggagcccacttcgggctccctctctaaccaacagtggctccctggagactctacatgccccacccttgccctctgctccactgctgggaccacctttgctctcaaggactgtggacaccgggcctggaggttcaggcagggaggtggaggcgactacatgtggacgcaggttaaaggacaaggattctgaacatgccggggctgggtcccggcaccatcagagccaagtcaccggctccctcggggaggagagagctgtgagggctgagtcaccgggggaggggccggctgaattcctccgcaggatccaaggggctgtgcagacacgggccgtgactgctgggtcctccgtggagaaaatcaataccaagttggagacctgtgactgtgacgcatcagaggaggaggtgctaggtggagacaacgtggagactgaggaaagatctgtctgtgtcccagaacctgtaaagatgaccttatttgaaaaaagggtctttgcagatataatcaggtgcctggcacgctgggctcctgccgccacaaaccgacgtgacttggtgaacactctgatcccaggacacggcccttcctgctccttggtggccttcctgggcctccaagtccgcgaccatacccatgacctgctgcccgctgctggtgggcctcagatttcccggaaagagggaagaggctcagaccagcccatagcagctttccagtgcccgcacccccatgcgtccccgtacagtcccagtcagggccgctcccctgcaccccccgtcatttcccacttccgttcccagcaccggcattcggcatttgccgcgggccgagggctgctcccgggggtgcaaggcagtggcaacgcagcggccctggtggctttatgctcccggcacggctccgggggggctgccgtggtgacagtgcctggtcacaacaaatccatccctccccagcctgtttccaacttgactgaaacacccctaaatgctccacaaagttcctgggcagccctgggctccaagaggcttggccaggggtgcagccacgggttctttgctttctcattcaccgctgacgtctgtactaatgacgacacgctttcgaatgccaattcactgactgaagtactagccacagagattaaacatgacataaacctggccaatgaagggcttgcctgggaccgtggctgggactatcagggaaaagatatgctttctctgtag

SEQ ID NO: 156003 - DNA, 499 bp, Homo sapiens
ttttggaagagtccctattctgtacagccacgcactgaggcaagagcacaaggaaacaagcagaaggaattcagagaaacagctccaggctccagctcaaaggccgacaccaaaagcgaacacctctgggcgctcttgccttcaagaaggtggggaggctcacagacgcagcatccacccctcgcaagggaacctcagttcctggcctgtggtcccatgaaggacatcaggctggcagattggagcacaccccttctttctaacccctcttgaaagcttccttgaatctgccagtcctgccccctggagcaggaaggaaaacagaaggcctaggacgctagaggggtcccgagctttccggagctccagccaccatcaggtctgactgctcagggacagacacaccgaccacatcctgacctcaggatgacctgcggaaggacttggcatttcttcttagccaaaacccttcattaaaagacgggtgagggttccaaaa

SEQ ID NO: 156004 - DNA, 536 bp, Homo sapiens
gtctcggggcattttggcagacccacctagacctgggggacagcctgatttcctgcagccatgacctacaagggtggcagctctctcaggcttgagtaaccaggacacagacctgggccatttaatgcgcaggcagccccaagtcccggcagggccagaagcagagacggcggcctctaggacagctttgccatgtgcagtgaacccctggacagtgttgcgtgccactttgccggatttggactgtatacagaccgaagcatgtggcatgaagccttctgctgtcagcaagttccttgtccctcgacagtatgtgcccaggctgcccttcaaggtggcagtgatggcagttgtctcttgcacgctgcgtacagttctgtcactgactcttacacacagcccgccctgccgtagctgcttgcagcccttctctgtcagtttctccatcttttggtttggtgataaatgagagttcccatcgggtgtgccaccctctgtgtgacggggagcagagaagaccctgcgtccaagtcctc

SEQ ID NO: 156005 - DNA, 1686 bp, Homo sapiens
atcattccttcagccagctggttctccaccgggattccaggaaagaatgaggccttgcaaaatgctctgaatggctgttcccaccaaaggtggtgggagccaagccctttccagccacaaagggactcactcaaggtcacagggctgcagcgggctgcgttcaacccagtggcccccacacactccttcaaggaccagcatcccatgcccagcttctgccacttcctctctgggcctgtgcccagcagcaggacaacccttgccacaggcagagcagccccgcactctagtccattgaaaagcctggtccaaggctacgcgccctggcagacttccatgagctgcgactaccagccaccaagacggcaagagcacaaggaaacaagcagaaggaattcagagaaacagctccaggctccagctcaaaggccgacaccaaaagcgaacacctctgggcgctcttgccttcaagaagacctgcttcctgaagcccagcctggtctctctgtgcccgtgtgtcatccttgcccactcttacatgctgcgaggctggctgtgtctgcagccgcagccatcagaggcctggaggtagcagaagcagctctggtgtgcgctcaaaagctccttgcggcttgctccagccactcacttatcaccgtgtggagtagagggaaagtaaaagaaacaggtcttccttccactgtgcaggcagtcagcgagctcctgcaggtcctgctctgtaagcagaaagctggaggctgcaccccagatcaaggccctcacacctcaaaggttctcacggaggcctcgtctctgccccgcatctccagaatgtgcttgctgcagccaggtccattctctgacaacatcccactgggcacagccacactgactcctgctgccactgcagccacacctgggcctctcctcccctgcaccaagcatggcaaccctctaggccatggcctcacctgccattaccccctggccccattacccctgcccccagctccgcatgtcaggtttgctgccctgtcctgcctagaacgctccgcaggctgctgtctctgtaccccctcctgccgaataacgactgttggcggctctgtgggttcatgtgcttcggaattaaaccacagggcctgcttctcattgccactgatgctcggcttccaagcccccatcgccacccaccaatggctattcagtgtccgcaatgacaagaacaccctggatactcccagatcggctggctgtgatggtgctcacaggcccaggcaagagccagccccagatgggcccatagtgctgctctgcttagagccaatgcctgcaccaggcagctaccctggaggtgcccctgtgagtgggcataggcaggtacacccccagcagtggcaggtgcagcatctcgggcagtcggggggcatccgcacaggcctgggtgcaaactgcggcaaatcccatgattctgcatacaagaagggtggggacgtgtgttttccaggggaaatggtccctgtcgtgcatcagattctcaaaggggtccagcacccaaacaagtgcaggggtcactgggggacactggtgcaacagaagcagccctggactgggagtcggggccccactgccgaccagctccaccctaaaaactcatcactcaccctcgtgtttcctagcagatag

SEQ ID NO: 156006 - DNA, 1668 bp, Homo sapiens
atgcctgcaagccctgtgggaaatcggggtggagggagcgggcggggccgagcggccgcgggaacgagcagtgccctgcctccaagggagccccgggtcctctccccactggctggccctgtcgtggacatgagctctcaggtttctgacgggctgagcgtagtggctgagggctccctcaggcaggggcagactctgatcccaggacacggcccttcctgctccttggtggccttcctgggcttccaagtccgcgaccatacccatgacctgctgcccgctgctggtgggcctcagatttcccggaaagagggaagaggctcagaccagcccatagcagctttccagtgcccgcacccccatgcgtccccgtacagtcccagtcagggccgctcccccgcaccccccgtcatttcccacttccgttcccagcaccggcattcggcatttgccgcgggccgagggctggtaaaccggtcagtgaagaaacactccgaacaagtcaaggaggaggctcagccctctggttactccaggaagctgccggtcttcacccacacagagccccggcccttcagggaccacggtggaaatgccagcgagacggtggtgtgctggtgccactgggcctggtgccacatcaccacgtccctgaaagtaaaagaaacaggtcttccttccactgtgcaggcagtcagcgagctcctgcaggtcctgctctgtaagcagaaagctggaggctgcaccccagatcaaggccctcacacctcaaaggttctcacggaggcctcgtctctgccccgcatctccagaatgtgcttgctgcagccaggtccattctctgacaacatcccactgggcacagccacactgactcctgctgccactgcagccacacctgggcctctcctcccctgcaccaagcatggcaaccctctaggccatggcctcacctgccattaccccctggccccattacccctgcccccagctccgcatgtcaggtttgctgccctgtcctgcctagaacgctccgcaggctgctgtctctgtaccccctcctgccgaataacgactgttggcggctctgtgggttcatgtgcttcggaattaaaccacagggcctgcttctcattgccactgatgctcggcttccaagcccccatcgccacccaccaatggctattcagtgtccgcaatgacaagaacaccctggatactcccagatcggctggctgtgatggtgctcacaggcccaggcaagagccagccccagatgggcccatagtgctgctctgcttagagccaatgcctgcaccaggcagctaccctggaggtgcccctgtgagtgggcataggcaggtacacccccagcagtggcaggtgcagcatctcgggcagtcggggggcatccgcacaggcctgggtgcaaactgcggcaaatcccatgattctgcatacaagaagggtggggacgtgtgttttccaggggaaatggtccctgtcgtgcatcagattctcaaaggggtccagcacccaaacaagtgcaggggtcactgggggacactggtgcaacagaagcagccctggactgggagtcggggccccactgccgaccagctccaccctaaaaactcatcactcaccctcgtgtttcctagcagatag

SEQ ID NO: 156007 - DNA, 2361 bp, Homo sapiens
agcagcctgcggagcgttctaggcaggacagggcagcaaacctgacatgcggagctgggggcaggggtaatggggccagggggtaatggcaggtgaggccatggcctagagggttgccatgcttggtgcaggggaggagaggcccaggtgtggctgcagtggcagcaggagtcagtgtggctgtgcccagtgggatgttgtcagagaatggacctggctgctgggaaaggtgattgtgtttgtctgagccacactggactcttctctgaccagcaagcacattctggagatgcggggcagagacgaggcctccgtgagaacctttgaggtgtgagggccttgatctggggtgcagcctccagctttctgcttacagagcaggacctgcaggagctcgctgactgcctgcacagtggaaggaagacctgtttcttttactttccctctactccacacggtgataagtgagtggctggagcaagccgcaaggagcttttgagcgcacaccagagctgcttctgctacctccaggcctctgatggctgcggctgcagacacagccagcctcgcagcatgtaagagtgggcaaggatgacacacgggcacagagagaccaggctgggcttcaggaagcaggtcttcttgaaggcaagagcgcccagaggtgttcgcttttggtgtcggcctttgagctggagcctggagctgtttctctgaattccttctgcttgtttccttgtgctcttgccgtcttggtggctggtggtcgcagctcatggaagtctgccagggcgcgtagccttggaccaggcttttcaatggactagagtgcggggctgctctgcctgtggcaagggttgtcctgctgctgggcacaggcccagagaggaagtggcagaagctgggcatgggatgctggtccttgaaggagtgtgtgggggccactgggttgaacgcagcccgctgcagccctgtgaccttgagtgagtccctttgtggctggaaagggcttggctcccaccacctttggtgggaacagccattcagagcattttgcaaggcctcattctttcctggaatcccggtggagaaccagctggctgaaggaatgatctgggtgccggaggacgagcatgctgccctgacgaggatgatcagatacggggcggggcagttctggctgaagtcacttagcagtgttcttgctcccccatgccagatgctgcccaccaccggcacagggtcagagttggggtcagcggggcagccgtgtgcccccagtgggagcttggaggtcacggaggaaatgcgagaccagatgcaggcaggggagtcctccggagctgtcgagggacaaggaacttgctgacagcagaaggcttcatgccacatgcttcggtctgtatacagtccaaatccggcaaagtggcacgcaacactgtccaggggttcactgcacatggcaaagctgtcccttgccctctgctccactgctgggaccacctttgctctcaaggactgtggacaccggtgaagaggggcacccggtcgatgccagctggactccgtccacccctcgagagccagggcgttgggctcactgtcttccccagaggaagcctcgctggggccacgggaggctcgggcctctgttcctccggcacattctggcacggtggcaggggaggctccccccgtcatttcccacttccgttcccagcaccggcattcggcatttgccgcgggccgagggctggtgcgacagaagccctgccagcgccacgagccgacgcccctgtaaaagcggctgttccgcgcacacaggagccgcctctggcctgccagacacgtccgaccatttcctacagcgactgcaccattcacattcccgtcagcagtgcacaagggctccggcttctccacttccttgcagacacttgtaattttctgttgtgttttgatggtagccatcccaatgggtgtgcggtggcatctcaccgtggttttgtggaccaaccttgccgttatttcaagggtgcccatcagtgtgtgcgccctggaccttagcttcatctctgtgccctgccctcttcgatgctggtgttggtggaatcgagtctccccaaaactcgcatcccctggatgctcagaatgtgacctttgtgggcaaatgagggtgatggtatcgtcccatttctctgtggagtagctgtgtggctgcatctgcaggttggagccacccacaagctcccgttttccaaagaattcgtctggaatagtcacagtgcagattgcatttttcgaagatgcttctagaagtgtttccacaaaatgtctggtcttctttttctcatgcgtcat

SEQ ID NO: 156008 - DNA, 532 bp, Homo sapiens
cctcccgagcagctgggattacaggcgcccactaatttttgtattcttagtagaaacgaggtttcaacatgttggccaggatggtctcaatctcttgacctcttgatccacccgacttggcctcccgaagtgatgagattataggcgtgagccaccgcgcctggcttatactttcttaataaaaaggagaaagaaaatcaacaaatgtgagtcataaagaagggttagggtgatggtccagagcaacagttcttcaagtgtactctgtaggcttctgggaggtcccttttcaggggtgtccacaaagtcaaagctattttcataataatactaacatgttatttgccttttgaattctcattatcttaaaattgtattgtggagttttccagaggccgtgtaacacaagaccatacaagcacacattcctttaacaatgatgtcagaaagatgatgtaatgtgtgcttgtatggtcttgtgttacagtcttttacatctatcaattcaccacattagaaattaaaactgaaa

SEQ ID NO: 156009 - DNA, 1264 bp, Homo sapiens
atggcggaggagcagggccgggaacgggactcggttcccaagccgtcggtgctgttcctccacccagacctgggcgtgggcggcgctgagcggctggtgttggacgcggcgctggcgctgcaggcgcgcgggtgtagcgtgaagatctggacagcgcactacgacccgggccactgtttcgccgagagccgcgagctaccggtgcgctgtgccggggactggctgccgcgaggcctgggctggggcggccgcggcgccgccgtctgcgcctacgtgcgcatggttttcctggcgctctacgtgctgttcctcgccgacgaggagttcgacgtggtagtgtgcgaccaggtgtctgcctgtatcccagtgttcaggctggctagacggcggaagaagatcctatttctactgtcacttcgcagatctgcttctcaccaagagagattcttttcttaaacgactatacagggccccaattgactggatagaggaatacaccacaggcatggcagactgcatcttagtcaacagccagttcacagctgctgtttttaaggaaacattcaagtccctgtctcacatagaccctgatgtcctctatccatccctaaatgtcaccagctttgactccagttgttcctgaaaagctgggatgacctagtccccaaggggaaaaaattcctggctgctctccatcaacagatacggaaagggaaggaaaaatctggactttgggcactgggaaggccctagtacagctgcgtggaagattgacatcccaagattgggagagggttcatctgatcgtggcaggtggttatgacgagagagtcctggagaatgtggaacattatcaggaattgaagaaaatggtccaacagtccgaccttggccagtatgtgaccttcttgaggtctttctcagacaaacagaaaatctccctcctccacagctgcacgtgtgtgctttacacaccaagcaatgagcactttggcattgtccctctggaagccatgtacatgcagtgcccagtcattgctggtaattcgggtggacccttggagtccattgaccacagtgtcacagggtttctgtgtgagcctgacccggtgcacttctcagaagcaatagaaaagttcatccgtgaaccttccttaaaagccaccatgggcctggctggaagagccagagtgaaggaaaaattttcccctgaagcatttacagaacagctctaccgatatgttaccaaactgctggtataatc

SEQ ID NO: 156010 - DNA, 2473 bp, Homo sapiens
  misc_feature (1)...(2473): n = a,t,c or g
atgaggagatctggctgcagccaatgtgtgggtcacaaggtgggatggaacttggcatgcacaaggaacagagacaaagccagcgtggtagctggggtggcagcagcagtggctgcagtggacagtggcagagcctgtcctcagggcatgtgcacagcagctcctctgctgggggcagttgagttgctgcttgtggtagctctcccagaccctgatgtcctctatccatctctaaatgtcaccagctttgactcagttgttcctgaaaagctggatgacctagtccccaaggggaaaaaattcctgctgctctccatcaacagatacgaaaggaagaaaaatctgactttggcactggaagccctagtacagctgcgtggaagattgacatcccaagattgggagagggttcatctgatcgtggcaggtggttatgacgagagagtcctggagaatgtggaacattatcaggaattgaagaaaatggtccaacagtccgaccttggccagtatgtgaccttcttgaggtctttctcagacaaacagaaaatctccctcctccacagctggcacgtgtgtgcttttacacaccaaggcaatgaggcactttgggcattgtccctctgggaaggccatgttacatggcagtgccccagttcatttgctgtttaattcgggttggaccctttgggagttccatttgaccacagtgttcacagggtttctgtgttgagcctgacccggtgcanctgtgcctngccanggnaaaagggggcaataaaagtcaccgtgaactccttagaagccaccatgggcctgggctgggaagagccagagtgaagggaaaaattttcccctggaagcattttacaggaacagctctaccgatatgtttaccaaacttgctgggtataatcaggattgttttttaaggatcttccatttaatgttcatttttatggattgtagacccagttttgaaaccaaaaaagaaacctagaatctaatgcagaagagatcttttaaaaaataaacttagagtgttgaatgtgaagccactttcctatataccacacctccctgtccacttttcagaaaaaccatgtcttttcatgctataatcattccaaattttgccagtgcttaagttacaaatgtggtgtcattccatgttcagcagagtattttaattatattttctcgggattattgctcttctgtctataaattttgaatgatactgtgccttaattggttttcatagtttaagtgtgtatcattatcaaagttgattaatttggcttcatagtataatgagagcagggctattgtagttcccagattcaatccaccgaagtgttcactgtcatctgttagggaatttttgtttgtcctgtctttgcctggactccatagcgagaggtgctctgtatttttttttaagataatttgtatttttgcacactgagatataataaaaggtgtttatcataaaaaagaaacagtattagattttggtctccataatctattttggtattgttacgaacatggatatgacaaccaaactggaaatcagaacactagggtaaagtggatattgaaatgaagcaagaatattgtcacacatgtgttgtgcatcttgtttagggtatatttcttaatgtcatctaggtcattagttttgttaatatttgtgttggcttgaccaagctcctactaagtataggacacaaatgttttttatcttccaaggcctgggctcaaatgccactgctggcaaagcttttctttgaccctctgggccacctcccaaggccaggaaggtttatctttccccctcccatggtactctaggcccttttcatggacactggatatttttcggtggacactggacttatagtttcaccgttttacctggttgggtctaacaggcaaatcattaaacagtagtttttcaacatacttctaaggctaaattcatttccagaagtagcaaagcttactagccaaaggctccacatttatcaactcttaagagctagacttgagagcctaacagcctgatatgattttgtgtaaattgaatctctatacctcagcttcttcatctgcaaagtgagataattgtactattctactttcctcatagtgcggttataacagattatgataatattaccaaagtacctaatacctggcatatagtatatatattagcctattagtattttgcaatttggggatattgaaaattagaaattgcatgttagttcatgctgcactaccatattgttcttttggggctcttcaatgggtgaaattccattttacagtttatcatgtgcatctgtatcacaggagtattttggcaaaatgattctgtaccaaaaaggagtactataaaatgagggtgccaaatatattgagtcttttatgggattaaaagttcaaaaaaaaaaaaaaaaaa

SEQ ID NO: 156011 - DNA, 439 bp, Homo sapiens
gagagggggtctcgctctattgccaggctggagtgcaggggggatctcagctcactgcaacttccgaccccctggttcaagtgattcttctccctcagcctgccgagtagctgggattacagggacacgccaccacccccagctattttttgtatttttagtagagatggggtttcaccatgttgcctaggatggtctcaaactcctgacttcatgatccacctgcctcagcctcccaaagtgttgggattacaggtgtgagccaccgcgctcggccaggactctgtttttgtatatctgcacaggtctgcccaactcttaaagggacactacctaatctcttccaccctgccccttccgcctaaggcctaaaaatgattttaagtacatggcaagtactttatgatatggagatctcagggagataaaagaaattcca

SEQ ID NO: 156012 - DNA, 399 bp, Homo sapiens
ttgggttttgtaaatcatttattatgactgaaagggaagaaaatgataggagacaaatattacaattaaacatgtaacattattctcttgtaaccaatcataataacatactttgaatttttgaatggctatataatttcccagaaaataaaattttcacatcatcagttacagaaaattgatttccttccatcaaaatattttatctctgctctatcaaaaataaatgccaagtctaaggtactacacagtttaagataagccttcactacttgtttaaattagaggagtgtggggaaacagtcaattgaaatctattttgatggggtttaaaaaatattctttttgtcattatcaataaagtaaaatattatttgagcaatgtatttcttagttctg

SEQ ID NO: 156013 - DNA, 1404 bp, Homo sapiens
atttttttgaggcagggtctcactctggttgcccaggctggagtgaaagtggtgccatcatagctcactgtagcctcgaccttccgggatcaagcaatcccacttcagcctcttgaatagctgggactagaagcatgcaccaccatgcccatctaatatttgtatttttagtagagacaggatctccctatgttgtccagcctagtctcaaactcctgggttcaagcaatcctcccacctcggcctcccaaagtgctgggattgcaggcatgagccaccgtgcccagcctcaaaaatattttttaaaagaaaagagaaaataattcttctgtcaaaggaggttaaattttagttgatagagtacttaaatgcattactttattaggttatgtaagtggtcagtgcattccagtatgtgtcacaacagtgtagttcatattcatgataaaaatgaaactgtgataagacatgaaaattatatttattaaaatgttcaattgtaatggtaatcatgagtatacttgatttttatttatggtatagaatgatttgtatttattttttggacatatatttatcactttgtcatttttttttaaccaatttgagaaatgttagctgctgaattaatttgttgcccgagccttcatattttcttctttgctgccttctccctgtggcaatgtactgttctcacattaagccttttaaaaatgttccatactgtattagcatccttagaagggacagaactaagaaatacattgctcaaataatattttactttattgataatgacaaaaagaatattttttaaaccccatcaaaatagatttcaattgactgtttcccctacatcttttgagccacagtcgcccatcgaataagcaaatttgtttttgagaataaactggtaaccagtttgtgatgactctcagaagccttttggctggcgttacagaagagtttctaagttcctagagagccatttaataattagttggtgaaccagaggcttgacagagctgttacttatgtgtgagggctttattctcaggcagtagtttattcatcatttgggtaagcccctccccacactcctctaatttaaacaagtagtgaaggcttatcttaaactgtgtaggtaccctagacttgggatttaattttggatagagcagagataaaatattttgatggaaggaaatcaattttctgtaactgatgatgtgaaaattttattttctgggaaattatatagccattcaaaaattcaaagtatgttattatgattggttccaagagaataatgtaacatgtttgattgtaatatttgtataaaaatcatttcattccctttcagtcataataaatgatttacaaaacccaaaaaaaaaaaaaaaa

SEQ ID NO: 156014 - DNA, 1500 bp, Homo sapiens
  misc_feature (1)...(1500): n = a,t,c or g
catggaannnnntactcagttcgaggcctcgtgccagcggaacggcggaccccgtaccctggcagcatcgtagcaccggcggatggtatggtgtatgctctggagggaatgggccctgacacggccccccaggcccaggtacgtgtgtatgagccccgtcgggactgctggctttcgctaccctccatgcccacaccctgctatggggcctccaccttcctgcacgggaacaagatctatgtcctggggggccgccagggcaagctcccggtgactgcttttgaagcctttgatctggaggcccgtacatggacccggcatccaagcctacccagccgtcgggcctttgctggctgcgccatgggctgaaggcagcgtctttagcctgggtggcctgcagcagcctggggccccacaacttctactctcgcccacactttgtcaacactgtggagatgtttgacctggagcatgggtcctggaccaaattgccccgcagcctgcgcatgagggataagaagggcagactttgtggttgggtcccttgggggccacattgtggccattgggggccttggaaaccagccatgtcctttgggctctgttggagagctttagccttgcacggcggcgctgggaggcattgcctgccatgcccactgcccgctgctcctgctctagtctgcaggctgggccccggctgtttgttattgggggtgtggcccagggccccagtcaagccgtggaggcactgtgtctgcgtgatggggtctgaaggcttggtgggagctgtccactggagcagctcattgccagaggcagctatttctatgggctccttttgctgctgaggacactcactgtggctctgtgggatgagagaggcatgggggtgagcacttgaaacacttgccttggggccttgggttaggggaagcctttgtctttagtgcaggacacacatatgcttacacctacctttatcaccattcgttcaatgaatcaatgcctagctccatccttggccctggggacctactaggccttcccatccaactggggaaatggggagaaagcaaagctgggcctcatgctcttcagggtcagttcctatctgtgagttgaccaggcctaccccagttgcccattccctgaaaaatcctcagctccccaggctgccctttagggtcccctgtagacccagggagagttgagagggtgggggacacagagagattaggagaggatgtggggaactgccagagggccggagcgcagggatttcaagtggaggaatgctggctttgagccctctacactgctggttgtatgaccttggacaagtcacttcacctctctgtgcctcagcatcctcatctataaatggggatctctgaaaccttcctaccctacctaccttacagggctgttgttaggacccaggggagtttggatgtggaagtaaaagtgctgctaaaacctaaaaaaaaaaaaaaaaaa

SEQ ID NO: 156015 - DNA, 939 bp, Homo sapiens; identical to SEQ ID NO: 126917

SEQ ID NO: 156016 - DNA, 1026 bp, Homo sapiens; identical to SEQ ID NO: 126918

SEQ ID NO: 156017 - DNA, 1540 bp, Homo sapiens
ttttaaatttacttatgtattttagagacaatgtctcattttgtcacccaggctggagtacagtgatgtgatcatagctcgctgcagcctcaaactcctgggctcacgtgatcttcctgcttcagcctccaagtagttgggactagagctgattgccaccatgtccagctaattttttttttttttccagtagagacagaatctcattatgtcatccaggctggtctccaactccctcccagccccaggtgatgctcctacctcagcctctcaaagcattaggattataccgtgtgagccatcatgcctctgttaaagtttttaatgtcctgattaatatgtgattcagactacgtaagaataaaatctatgatcatatccaatcgttatgaagcttttaaaaatagataataatgatttgttacatgcagcttccatctagatgcataacgttatttctggaaatgcgggccgcctacaatgtaaagcaggctaaacaaggcagcttgtgatttcattttaatcagaaacacaccaaataggcatcatggcagcagatctggctgttagtgttttaaatacagatggattgattaacatctttattattcataattgtctgtcaatgttctgtggatgatcaagaaactctttgtgcctcgccataatcactgaagtaatgaaagaagatcccctcagcaaggcctgcaactgtaaatgttgcaatcacacatatgtttagctaaattttcaataacaatgtagtcttaattggttgttttgggttgttcatcatctgtgttgtccaatgaagcttgactattcatagaagaactcattacaagctgtgtttgtttcctgtgcaatttccaaatcttctatttgaattgtgtgatccaacatctccataaaatggtcccctgatttccttcagctgactcatcgtcaaatttataatcacacaacattacaggtggatccaggaaggggaacaaagactcggataaagggaggacggtggaactctttttcaggaatcttttttttctggaatttcattcaaaagcagatcctcaaatagcatttcacaacgatcagcaactgtgttcaatatatccctctttactgcctgcacagcatctttaactttgggtttactgctgtggatataagctctgcatttcacagcacccttaaggtttacagaaccgctacatatctggactgtggctgtggatctgtggtctgaattcaggagcaactgcgttagcactctgacatcaaaagaatgactagttgcttgagtatttcctctagaagattttttctgtccttctaataggtcacaatcttcatctttaacgcgtcctttaatccaatgaactccatcttgtatattccttggcccagcgtgtaagtccattctttgtatttttatccagagtatacactgatagaagtagcagaaagtgggatgtgaatattaatgtgaactgtacgctctaaagaaagccgtacgcgtggtcggacgcgtgcgcgc

SEQ ID NO: 156018 - DNA, 477 bp, Homo sapiens
ggagatggagtcttactgtgccgcccaggctagagtacagtggcactatctcagttcaccgcaatctctgcctcctgggttcaagcgatcctcctgcctcaacctcccaagtagctgggactacaggtgtgcaccaccatgcccggctaagttttgtatttttagtagagacgggggtttcaccatgttggccaggctggtctcaaactcctgacctcaaatgatccacccgccctggcctcccaaagtgccaccgctcccggcctgtgtatggtatttttctatggcatgtaattttctgtacacaccctctttctttcttaggcttttttgtcagcagcccaagatggaaaaggcagctttatgtcaaggttcgccaaagacagtcaagagctgtgaaagccaaatgttcacatttaactttttttaaagtatttattactcggcatcaatgtatttcttaatcattatcctgag

SEQ ID NO: 156019 - DNA, 1101 bp, Homo sapiens; identical to SEQ ID NO: 150698

SEQ ID NO: 156020 - DNA, 792 bp, Homo sapiens; identical to SEQ ID NO: 126056

SEQ ID NO: 156021 - DNA, 1397 bp, Homo sapiens
taaatccaatagtagagataaccagtttattttggggagcaaagagaaagggtccctaaccccagaactgcctgcgaaagaggtgaaaatggaattgaatgggattatggtcagccaagtccttcctagtggaagctgctacctgaactgagttttaagaggggtaggaaagaaaaaatgtagtgggtcataatggcattccagatacaggggacacaaacaggtctggggttaatgaactacaaccagttgttgacttttgtttcaagtggctccccttccccagtgctgtgtggacgatggactgaagaggagaaggctgggagcaagggaccagtaagctgttgcagcagtgcaggtgagatatgaggcctcaactctgcagtgttgacaaccatagagagcagagagcagaattcatcaatatttatcagcaccaatttttttttttaagacagagtctcacttctgtcgcccaggctggagtgcaatggtgcagtctcagctcactgcaacctctgcctaccgggttcaagccattttcctgcctcagcctcctgagtagctgggactacaggcacatgccaccaagcctggctaattttttttgtatttttagtagagacaggggtttcaccatgttggccaggctggtcttgagctcctgacctcaagtgatccgcccgccttggcctcccaaaatgctgggattacaggcatgagccaccatgcctggccaacaccaacctttagttacttgctgaatacacaggattaaggaggaagagaaagtatcaaggatgactcccaggtttcctagcttggtggtcccagtaattgagagagagaatgccagccaggaagaagccagctctaggggggaacagggatgaggtatctccacatgatggggttgggagggtacctgtgaagtcacatccagggtgggatttttttcctgttgggcagttgggacgcgaagtcctgaaagcctcaggcaaaaaggctaaaagttaacacctttgggaagtccatcaagccctaatggaggacttttggcatcccaggtgcccaaaagcttaggggaaacggctctggaagagagaggggctttcttaattgacctgtatgctttgaagctctattagagacacaatccttatccctttcaggcctgtattttccttgggccactaagatgtggttacatattttctctcacatcttcctagaacgtttgcaaaacaattcccagtcctatgatcatttctcccttcttctgagaactaattatatatggcacttaatatctattcacatgtagcactcatggtgaggtgttttttttgtttgtttgtttttgttttttttttttttgagacagacctgtgccgaat

SEQ ID NO: 156022 - DNA, 1711 bp, Homo sapiens
  misc_feature (1)...(1711): n = a,t,c or g
tttttttttttttttttttaatgttgcataacaatgtttatttagttttacatttgtttacaatttcttataaacacttcattataattgttttatacaaacaacagtttaaatttacttatgtttatcatttatttgcttactagtttttcaatttcagataatccttttagaatcatttcccttcttgaagatcatccttttgtagtctctttactgaagttgtgctgaggataacatctgtttttcatctgagcatctgttagattcagtttcgcttgttgcaaattctaagcttaatagtttttctcagaattctaccctcttttggggnacattgtttgctgttaggaaagcccactaagtatttgactgtcttgctttcactgatctttttctccccatggttgcttttaaaatcttggtatttgggtatcttgtcatttacaataccttgagtctaggcctggattttatttaaatatatgtttggtatatattgtgcttcctgaatttatgaattcatgtttttccaacaaatttgtaaaattgtgttatctttcaagtactgcctctcctttattctctaaattttctctttctaggactcctagtctttataattcttccctcgaactctcttaactttccaatgttttctagctccttgtttctcctcactgctcactgggtaatttctttagatccacgcttatagtttagttcacttgtctcttcagctgagtctaataaaatattcaacatgtctgagggcttttttcttatttcaataaatatttctcatttttaggagctctatttggttctttttcagatctgcctgtggttccaacttcattccttatgttggtgatgaaaccttgaagaactgagttcaatgtttattttttctatagctttcttgtcatgttagtttgtttcaacttgtgcctgtgatctctagtcataaaatactactacttgataataatctgtaggaatcttggaactaaattaggaatgtttccctcttgcttctgccaggagctagagcactgcaaactgaggaccactgaaccttctttaactgtcctctctagggcagcatctcagattccgatgtcttcttgtttctgatttgaggcaaactgcatatgacaatgttgctattggtatctgccatccagacaaccataatccacttgtatggtcaatacagtattcatgactcctaacttaaaaaaggccgttccattttttgtggccagaggaaaatgtccgaagtatgggttcttggaaaattcctccctacttcccagtgaacctattaaaagccagattttattccaggatcctagttgttttataatatctagtctaacatacttgctggaagcaaaagtcttaattttatatattaaatatattataacagttatacagtaacctgagaaagcacgtattttatgtcatttcttactaatgggacttctctggaaaggttccctaccccttgatcagaacaaaacacacagtatacaggaactgagtgcacattagaaagctcctagaggatgaacttatcctaaagttgttgtctcatttggtagaaatttttctggtgctctattatwtaagatgttacatcaacattcactgttcaaattattattcttttttttttaaatttacttatgtattttagagacaa

SEQ ID NO: 156023 - DNA, 2219 bp, Homo sapiens
  misc_feature (1)...(2219): n = a,t,c or g
tttttttttgcccccgagacagagtcttactctgttgcccaggctggagtgcagtggcacgatcctggttcactgcaccctctgcctcccaggttcaagcgattctcctgcctcagcctcccaagtagctggtactacaggtgcgtgccaccacacctggcttattttagttattttagtagagatagggtttcaccatgttggccaggctggtctcggaactcctgactgcaggtgatccgtcctccttgggctcccaaagtgctggggattatagggtntgagcccccacgcctggggccaacttgattatattaattttgggttttttgttttgttttgttttgttttttaatttttcaaagaatttgtggatcttggtataaagtcattggaacatatctgttttaacagcaagagatcctaggcagatacttcaaaaggttaaaaattcttaatcctacagaaattttaaatgaatcttatcaatgttttgtaaacaaacaatatgaatggccaaaaaaattgccctccattttactggcaggtaatttatattgtcttacttaaaaatccccccctaatttttccaattgtactttatcgtgttgttttcaatgagataagtattttcctaggggaaagcattttccagcataatatttgcttgggtagcatcccgggttttagtattttaaccaaggggccttttaaatattgaaaacccatagttcagaaaatgttagtattgctgcccttctttcacataaatttttttttaaattatactattattttgcttaattttatattgggttaaaacaaccttcaagaaggttaactaggaaagaagacctttttgttttatttttactatttatatatagaagacaaatcaggcattggtggatagttttacatggaccagttatccaacgggtcatagtatggaagtgtggcagttggttccttattagtaaattatgtttgatttttaaacctatttaagtactaaatagttgagatgaaaactgaaggaaaaatgccaatgtggacgtttgtgtatagctagccttaaaaaaacttcccatggtttttagggtgacttttttcccccctccttaagtactctgggggaaacaatgaagaatggggccatctccaattccagatgtaaacaaaaagtaatttttatttcaacatttaatgtaactgctattattgtggattcttgtcttgtgtattttctttcccttattcaagtaatatatgaataactttccttaaaatgatttgatccaagatacgtcatttctgtattggcaaaaatgcccctattaaaagtgtaattcttgaatttaggttgaattgatgactttttaaaacaaaacaaaccctggacagttttacattgtattgccgtttgcgaattgccgtgaacaccacgcacacgtgcaggagaatgtagtggccataagaacactggcgctttttaaaactttcccaagctagctacttattttcattttcagggttgagtactctaagctctctacttactgtgagaagttttctacattgtaaaattaaaagattatatttaaaatacttctttagggatgttattcagccatcaaaaaaaaacccaactaaaatgtcttacccgtaaaagtatttatttaaaagcctcatttgtgggagatttcggtggactttccttgggttaagctggtcttggtatttacttaatttgtccccctcaacccaggtgttttcttttcagcctgttactgtccctgtgcccatttttaaaaatagcccatccatgagtaagggccttcctttaaaataatcccctgacaatatcctttggcattaatacgacaataaagacaagacagtatatgtatgttttccattccctgttttgtacggagtgccctcattttgtagtcatgaaagtaacatagtaccttaaataaaaatgtaatgactaatcctaaggtcctaggaataactattgtagaagctaagtagaacgacttagtttggggtgtcaattttctatcaacgcaaacaccttagggtacccagaccaattttatgtatatatattctgaaaatgctccctttttaatgtggtccatttgttgccttctaagttgagaggacaaaactgaataaaatggaatgttaattgtaaaaaaaaaaaaaaaaaa

SEQ ID NO: 156024 - DNA, 483 bp, Homo sapiens
tttttttttgagatggtgttttgctcttgttgctcaggctggagtgcaatggcaagatcttggctcactgcaacctctgccacctgggttcaagcgattctcctgcctcagcctcccgagtagctgagattacaggtgcccgccaacacgtctggctaattttttgtatttttagtagaaatggggtttcaccatgttagccaggctggtctcgaactcctgacctcaggtgatctgaccaccttggcctcccaaagcgctgggactacaggcgtgagcagccgcgcctggccagatttgtatctattttcatacttaatagagaaaacatcaccttttaaattcagtattccatttcatttagaaatataaatgtgcatccttttaaccaatgcagttagacgtgccaagttcatcaaacatatcagtttaagtggaaaattacaaaacgggtacttaaatatcttatagctttgtaaaaga

SEQ ID NO: 156025 - DNA, 1490 bp, Homo sapiens
acgagggggatagcaagcaggttcagttcagaaactaaaggcaaaatcttcatactcataccctgtttgagtccaagaggaagcaggaatgagagtaagggtggggcacataatccttattcaagttacctgatatttgaaaagaaggacacatgaacactagagttaatcttttagtgctactgaaatggctacacagttaatctggaagtttaagagctaacaaagctgcaaagacaagctgctctttgttgtaaagtggactgaagatgtttcaaataaaactacatccaaaaactggtagtaagaaaagggatctcttagcaaataggaatctaggtgtagaatttatacacatatatattttttaaagtataaaaatgagaaagtatgtacaaaaaatcatcctaaatcttagaaaggagacataaaaaaaaggctgtggaaagcctggggagttatgtgggtgtatgcctagcagttggaagaatgcatattgcccaactgcccagcagacagcacaagaatatctttcttctccttgtggaagcgcagctccttgcctgccagtcgggcttcatccagctcccgctcagtagaggccagctctctagacagtgcccccggcacactctgctgccggctcacccagtccaaggccatttggtggcgaatatcatcatccagggcccggtgcgaataatgagccaacacctcctgccgagagcattgtcgttccctcatggccttaaggctgccattccagtgtagcagttgaaaaactgtcattagctcctggaactccaacattgatttgcccttgttggattccagcatgaatcggaaggcaccaatccctgtatttgggttgtcagcttcctccctgttgccattaaaagatgccagggcctcagagacactcttctcgatgaactcatcagtgattcttcgggaaggatgttcattaaacacagaattcattagcgcaatctttgcagcactcctccgggcctcagcttttgtggggcaaaactggaaactcccaaagcagcttcccccaggcagggtgacatagcagacataaggagggctgttggagggaaccatctcataaaccactagagccccattctttaagtcagcaccacgggactgcttcatctgccagaattcctgaagtgcctccaccacattcactcggccatagccctgcgtgtgcttggcgaagctcctcaccacggcctccacggcctctcgcagcactgccgggctgccggcggcgccggggggcaggaagtagtcataaggccccagacaggagcaccgcgcggccggggcggtgcgggaggcggcggggcaggcggggggcccgcagggggtgtggcggtggcagccgcggccccagtcactccgggccgcagcgctcggagagtgcccctcccgctggtgcccacaccaggctgcagccgctgcgctcgcatagtctccat

SEQ ID NO: 156026 - DNA, 2809 bp, Homo sapiens
  misc_feature (1)...(2809): n = a,t,c or g
atggctaggatgagctttgttatagcagcttgccaattggtgctgggcctactaatgacttcattaaccgagtcttccatacagaatagtgagtgtccacaactttgcgtatgtgaaattcgtccctggtttaccccacagtcaacttacagagaagccaccactgttgattgcaatgacctccgcttaacaaggattcccagtaacctctctagtgacacacaagtgcttctcttacagagcaataacatcgcaaagactgtggatgagctgcagcagcttttcaacttgactgaactagatttctcccaaaacaactttactaacattaaggaggtcgggctggcaaacctaacccagctcacaacgctgcatttggaggaaaatcagattaccgagatgactgattactgtctacaagacctcagcaaccttcaagaactctacatcaaccacaaccaaattagcactatttctgctcatgcttttgcaggctttaaaaaatctattaaggctccacctgaactccaacaaattgaaagttattgatagtcgctggtttgattctacacccaacctggaaattctcatgatcggagaaaaccctgtgattggaattctggatatgaacttcaaacccctcgcaaatttgagaagcttagttttggcaggaatgtatctcactgatattcctggaaatgctttggtgggtctggatagccttgagagcctgtctttttatgataacaaactggttaaagtccctcaacttgccctgcaaaaagttccaaatttgaaattcttagacctcaacaaaaaccccattcacaaaatccaagaaggggacttcaaaaatatgcttcggttaaaagaactgggaatcaacaatatgggcgagctcgtttctgtcgaccgctatgccctggataacttgcctgaactcacaaagctggaagccaccaataaccctaaactctcttacatccaccgcttggctttccgaagtgtccctgctctggaaagcttgatgctgaacaacaatgccttgaatgccatttaccaaaagacagtcgaatccctccccaatctgcgtgagatcagtatccatagcaatcccctcaggtgtgactgtgtgatccactggattaactccaacaaaaccaacatccgcttcatggagcccctgtccatgttctgtgccatgccgcccgaatataaagggcaccaggtgaaggaagttttaatccaggattcgagtgaacagtgcctcccaatgatatctcacgacagcttcccaaatcgtttaaacgtggatatcggcacgacggttttcctagactgtcgagccatggctgagccagaacctgaaatttactgggtcactcccattggaaataagataactgtggaaaccctttcagataaatacaagctaagtagcgaaggtaccttggaaatatctaacatacaaattgaagactcaggaagatacacatgtgttgcccagaatgtccaaggggcagacactcgggtggcaacaattaaggttaatgggacccttctggatggtacccaggtgctaaaaatatacgtcaagcagacagaatcccattccatcttagtgtcctggaaagttaattccaatgtcatgacgtcaaacttaaaatggtcgtctgccaccatgaagattgataaccctcacataacatatactgccagggtcccagtcgatgtccatgaatacaacctaacgcatctgcagccttccacagattatgaagtgtgtctcacagtgtccaatattcatcagcagactcaaaagtcatgcgtaaatgtcacaaccaaaaatgccgccttcgcagtggacatctctgatcaagaaaccagtacagcccttgctgcagtaatggggtctatgtttgccgtcattagcccggcgtcccattgctgtgtcctttcccaaaagattttaggagaaaaaactaccaccacttcattaaaaaagtattatggcaaaaaacctctttcaatcccactaaatgagctgttacccaccactcatttaacctctggggaaggtggacagcgagaaagacaaagatggttctgcagacaccaagccaacccaggtcgacacatccagaagctattacatgtggtaactcagaggatattttgcttctggtagtaaggagcacaaagacgtttttgctttattctgcaaaaagtgaaacaaagttaaagacttttgtatttttgactttgctagtttgtggcagagtggagaggacgggtggatatttcaaatttttttagtatagcgtatcgcaagggtttgacacggctgccagcgactctaggcttccagtctgtgtttggtttttattcttatcattattatgattgttattatattattattttattttaagttgttgtgctaaactcaataatgctgttctaactacagtgctcaataaaatgattaatgacaggatggggttcccctggtgccttttaaccagtagcatgacccccttctgaagccatccgtagaaagtactttgtcctcccaaaagctaaacatacgggttttgaagcagcattgaaacttttgtagcaatctggtctatagacttttaactcaagaagctaaggctagacttgttaccttcgttgaatgatgttagttgactgtactgtaatgttgtatcaactgaattgaatgtttgcctttaaacaatgaattttctttttctttccnnnnnnnnnnnngggggaaaaagtaaaagaggcttaaaccaaccta

SEQ ID NO: 156027 - DNA, 1052 bp, Homo sapiens
gaggaaattgactcgatatccatatccatgtggtggaattcgcttttaatcactgctcaaaccttactacgtaagaatttttactaaagagaaatcctacaaatgtaaagaatgtggcaaattccataaatcttgctcaaggcattgaaatcacaagataattcatactggagagaaacactacaaatgtgaagaatgtggggaaagtcttcaaccattgctgacagcttattgcacagaagaaaattcatgctgagaaaaattctgattttaaagaatgtggcaaagcatttaataactactatgaacttactcatcagaggttttgtgctagataaaagcaatgtaagtgtaatgatacacattacatttatctgtggaaagatgtcaccaaataaaagccttagagtacacaaggtgtaatgatagtgatacattacatttgtacatggaaagacttcaaaaatataagccttagagtacacaagagtttttatactgaagaaaaacattacaaatataaagattgttgcaatacttttacttatgttacagattttgttgtacataggagaatttatactgaaaggtaaccctctaacagttgctcaaattttattccattttagataatttacattggaaagaaaccctacaactgtaatgaatatgaaaaaaattgtttaaaaagtacaccttagaaaacactagtttaaggccgggcgcggtggctcacacttataatcccagccccttgggagggccaaggcaggcggatcacgaggtcaggagatcgagaccacgatgaaaccctgtctctactaaaaatacaaaaaattagctgggcatgttgtcgggtgcctgtagtcccagctactgggagaggctgaggcaggagaatggcgtgaacccgagaggcggagcttgcagtgagccgagatcgcgccactgaactccaacctgggcgacagagactctgtctcaaaaaaaaaagaaagaacgctagtttatatgaaagcatttaacagatgcagtaaatataaaaaattaat

SEQ ID NO: 156028 - DNA, 2046 bp, Homo sapiens
atggtctcgatctcccgacctcatgatccgcctgcctcggcctcccaaagtgctgggattacaggcgtgagccatcgtctgcgcttctatttcgatcaccaagatgtggctccggaatgcggggcttacttcttccatgaattggccaaggagaagcgcaagggtgttgagcgtctcctgaagatgcaaaaccagcgtggtggccctgctgtcttccaggacatcctgaagccaggtcaagatgagtggggtaaaaccctggaagccatggaagccgccatggccccggggaaaaatctcaaccagagtcttttggatcttcatgcactgggttccgcccctacagacccccatctctgtgacttcctggagagtcacttccgagatgaggaagttacctttatgcctcggaagagtgcagacctccatgcagcgggtgaggctgccagcctaggtggggtgtcattgaatgtcatgaagggagccagccttcatgcactctgcctgcgtctcctgaacagctttggaccaggagttgctaccttgtgcggagaacgtgtggtgcataagaacaaccgagcctctgctcttcgaaaatgtatattctggccagtctccttgaattcctccagggcgaggccacgccagcgcacaactgcagggggcgccgttcccacagcagccctgcaaagggtcatccctgcttcaagccagtgcctcttcccagctcccatggggaccaccgaagccacgctccggatggaaaacgtggacgtgaaggaggaatggcaggacgaagatcttcccaggccactcccagaagagacgggggtggaactgcttggcagcccggtggaagacacatcctctcctcccaacacgctaaatttcaacggagcgcatcgtaagaggaagacgctggtggccccagagatcaacatttctctggatcagagtgaggggtccctgctgtccgatgacttcttggatacccctgatgacctggatattaacgtggatgacatcgagacccccgatgagaccgactcgctggagttcctggggaatggcaacgaactggagtgggaagacgacacccccgtggccaccgccaagaacatgcccggggacagcgcggatctatttggggacggcacgacggaggacggcagcgccgccaacgggcgcctgtggcggacagtgatcatcggggagcaagagcaccgtatagacctgcacatgatccggccttacatgaaagtggtcacccacggagggtactacggcgaaggcctcaacgccatcatcgtcttcgcagcctgcttccttccagacagcagcctccccgactaccactacatcatggagaacctcttccttccgccaggacagcagacaacacctggaccagtggggctgacccagccagcggcaggagtggaggcaggcagggtcggcaccgcaggtgtcctgaccctggacccctccatgttgggtccctgccttctgtgccccgtgagcaggtacgtcatcagcagcttagagctcctggtggctgaggactacatgatcgtgtacctgaacggtgccacgccccggcggaggatgcctggaatcggctggctgaagaagtgctaccagatgatcgaccggaggttgcggaaaaacctgaagtccttgatcatcgtccacccctcgtggttcattcggactgtgctggccatctctcgccctttcatcagcgtcaagttcatcaacaagatccagtacgtgcacagcttggaagacctggagcaactcatccctatggaacacgtccagatcccagactgcgtcctgcatgaccggcagatcatccttaccacactctgtgcttatggggaaggagaagccttggcaagccacctcttccacgtcatcctcccattccatatccactcctgcttcccctccagcacggagacctcagaccctccctgtggccctggactcgacctggcatacaccacaccgttcagcacacattttgcacagaggggcaaatag

SEQ ID NO: 156029 - DNA, 880 bp, Homo sapiens
ccaccacccctggctaattttgtatttttagtggagatggggtttcaccatgttggccaggctggtctcgaattcctgacctcaggtgatccgcctgcctcagcctcccaagtagctgggattacaggcgcccgccaccacgctcagctaattttttttgtatttttagtaaagacggggtttcaccatgttggccaggctggtctcgaactcctgacctcgggtgatccgcccgcctcggcctccctaagtgctgggattacaggcgtgagccactgcacccggccgatgtatgcatttttaaaacaattaaattttcatattatagataagtctgactataggttatataggaaactatacctaaaagcaaccactatggtttttagatatgccttcctttaagttaaaaagtttaaggctcctattttggagggataccctaaagacattttctcacagtatgacctcaatgcatctacatatatgctactggaaaactggaaataaaacacaactcttgttaaatatatcattcttcaactttaaagagaaacagaaaaccattttaactacatcccttcttatttctcaatactggtttgttaagaacttctgccactcaaaaaggtaggtgcaaatccataaatttagcttaaaacagaagattaaataggtggggagcatggtaagacaatgacatataaaacaaaacccttactatcttgatttataccttccctatcccatgaaacttcctacgttgcaaacactgatttcctacaaaccatgaagatttcctatgatatttgcctatccttttattaaactaggggccaaaactgacatcattgctgcaattaacttttacttgttctgg

SEQ ID NO: 156030 - DNA, 1433 bp, Homo sapiens
tgaaacggagtctcattctgtcacccaggctggagtgcagtggtgtgatctcggctcactgcaacctccacctcccaggctcaagcgattctcctgcctcagcctcccgagtggctgggactacagacatgtaccaccacacctagctaatgtttgtattttttagtagatatggtgttttactatgtttgccaggctggtctttaactcccgacggaccccaagtgatctgatcacctcggcctcctaaagtgctgggattacaggtgtgagtcaccgcgcccagcctatgtattttttatttttatttttttgttgcagagatggtgaggatgtcttgctttgttacccaggttggtcttgaatttgtggctttaagtgatcctcccaccttggcctcccaaagtgctcgggttacaggcgtaagccaacagtgcctggcctgtattttattgtaattcctttttccattctcatctcaatgcatttccaaattagagaaggacatccttcttgtctcacactttaaaaaatagcagttttcatggcaagccaacattttaacatcttttctatggccagcaatgatagtcatcttgtggaaacgtgtctgaggcattctcctgtctataaagtcaaagatctcattaagtgctttggcatgttttgaggaaaccgaaaggtgacccaaaactttcattatgaaagctggtatcacaggtaagcaaattacacccctttgtgacagtgtcgggtacgaggtgtgaacatttagcaggtaagatgttttcattttcattggtaagaagcttatggactaaatgaaatttgctcaaattaactgtgtactgtctgccaaatatgtagataaatgagcaaagtctaggttgtatttgcacaagagaacaacaatctcttacgtcttcagtggcttcactaaaatcttcacagaaatcgagaagacgatctgaaactccagttttcaaatcaacatacctaagagctagcggaaacctgtagccatgacttcaggcagcccttgacgcactcggaagcacgaatgctggaaggatcagacagggtcagcactactgtaaaggggcaatgcatctgttactgaaagtccctcgtcctttggttcacacacaggacttttagtttgtaacctccgaatcaggaaatgtaaccttcttggtttgcggtgcaatcaagggaacaagatgataatggcgtccattcaaggagtgcgcccaagctaattctgcgaccactgtttttgactgagaactgctgtctctttggaggtcaaaaaaaccttgatttagaaagatatgcctcagacttgagagactcaatgtccaatgtgcctccacctccccttctccatatgcccattctcacgaattccaccacactgactagggactcagtaa

SEQ ID NO: 156031 - DNA, 690 bp, Homo sapiens
gactgtcctgtttcccacaggccactttttttttttttatcttttgagacagggtcttgctcttgcccaggcaggagtacagtagtgcaatcacagctgactgcagccttgacctccagggctcaaggatcctcctgcctcagtctcccaactaagtgggactacaggcacgtgccaccatactcagctttttttttgtttgttttagacaagagtctcgctttgttgcccaggctggtcttgaattcctgggctcaagcaattcttccacctcagcctcccaaagtgctgagattactggcttgagccactgcacccacccctccagactactttaaatgtctctactctgactgaattgaaggaattgtaagtttcagttgctgaatatatcagtatatctgaactccggatctttttatttcctatttttggcttcctacataaattaataaagtctgtctatatttaaggtttctgggagtagttttgtctatatttaatccatagatgtgctcctagtcatcagtcttatttcagtaaaaccatctttctggccaaatctctaacacgttttttacttcagtagtgagggcaatgagaagctttattaagaaagatcctatttaaagggctaatttggtattgaaagcatgctgatataaagtccagtatttgaggatataaaga

SEQ ID NO: 156032 - DNA, 855 bp, Homo sapiens
ctgatttttatattttattatgtgtttccttttactgaagatctttgtatcttcataaggctttgaataagagagtttggtaaggtttatgggtacagatcaatataataataacggttaacaattttttttttttgagatagggtctctctctgtagcccaggttggagcgcagtggcgatactacaagcccactgcagccttggtctcccgggttcaagtgattctcccacctcagcctccccgagtcatgggaacacaggcccatgccacaaggcctggataatttttgtattctttgtagagacggggttccgccatgttgcccaggctagtatcaaactcctgggctcaagtgatctgcctgcattggcctcccaaagtgctgggatgacaagcatgagccaccatgcctggccaatagttaaaaattttgtttgcatttattatgtaccagacattgtgctaagtatgttaagtgtaaaatctattaatattcacatcaatcatgtgagaggactacagtaacgaccctgttttacagagttggaaactgagacccagaatttactaatctgttcaagtaagtggtggaactaggatttgaattccatcaatctggatccagagacaatgctctcaatcactatgttgcactgtttctcaaagttaatacctgctccctgcatcagctactttaaaatgtcattaaaagacatagatcccattcacgatgtcaaaaataagtaaatcaattcaaccttattggaggtcattttagatggtctaaataaatggggggatacagtcactcacgtttgggaagtatcaagctaagtatctaaaacgagttcc

SEQ ID NO: 156033 - DNA, 361 bp, Homo sapiens
  misc_feature (1)...(361): n = a,t,c or g
ctcacaggcaggttatcaagtgtgaagtggtcagctggagatttgatgtgcagctcaaagatctaaaaagatggcagaatcatctgctcctgtcccagcagctggcctgcattgtgctgacctcagctggcatcatggaccacaaagagatgagatgaaaacacacaggaggaaaaagcctgggattctttttctaggggtgtaatacacccatgnnnnnnnnnnnnnnnnnnnnnnnnnnnnnnnnnnnnnnnngcctcaatgggggaaaaaaaacgcaccagagacaaatacttatttaggatctgtaatgtacccattgccatacctaggcatcctagatacagcaacatatccctgc

SEQ ID NO: 156034 - DNA, 1050 bp, Homo sapiens; identical to SEQ ID NO: 145880

SEQ ID NO: 156035 - DNA, 963 bp, Homo sapiens; identical to SEQ ID NO: 145881

SEQ ID NO: 156036 - DNA, 470 bp, Homo sapiens
gagacggagtttccctcttgttgccaggctggagtgcaatgacacgatctcggctcacggcaacctccacttcccaggttcaagcgattctcctgcctcagcctcccgagtagctgggattacaggcatgcaccactagtctcgcgacgttttaattagaattttagaattagaggagggcttagaactctgccctcatttttcagtgaggaacctgcccaagacaggacaaatacttaccctaatgcttagcctggctccagtgaaattagctccccagccaaagctgagctggatggaactaacaaggcacagcaggctgtgggcagccctttcgggaggtgggcaggtataggaagcagaaaggttttggtgcctatcgctgctgatggtcggcgtcaggccaggccaggcgtcttcttgtaggctctgggaaaggggaaaggaagtcctccgggtgttaaatagat

SEQ ID NO: 156037 - DNA, 406 bp, Homo sapiens; identical to SEQ ID NO: 110670

SEQ ID NO: 156038 - DNA, 1231 bp, Homo sapiens
agggcccagggttgtatattcttaacagatacttagtgattgttttcaggaaagtttgaaagtcactgctctgagttcccgtgttctttgcaatgctgttttctttccttagaacactttgcaggccccagccctcagcaggattcaaccttcatgtttcagcttccacagcctacctcccatcccctttccctgggccgtgtcgcagcactggttcactcactgatctacaattgcccagtgacctctctgtaccctccttggaaggcaagctccctggggtagggcacccctttgacacccctggctggtctcaggccctgcctctttccccactaggtgggttcagtagaagaattccaaggccaagaacgaagcgtcatcctcatctccaccgtgcgaagcagccagagctttgtgcagctggatctggactttaatctgggtttccttaagaaccccaagaggttcaatgtagctgtgacccgggccaaggccctgctcatcatcgtgggggaacccccttcttctggggccatgaccctgactggaaagtgtgagcccccccaccccattctccctcttagtggccacagcccctgcctagggcaggtggatcttttttaagcgcttgcttatcgctcagttaatcctcagatgtgtccattttcacagcatcactattgtatttataagttaaatgacatccagaggttgagcaagtacagctcagatgggacaggaccgtggcttagcctccagtctctgctgggcactcctctgtaccccacagattcctgggagttctgtaaagaaaacggagggtataccgggtgtcccttccctgccaaactggacctgcaacagggacagaatttactgcaaggttctggagcaagctcagcccctctacctcaggggccccacagccatggacttacctcccccagggagcgggagggtgaaagggggcctgtgttctgcaagtgggagccagagtggaggaatgagctctgaagacacagcacccagccttctcgcaccagccaagccttaactgcctgcctgaccctgaaccagaacccagctgaactgcccctccaagggacaggaaggctgggggagggagtttacaacccaagccattccaccccctcccctgctggggagaatgacacatcaagctgctaacaattgggggaaggggaaggaagaaaactctgaaaacaaa

SEQ ID NO: 156039 - DNA, 1111 bp, Homo sapiens
tttttttttttttttttttgcatagaacaaggatttttgttttcagagttttcttcctttccccttccccccaattgttagccagcttgatgtgtcattctccccagcaggggacgggggtggaatggcttgggttgtaaacttccttcccccagccttcctgtccccttggaggggcaagttcaagctgggttcttggttcaggggtcaggcaggcagttcaaggcttggctgggtgcgaaaaaggctgggtgcctgtgtcttcagaagctcattcctccactctgggctccaacttgcagagacaaggcccccttcaaccctccccgctccctggggggagggtagtcatgggctgtgggggccctgaaggtagaaggggctgaagcttgctcaaaacctttgcagtaaaattctggtccctgtttgcagggtccaatttgggcaggggaaagggacaccccggtaatacccctccgtttttcttttacaaaactccagggatatttttccagtcagggtcatggccccaagagaagggggttccccacgatgatgagcaaggccttggcccgggtcacagctacattgaaccctcttggggttcttaaggaaacccagattaaaagtccagatccagctgcaacaaagctcttggccttttcgcaacggtggagatgaggatgacgcttcgttcttgggccttggaattcttcttactgaacccaccttcaaagtccttgatgtcttccaagtcctcggaagctccctgtcaagtttggtgatgcagtaacggattttcgtccacctgtttccggtacggggagatgacgcccacacttcgagggatcaggcgagctttgcccttcttggaggagggggccaggagcagcttcaggtaggaagtcactgtggcagcctcttcagggttgaagaaggatgggctgttgccttcacgctcatctttgcccattacgccgtgaaagatgatgggaaagccctgtcgagaaagaaacgtccagcgacagaagcgttctcgatccacgacatcagcacaggcctgcagctccccttcgataatagagctggttaggaatgtccaggatggtgg

SEQ ID NO: 156040 - DNA, 392 bp, Homo sapiens
tgagccaccgtgcccagcctgagactactttttgatggagcccactcaaggggatgaggaggtttgaaccacaagtggctggctaaataaaagcttagtcagagctgggcacggtggctcacacctgtaatctcatcctccctagtagtggggattacaggcgcccgtcaccacatctagctaatttttgtatttttagtagagatggggtttcaccatgttggccagtctggtgtcgaactcctgagctcaggtgattcacttgccttggcctcccaaagtcctgggattacaggcgtgagccaccgtgcccaggtgcccccaccttttttttttttttgaggcagagtctcactccagcctggacaacaagagcaaaactccatttcaaa

SEQ ID NO: 156041 - DNA, 2175 bp, Homo sapiens
atgagacagtcacaccagctgcccctagtggggctcttactgttttcttttattccaagccaactatgcgagatttgtgaggtaagtgaagaaaactacatccgcctaaaacctctgttgaatacaatgatccagtcaaactataacaggggaaccagcgctgtcaatgttgtgttgtccctcaaacttgttggaatccagatccaaaccctgatgcaaaagatgatccaacaaatcaaatacaatgtgaaaagcagattgtcagatgtaagctcgggagagcttgccttgattatactggctttgggagtatgtcgtaacgctgaggaaaacttaatatatgattaccacctgatcgacaagctagaaaataaattccaagcagaaattgaaaatatggaagcacacaatggcactcccctgactaactactaccagctcagcctggacgttttggccttgtgtctgttcaatgggaactactcaaccgccgaagttgtcaaccacttcactcctgaaaataaaaactattattttggtagccagttctcagtagatactggtgcaatggctgtcctggctctgacctgtgtgaagaagagtctaataaatgggcagatcaaagcagatgaaggcagtttaaagaacatcagtatttatacaaagtcactggtagaaaagattctgtctgagaaaaaagaaaatggtctcattggaaacacatttagcacaggagaagccatgcagccatctggagtgttgcctcttaacggctgctccaccaccaccctagctgtagcatgtagcactggccacaggaaatgtgcttccagagcactagaaaacagatgccggagccctgccgccaaggtcacaaaaaacaagagactaagcaattgtcagacaggccagaggaagctaaggagatgtgacaaccgaatgcaatgtggtgtcctggatcgcatcctagaacagaaagaggacattagtggaacaactagtgaaatccaaataaagtggggggttgaacttcactcagtttccagatggagactggggaaagttgccatggaaatggtccaatgccaaaaagcaggctaccctgagagaggagatggggtgggggcagttgcagaggggcctaacataaaggtggctggagggttgagagaattagagacaagaaaaacagctcttccagagaatgaatcctcccaggaacatgcgtttatcaccattacactccagcatctagtacaaggactggcacacagtgggtactcagtactcagcaaatgtttgctgaatgaaaacagggccatgcaaaagcatggaactgtctggactcagcagattcaaagttcagctgctgagaagtcagagaaaaccatgtcctgggataggctgggtagaggcactgcacattcttggcaagcctgtcctgtgtcactgaaaaagcaggctgtcgagggagcccaccaggaagagcagtgcaagagaagagatgagatgagaccaggtgagtcagatcttgtgaccatggcctcaggaagggatgcccttctgtgtggacgctgttgccagcaggccaagacagaggaactaacaataacagtgcctcgacttggggagcaaagggaagcccctctcccatgcagcacccctcctggcagcaccccgcctgcggcgaaactcacggccttcagctgctccagacggtccttcatcctgaagcccaggcgcccggaggcaggtagcgcgtcccaggcggggacaagctcccgaaaacaaataagacaatgtgatgtgggctacattgggtggcagtcgagtgttctaaaaatatcccgccaggaggaaggcattccgagtagcgggatcccgcgcagcctcagggctgctggcagtgaaagtggggggatggaggaggtgtccagaggaaagacctggagatctggagatacaggacggtcagggtggtcagagaatttggatcttttgcttgttggaaatcgggaccgctccgagaaacgtaagcagctcgatgttgttagtgccagtggagacacttggcactcacaatttgcagacgtttgggaaagcatcgtttctcaagaggaccccgttcccgtgtctgtaaatcagagatggtacccacttcgtagttcgctgtga

SEQ ID NO: 156042 - DNA, 804 bp, Homo sapiens
gcggccgctagctaggaggagcgtccgaggccacgggagcctccgccgcgcagccccctccgcccccaccggcgcctcgcgctccaaatccggctcccgggccggcgccggcgcagcgctgatccgccctggacccgcccctacctggccgcgcccctcgctccttcttaaagggcccgcgtcccgccaccgcccggccgcccgggggcgtctccaaagcccccttccctaacccgagagccctccagacacgcgtggagtccggggagaggcccctgcaccggcggatcctgccgcagggccgaggaagagcaagagcgactgtctggctgcggtcattcgctgtctgtgccgggctcctcgctaggatccagttcttagccgactccttgctaggcggggacaagctcccgaaaacaaataagacaatgtgatgtgggctacattgggtggcagtcgagtgttctaaaaatatcccgccaggaggaaggcattccgagtagcgggatcccgcgcagcctcagggctgctggcagtgaaagtggggggatgggggaggtgtccagaggaaagacctggagatctggagatacaggacggtcagggtggtcagagaatttggatcttttgcttgttggaaatcgggaccgctccgagaaacgtaagcagctcgatgttgttagtgccagtggagacacttggcactcacaattttcagacgtttgggaaagcatcgtttctcaagaggaccccgttcccgtgtctgtaaatcagagatggtacccactttgtagttcgctgtga

SEQ ID NO: 156043 - DNA, 325 bp, Homo sapiens
tgtcctgcctagcgtccagcgtcttctaggagggtggggtctgcctgtcctggtgtggttggtttggccctgtttgctgtgaccacccttaaaaccagcaccctgtccctcgaggctgccgagtgggtgtgtggactcgggggccttcccacaaacactacgtccggctctgggcccgagacagccgcaggccccagccactgaatgatactggcagcggctggggttttatgaactcctttctggtattttttcccctctatgtacaaatgtatatgttacgtctcaatttttgtgcttaagtaaaaataaaaacattttcaga

SEQ ID NO: 156044 - DNA, 934 bp, Homo sapiens
attaatagccctttatccccctgcaccctcctgcaggggatggcactttgagccctctggagccctccccttgctgagccttactctcttcagactttctgaatgtacaatgccgttggttggaatttggggactggaagggaccaaggacactgaccccaagctgtcctgcctagcgtccagcgtcttctaggagggtggggtctgcctgtcctggtgtggttggtttggccctgtttgctgtgactacaccccccccctccccgaaccgagggacggctgcctttgtctctgcctaagatgccacctgccccgcccatgctccccatccagcagtcattccagccatttcaggaaaggccagggcccagcccagtcccagaaaccgcatcccctccagcagggaactgaataagccatctctcggagggcccccctaatacccagtggagtcctggttttaaaccctggggggtgtgtcacctgtgatgggacacgtaggagtcccacccttaaaaccagcaccctgtcccctcgaggctgcccgagtgggtgtgtggactcgggggccttcccacaaaaacatagcccgtccggctctgggcccgagacagccgcaggccccagccacttgaatgataattggcagcggctggggttttatgaactcctttctggtattttttgccgtgccccgaacaaatgtatatgttacgtctcaatttttgtgcttaagtaaaaataaaaacattttcggacaaaaaaaaaaaaaaaaaaaaaaaaaaaaaaaaaagggggggcggtattgaaaagaaaagtgtgggggtcgtggggagaaaacaacaatttttttttatggggacaccataatattgttttgggggggggaataaaaatagagggggggggacatcttggaaaacaccccgctgtg

SEQ ID NO: 156045 - DNA, 363 bp, Homo sapiens
  misc_feature (1)...(363): n = a,t,c or g
cccacgcgtccgcgacccacgcgtccgcccacgcgtccgcaggcgcatctacaagcccctgcggacccgggatgagctggaccagttcctggacaagatggacgatcctgactactgccggctgtcgacttcttcagcggggacgtcatgatccacccggtgaccaaccgcccggccgacaagcgcagcttcatcccctccctggtggagaaggagaaggtctctcgcatggggcacgccatcaagatgggctggatccagcctcgccggccccgagaccccacccccagcttctatgacctgtgggcccaggaggaccccaacgccgtgctcgggcgccacaagatgcacgtacctgctccn

SEQ ID NO: 156046 - DNA, 2193 bp, Homo sapiens
gattccggcagtgacagcagtgaggatgatgacgaaggcgacgaggagggagaggacggagcccttgatgacgagggccacagtgggattaaaaagaccactgaggagcaggtgcaggccagcactccttgcccgaggacagagatggcgagcgcccggattggggatgagtatgcggaggacagctctgatgaggaggacatccggaacacggtgggcaacgtgcccttggagtggtacgatgacttcccccacgtgggctacgacctggatggcaggcgcatctacaagcccctgcggacccgggatgagctggaccagttcctggacaagatggacgatcctgactactggcgcaccgtgcaggacccgatgacagggcgggacctgagactgacggatgagcaggtggccctggtgcggcggctgcagagtggccagtttggggatgtgggcttcaacccctatgagccggctgtcgacttcttcagcggggacgtcatgatccacccggtgaccaaccgcccggccgacaagcgcagcttcatcccctccctggtggagaaggagaaggtctctcgcatggtgcacgccatcaagatgggctggatccagcctcgccggccccgagaccccacccccagcttctatgacctgtgggcccaggaggaccccaacgccgtgctcgggcgccacaagatgcacgtacctgctcccaagctggccctgccaggccacgccgagtcgtacaacccaccccctgaatacctgctcagcgaggaggagcgcttggcgtgggaacagcaggagcccaggcgagaggaagctgagctttttgccacgcaagttcccgagcctgcgggccgtgcctgcctacggacgcttcatccaggaacgcttcgagcgctgccttgacctgtacctgtgcccacggcagcgcaagatgagggtgaatgtagaccctgaggacctcatccccaagctgcctcggccgagggacctgcagcccttccccacgtgccaggccctggtctacaggggccacagtgaccttgtccggtgcctcagtgtctctcctgggggccagtggcatggtttcaggctctgacgacggctccctgcggctctgggaggtggccactgcccgctgtgtgaggactgttcccgtggggggcgtggtgaagagtgtggcctggaaccccagccccgctgtctgcctggtggctgcagccgtggaggactcggtgctgctgctgaacccagctctgggggaccggctggtggcgggcagcacagatcagctgttgagcgccttcgtcccgcctgaggagccccccttgcagccggcccgctgggctggaggcctcagaggaggagcgccaagtgggcctgcggctgcgcatctgccacgggaagccagtgacgcaggtgacctggcacgggcgtgggggactactggccgttggtgctggcacccaggggccacacaggggtgctgattcaccagctgagccgtcgccgccagccagagtccgttcccctgcacccatgtataggtgcaccgagtggcattctcccctgcccggcccttcctttttggtgggtccccagcgcagcgtccgccttttaccacctgcgtgcgccaggagctcaccaaggaagctgatgcccaaactgcaagtgggtgtgccagcctggcgggtgcaaccctgcaggtgacaacggtcatctgtgggagctacgcatagcaagctggtgtggtttgacctggatctttccacccaagccatacaggatgctgagaaaccatcaagaagggctctgctggctgtggccttcccacccgcggtacccactcttcgcgtcaggctcggacgaccggcagggtcatcgtctgccatggaatggtgtacaatgaccttctgcaaaaccccttgctggtgcccgtcaaggtgctgaaaggacacgtgctgacccgagatctgggagtgctggacgtcatcttccaccccacccagcccgtgggtcattctcctcgggggcagacgggacatgtccgcctcttcacctagctgttcttgcctgcctggggctggggtggtcgtgctgaagtcaacagagcctttaccctgtgctgcctggtgctcccaccttcttgaattggggttgccaacaaagccgcccccaccacaa

SEQ ID NO: 156047 - DNA, 594 bp, Homo sapiens
caggattcagcacttttgcaactactatagattatttacccggtctataatctctccccagcgggtcagggtaggttagatcttttctcttgcttgcttcgtcatagactcaagctgcctactagtgagggggtgaggaccccaatctgctctgcaggcgtttaaaggcccaaatgcccaaacacaatggatttatggacacgacccaaattaatgtagttaacccataaatgtccaagcacaaccccaaaatccttgaaggaggttttacagtgccttttgtggaacagtttatgtttggaagagtaaatttaaattgtcttttcaatatctgtcttatatcagtcaataacattggatggcaatttacacacatgaacttgtctgacaatgaatatattatacagcagttttggtttatgaatgacataaatactgacaccagtctagaagacattctactttttacaataaatttcatttgtaattttatatgttccgtggcaatgcttttgtgcattacatcctctagagggaacataaaaagataccaataaaattttgtagctgaacagttattaaaaaaaaaaaaaa

SEQ ID NO: 156048 - DNA, 459 bp, Homo sapiens
cagtacagccaacatatttctctttttggccaaaccctgaccacatgccacacgcagattcactgtgccatcagcaagattgacattgaaaaagatatccaggctgtaatggaagaaactgcaattttatctacagaaaacaaatctgagttcctgttaacggattactttgaagaagatcctaacagtgcaatggataaagagagacgaaagtctttactaaaaccaaaattattgagactgcagagagacattgaaaaagcctcaaaagacaaggaaggtgtgtaaccatctctttgaatggccagaaaagggaccatatgatgctcagaggtttcattcagagttaggattgatctgcttttgctatttggcaggggtcttctcatttaaagaaccatatatcaaacttcagttgtgtgaacaaaaaaaaaaaaagtagaagaaaaaagaaagcca

SEQ ID NO: 156049 - DNA, 1644 bp, Homo sapiens
acatttcaacatgagggacccactgacagattgtccgtataataaagtatacaagaacctaaaggagttttctcaaaatggagagaatttctgcaaacaggtcacatctgttcttcagcaaagggcaaacctggaaattagctatgccaaaggacttcagaaactggcaagcaagctgagcaaagcattacagaacacgagaaaaagttgtgttagcagtgcctgggcctgggcctcagagggaatgaaatccacagcggacctgcatcaaaaacttggcaaagcaattgaattggaagcaataaaaccgacttatcaagtcctaaatgtacaagagaagaagagaaaatcacttgacaatgaagttgaaaagacagcaaatcttgtcattagcaactggaatcagcaaattaaggccaagaagaaattaatggttagtacccaggaaacatgaagcacttttcccagcttgtaggaaagctcccaaggcaatctatgactgagaaggagaagcggaagctcctcaataaactgacaaaatcaactgaaaagttggaaaaggaagatgaaaattactaccaaaaaaacatggcgggttattctaccagactgaaatgggaaaacacactagagaactgctaccagagcattctgggagctggagaaggaaagaattcaacttttatgcaataactttaaaccagtacagccaacatatttctctttttggccaaaccctgaccacatgccacacggcagattcactgtgccatcagcaagattgacattgaaaaagatatccaggctgtaatggaagaaactgcaattttatctacagaaaacaaatctgagttcctgttaacggattactttgaagaagatcctaacagtgcaatggataaagagagacgaaagtctttactaaaaccaaaattattgagactgcagagagacattgaaaaagcctcaaaagacaaggaaggcctggaacgaatgcttataacgtactccagcacctcctccttctctgatgcgaagagccagaaagacacagcagcgttaatggatgagaacaatttgaaactagaccttttggaagcgaactcctacaaactgtcatcaatgttagcagaacttgagcaaagaccctcaacccagccatccttgtagtaatcccatcttccaggtggagggaaaaggagccatactcatagctatgtgaaaatatcctcggccttttttaatgaagagattagagaatattgtggagcaaggcatcttctgggtggggcagagcaatcccaggttcttcaactccagccccctggtgcagcccagctcaggcggcagactttgcaaggccttgtatttctttcaagcccaggcaaagatgatgagtttgaatttggaaaaagggtgacattggtgattattacacgagaaaaaaagaagggaggatggtggttttggatcttttgaatgggaaaaaaggccattttcctgccgcttatgtggaggagttaccttcaaatgctggcaacacagctacaaaggcataaaacaagactctgaacatactaccttcacaactcggtaatcaacaatacagtatggatcaaataagaataaagtgctcataccttt

SEQ ID NO: 156050 - DNA, 694 bp, Homo sapiens
  misc_feature (1)...(694): n = a,t,c or g
gttagcacnctcatgtttctggcccccatcgcggtctcagtgcggcgatttttcntggtgaaggcctcggtctacgcctacaccatgttcttctccacgttctaccacgcctgcgaccagcccggggaggcggtgctgtgcatcctcagctacgacacgctgcagtactgcgacttcttgggctccggggcggccatctgggtcaccatcctgtgcatggcacggctcaagacagtcctgaaatacgcttaccgctgcgggcaccggcgccagtgctaccccaccttgtggcagcgctgggccttttacctcctgcccggggtctttatggcctctgtgggcatcgccatctacacctccatgatgactagcgacaactactactacacccacagcatttggcacatcctgctggccgggagcgcagccttgctgctgccgccacctgaccagcccgccgagccctgggcctgctcgcaaaaattcccctgccactatcagatttgcaagaacgatcgggaggaactgtacgcagtgacgtgacactggcctggggacagctgctgctttgatgacctcttcagccaggagctgtatcgagggggaggcgcctggtccagccctggacagattgatttccagctgaataaattggcctagataccctcnnnnnnnnnnnnnnnnnnnnnnnnnn

SEQ ID NO: 156051 - DNA, 3382 bp, Homo sapiens
atgctgtgcttctacgctggctcctgcaggcacttccgttccggcgcccctccggtcatcaacccgctgggcaccagcttcccggacgacaccgcggtacagccctccttccaggtcggggtgccgctgagcaccacaccgagaagcaatgcctccgtcaacgtttcccacccggcccccggggactggttcgtggccgcccacctgcccccctcatcccagaagatcgagttgaagggcttggctcccacctgtgcctacgtcttccagcctgaactgctggtcacgcgggtggtcgagatttccatcatggagccggacgtgccccttcctcagaccctcctctcccatcccagctacctcaaggtctttgtccccgattacacgcgggagcttctgctggagctgcgggactgcgtgtccaatgggagcctgggctgccccgtgcgtctcaccgtgggcccggtcaccctgcctagcaacttccagaaggtgctcacctgcaccggtgccccctggccctgccgcctgctgctgccctcaccgccctgggaccggtggctgcaagtgacagctgagagcctggtggggcccctcgggacagtggctttcagtgctgtagctgccctcacagcttgcaggccacggagcgtgaccgtccagccccttctgcagagcagccaaaaccagagcttcaatgcctcctctggtctgctgtccccgagccccgaccaccaggacctgggcaggagtggcagggtggaccgcagccccttctgcctcacaaactacccagtcacgcgggaggacatggacgtggtgtcggtgcacttccagcccctggacagggtctcggtgagggtgtgttcggacacgccctccgtgatgcggctgcgcctgaaacaccggcatggacagcgggggttccctcaccatctccctgcgggccaacaagacagagatgcggaacgagaccgtcgtagtggcctgcgtgaatgcttgcctcgcccttcctttggctttaatactttcgctcaactgcaccacagccttcttccagggctaccctttgtctctgagcgcctgggtctcgcagggccaacctcatcatcccctacccagagacagacaactgggtacctctccctgcagctcatgtgccctgagaatgctgaggactgtgagcaggctgtgggtccacggtgggaggaccacctttgtacctggggtgccctgttttgaacggattgtggaccctatggccagtgcctccttgctccgcagacacagctacctgtatgccagctgcagctgcaaggcaggctggcgtgggtggagctgcacggacaacagcacagcccagacggtggcccagcagagggcggccacactgctgctcacgctcagcaacctcatgttcctgggcccccatcgccgtcttcagtgcggcgattcttcctggtggaggcctccgtctacgcctacaccatgttcttctccacgggatgtggggtgggagggcaggaccgcgctcatggagcctccccacagttctaccacgcctgcgaccagcccggggaggcggtgctgtgcatcctcagctacgacacgctgcagtactgcgacttcttgggctccggggcggccatctgggtcaccatcctgtgcatggcacggctcaagacagtcctgaaatacgtgctgtttcttctgggtacactggtcatcgccatgtccttgcagctggaaccgcaggggcatgtggaacatcttgggggccctgcctctttgccttcgtgaatcatggcctccatgtgggcttaccgctgcgggcaccggcgccagtgcttacccccacctcgtggcagcgctgggccttcttacctcctgcccggcgtctctatggcctctgtgggcatcggcatttacacctccatggatgactaccgacaaattattcttaaacccacagcatttggcacatcctgctggccggggagcgcaagccttggctcgtgccgccacctgaccagcccgccgagccctgggcctgctcgcagaaattcccctgccactatcagatctgcaagaacgatcgggaggaactgtacgcagtgacgtgacactggcctggggacagctgctgctctgatgacctcttcagccaggagctgtatcgagggggaggcgcctggtccagccctggacagattgatttccagctgaataaattggcctagataccctcttacttcctcctactgaggagagggccactccctccctcacacgcacctctcctcgccagctgcctgctcgctgctgagatccctctgcagatcccagctgctgtctgcagtggcccctggggcttggggcttggttactgggagaccacaggtgcctgtgcgagggtggggctgtgtgctctgctgggcctgtgggtggctagagatggggagaaggactccctatggttcctgtttccctgggcgaggctgtggttgagacccatgggcgcccaggagccctgagcccaccacttgggggccgggagctgtggactccgagacccctgctcctggcccctgtgtggccctgatgccagcctgcctggggactggaggatccccctctgctgctgtggtcaccatagggacgggagacggaggtttcccccagagctgatgggcactggggatgcaggctcccgccccgcccctccctttttcctgggctctggagccttgggtccctgagaagagcttccttggactggggtgctctgctgctctgggggtttggccccaaaaaggaaacccttacccagccctgtccacccaccccagcgttccctggggcccccctctgggaaccttccctcttggtcccccaggaaactgcggtggtgtcctgccccccctgcaactgggcctcctgtggcccctgtgggtgtttcaaggaaaactggaactgtcctctgctccctcaatgcaaaaccttgtgggggaaagcaaatgacccaggagcagcaccctggcccctccctgaggccctgtgagtgtcctcggatccgcccctggagaagtgagtggctgagacccgggtggggccctcctacccttggctctgggggctttcccttctgggtcttgtccgggatatggccttcctgaaggtcttacctcccccagccgccctgcacttgaccaccaaagcaatctctaagcttataaaggagaaacatgtatatatggggtttttttggagtaaaggaaaattctaagatattaagacatatttttatgtagatctgatctatctgtgtttggtgaatttaatattctacattgatttttcaaactaaaaaaaaaaaaaaaaa

SEQ ID NO: 156052 - DNA, 662 bp, Homo sapiens
aaatttttaattactagcttgggttgctaacaagcagttttaggctggctattggtatgtatgttttatatttttttacactacacttccacttttgcaaaatctcagactgaaaagtgagctttttgtttccccaaatatgaactaacaataaattttaaaaattttcagctgggagtggtgactcatgcgtgtaatcccagcattttgggaggcagaggcgggaggatcacttgagcccaggaggccaacttggccaacatggcaaaagccatgtcttttaaataaataaataattttttttaaagggtctgccccctgccctcaaacataaggtttatgtaaggtaagagagactcttatctcattttgtatattcctgtttcattttgttttccctggcagatagcaaactaatggacaacatttcatgggcagctatttaaagttgccagcctaaatcacctacactggcttaaatgacgtactccagctgatgtgtctgtcacttagggaagaatgagacagttactgccaaaaaggagttcatacgggagggtagggggatagaacaatattcagaaatgagttctttagtctgctggttgaatacttcgtccagttcttttgactgctatgatggtctgaattccggcacactc

SEQ ID NO: 156053 - DNA, 878 bp, Homo sapiens
  misc_feature (1)...(878): n = a,t,c or g
tgtgatacatttgaaggcgtcggaaancccaggcccacctgagcctgctgccctgacccgtggccccagctgagcacgcaggctttttggggttttcccagggtcggcggcagagccctccctccagggcccattgtgttcctgcattcccccatggagcacacgccagacctgaggggtgggacggacacccccaggcatggccggctgtctcctctccctgccttgggaggccttgctgggctctagctgtcctccagcactttgggccctgggcccccagaggcagtcagtacctgggtggagctcagagtccccacctgtgctcttcacaaaaaccaccagcagatgagacccacgtgcgtccctctgggcgcctcaggccccaggatccaccatcaaggtttgcttgcctgtggaggtcgcctctccccaggggagcccccaagggcggtcgggatggtgggtttggcatccccaggcactgcctatccctttcccacactcgcatttggtgtggctggtggctggatgcccaaaaccgggtatcgggttgaagggtccaggtagtgccagcaggggttttcttttctccaggcctatggtcctgcccagcacgccatttcaattgagaaaattcaaagccaagtaccccgactacgaggtcacctgggctaacgacggctactgagcactcccagcccggggcctgctgcctccagcagccacttcagagcccccgcctttgcctgcactcctcttgcagggctggccctgcctgctcctgcggcagcctctggtgacgtgctgtccaccaggccttggagacaggctagcctggccacagaattaaacgtgttgccacaaaaaaaaaaaaa

SEQ ID NO: 156054 - DNA, 1564 bp, Homo sapiens
acgccacgcgccctgccgtaccttcgcctccagccgctgctgtctgggccctgcaggagctgggaaaaaccgcagggaggtcttcaggccgatatgcaagtctcccagccgaaggggcaggggacctgaacaggggaagcagagcacctgggcctggccagagctgacacctggctaggagaggaaggaccaagggacggggcgttcccaggtgggagcctggagggcaaagcgtggtgcgagcagcctcgcgggccgcctaactgccccgttccaagggtgccaccggaccccgctggagaggaacttctccgttggctgatatcatcaccacccattgccgattccacgtttcctttaagcggggctggcggagccgcaaggcggcaaggaactggattgcgattggtcagcacgtgcctcggtccgcggtacaattggctgaggcgctgggccttgggaagcattccccgacgggattggtcgtcgctctcgcagagcccgcctcccgcagtacaagcggcccccggttggggttgggaaggaggggattccgggagaagaaacatggcggtggcggacctcgttctcattcctgatgtggacatcgactccgactgcgtcttcaagtatgtgctgatccgagtccactcggctccccgctccggggctccggctgcagagagcaaggagatcgtgcgcggctacaagtgggctgagtaccatgcggacatctacgacaaagtgtcgggcgacatgcagaagcaaggctgcgactgtgagtgtctgggcggcgggcgcatctcccaccagagtcaggacaagaagattcacgtgtacggctattccatggtgagccgcagccccgtcccgccctgccggaggccccagtaccagcttcgaggcccacctgagcctgctgccctgacccgtggccccagctgagcacgcaggcttcctggggttctcccagggtcggcggcagagccctccctccagggcccattgtgttcctgcattcccccatggagcacacgccagacctgaggggtgggacggacacccccaggcatggccggctgtctcctctccctgccttgggaggccttgctgggctctagctgtcctccagcactttgggccctgggcccccagaggcagtcagtacctgggtggagctcagagtccccacctgtgctcttcacaaaaaccaccagcagatgagacccacgtgcgtccctctgggcgcctcaggcccccaggatccaccatcaaggcctatggtcctgcccagcacgccatttcaactgagaaaatcaaagccaagttcccccgactacgaggtcacctgggctaacgacggctactgagcactcccagcccggggcctgctgcctccagcagccacttcagagcccccgcctttgcctgcactcctactatgagggctgaccctgcctgctcctgcggcagcctctggtgacgtgctgtccaccaggccttggagacaggctagcctggccacagaattaaacgtgttgccacaccaaaaaaaaaaaaaaaa

SEQ ID NO: 156055 - DNA, 704 bp, Homo sapiens
  misc_feature (1)...(704): n = a,t,c or g
aatccgagnccccntngttttgagnanccctagtccagngnggnggaattcccgggaggaggaacatggcggtggcggacctcgctctcattcctgatgtggacatcgactcccacggcgtcttcaagtatgtgctgatcccgagtccactcggcctccccgctccgggcatccggcctgcagagagcaaggagatcgtgcgcggctacaagtgggctgagtcaccatgcggacatctacgacaaaagtgtcggggcgacatgcagaaagcaagggctgcggactgtgagtgtctgggcngccgggccgcatctccccaccaagagtccaggacaagaaagattcacgtagtacggctaattccatgggcctatggtcctgcccaagaacgccaatttcaacttgagaaaatcaaaagccaagtacccccgacttacggaggtcaccttggggctaaaccgaccggctacttgagcactccccaagcccgggggccttgcttgcctccaagcaagccactttcaagaagcccccggccttttgcctgcaactccctcttgcagggctggccctggcttgctcctgcggcagccttctggggacgtgttgtcccccaggccttggagacaggtctagcctggccacagaattaaacgtgttgccacacctgaaaaaaaaaaaaaaaaaaaagatgcggccgcaag

SEQ ID NO: 156056 - DNA, 348 bp, Homo sapiens
  misc_feature (1)...(348): n = a,t,c or g
ncacactcagactcacacacttacatacagacacacaccagactcacacagttacacacacaccgagattcacacaccacatacaccacacacagaaacacagactcactgatacacatacgcacttcaactctccgttcacatcttatcttcctccgtcaatcacgaccgcagaatggaaacgctcccctgtgtgaattcagcccacactctcctgatgttttgcaaacgttgctccacctaacttccgtggttgtcaaaattccctccacctctcttctgatgtgtcggagctcaggaggcgcccaatgcagagagagcctggaccagcacgaaggtgtgggcccc

SEQ ID NO: 156057 - DNA, 736 bp, Homo sapiens
ttttttttgagatggagtctccctctgttgccaggctggagtgtaggggcaccaatcttggctcactgcaacctccacctccccagttcaagcaattcttctgcctcagcctcccgagtagctgggactacaggcgcacaccaccatgcccagctaatttttggattttttagtaaagacggggtttcaccaagttggccatgatggtctcaatctcttgacctagggctttttaaatttatttattttttcaaagaaacattgattctgtgcacacagtcttcaacaacaacaacaacaacaaaaagaaccactcgttcgtcacacagataaagagatgaacaaaacgtcgtctgtcaacacagcagaatatgatttggccataaaaagagacgaggtactgacacaggctacgacatggatgaagcttgaaaacatcaggctaaggggaaggagccagacgcaaaaggccacatattgattatatgaaatgctcagaagaggcacatctgcagagacagaaagtagaccactgttgccaggggccgggggatgacagaagggtgcagggtttctttttgagatgacggaaatgttctaaaatcgactgtggtgaagcctgcacttatctgtgaatatagtgaaaactatgaattctgcacttcaaatgtgtgaacggtatggcatgtgaattgcatctcagtaagaccatttaaaaatatatggctgggtgcgg

SEQ ID NO: 156058 - DNA, 932 bp, Homo sapiens
agtctcactctgttgcccaggctggagtgcagtggcacaatctcggctcattgcaacctccgcctcccgcgttcaagtgattctcttgcctcagcctcccaagtaactgatattacaggcgcccagccaccacaccccgctgatttttgtatttttagtagagacggggttttcccacgttggccgggctggtctcaaactcttgacctcaagtgaaccacccgcctgtgcctcccaaagtgctggaattaccagcgtgagcccaccatgccgggctcacacgtttgagttgataccattgtgcccattcctcttttggcctcttttttgtccatagaggcttcaagatagataggtaagagcccagtagtgttcataagaagcccaatagagagcaggagccactttatcaggtggcaggtgtcctgggcctccctgctggctagtcccaagcggtggtgttgccaggatgtcttggaggtgataatgggacacacagaggcactggagtctccataggttaaaatgcccaccaaaactgggcctttgcctaatatccctcattgactatttggcatttaatttatttattttcctgacatttctgcaagctttgtatttatatttccactttatagatgaggaaatttgaggctcttagaggtaaaatgacttgcccaggtcaaaccaggaagtggcagagacaagctttttaaataagaaaaaattaataaaatataatatgagagtaacttaaaatattaataaaccacaattttaaattaattaaccgtgataaccaacattaataaaagttaagataccaaaacactggtgtctaattctttcaactaacaacttgaattattttcccattttaaattaattaaccgtgataaccaacattaataaaagttaagataccaaaaaaa

SEQ ID NO: 156059 - DNA, 820 bp, Homo sapiens
gagatggagtcttgctctgtcaccgaggctggagtgcagtggtgcgatcttggctcactgcaatctctgcctcctgggctcaagcgactctcccgcctcagcctcctgagtagctgggattacaggcatgtgccactacacccggccaactttcttatttttagtagagatggggttttgccacgttggccaggctggtctcgaactcctgaccccaagtcatccgcccgcctcggcctcccaaagtgctgggattacaggcatgagccactgcgcccggctggaaaggttcttttaagagttccacaaagtggccaaaagtttattcttgcattttatcatgcgtatgccttgggagttatgtttttgggaatatgacttaagaaaacaaacttttccaggtaacacgtaggccggttcccatctttctagcatctctgcctttggctgatgtgacgccatacgttcctgacagttaatgttggctctgtagggatctgatgccaagtacagtcatagctcagccatgacacagggccttcccagataggcccagattcagtgccccttccccaacagatgccctctcccatccccccacacctccccgactcccaccaaaatgaaagtggaagcacgtcttgagttgcccatttcttctgtgtctggtcaggcacacatcaagaatgttggctggtgatgggctcaaggcaggcacagcccgcttcactgtgcatgtgtgcaggcttgattgacactggcaaaatctgcaaggatatttctagacattcctcagaggaaccaatcacttggaatgtct

SEQ ID NO: 156060 - DNA, 617 bp, Homo sapiens
  misc_feature (1)...(617): n = a,t,c or g
ttttttcttttttcttttttccggcgttcaagatgtcaaaccgaggacgtggtgggtcccttctggtgccgaaaattcccggattttcccttgggtccttccggtaggttgctgtaatccaattggtgcttgacaaacaccaggagcccaaaaaccttgtatatccatctcccgtgaagggggaatcaaggggaccggcttgaccagacttccccgctgcttggtgtgggtgacatggtgatggcccacagttcaagaaaggcaaaccagagctcagaaaaaagggtacatcccagcagtgggtcatttcgacaaccgaaagttcattacccttaggaaaagatgggcgtgtttcttttattttttgaaggttaattgcagggagtcatagttgaaccatttaaaggccgagatggaaaggtttcttgccatttaccagggacccagttaggcaaagggagttttgcagactttgtggcccccgggatttgcatcccaatgccttggcagccattgcattgattctcccagtatattttgtaaaaaataaaaaaaaaaactaaacccattaaaaaaaaaaaaaaaaaaaaanaaaaaaaaatttcattacctctttt

SEQ ID NO: 156061 - DNA, 407 bp, Homo sapiens
ttgacaggtctcactctgtcacccaggctggagtgcatgtgtgatctcagctcactgccacctccacctcccgggttaaagtgattcttgtgtctcagcttcctgagtagctgggattacaggtgcaccacctcatcagactaatttttatatttttattagagacggggtttcaccgtattgcccaggctggccttgaactcctagccttgggtgatcctcctgcctcaaactccaaaagtgctgagattacaggcatgaggcactgtgcctggccttagatttttttcctatagtgatggctatgctaagtatttcacaagtgtaattccatgaattcttttatttttttttttttgagacggagtctctctctgtcgcccaggctggtctcgaactccttacct

SEQ ID NO: 156062 - DNA, 470 bp, Homo sapiens
ataataaggtcaaaaaacatctgataccttgaaataaatccaacaaagcataccaagaccttcagtaaaacccttactaagagaaatgaaagaagacctaaattaatggcaagagataaccatgttcattggattggaagtgtcagtattgtaaagatgtccgttctctctaaattgatacatacagaaattcagtgcaatcgcaataaatatcctcaaatagggctgttgctgctgccactgctgcttttttttcttttggataggctagttctcaaatttacatggaaaggcacagggccaagaatggcaaaggcaatcttgagaaaaagttggaagacttaacactaacatatatcaacacttattataaagctacagtgattaaattagtgggcgcaaagccagattgaccagtggcacaggatagagtccaaaagttgacctacacatacaaggtcagttgattt

SEQ ID NO: 156063 - DNA, 2588 bp, Homo sapiens
agtggtagaatgattccattagaggcaaaaagcatggtttagcaatatgtagattattaaaattatttgttctagcacaaactaaccttggatagtgtttggtcctagaaaaagtagacaagtaaaatctgagtcatgtttgggagagggaaacgggtcactatttgagatttccatctttagatcattcctttggctgactataaatctcccatttggtcttagagattactaaaacgcttcagagatcatgagttataatattcaaggactgaaataagcatttctcttttcagactcccaagaagagtcaccagaaatctctgagcttttctaaaactacaccaagaaggatctctcatacaccacaaactccgttgtatactccagaaaggctgcagaagtcccctgcaaaaatgacccctacaaagcaggcagcttttaaggagtccttaaaagactcctcctcacccggccatgactcaccattggattcaaaaatcactcctcaaaaacgacatacccaggcaggagaaggtacctctcttgaaacgaagacaccaagaactcctaagaggcaaggtactcagccgcctgggtttttgccaaactgtacttggccacattcagtgaattccagtccagaaagcccctcctgtccagcccctccaacttcatcgactgcccagcccaggagagagtgtctcactcccatcagagaccctctcagaacacctccgagagcagcagccttcatgggcacgcctcagaatcaaacacaccaacagccccatgtcctcagagctgctcgggcagaggaaccagcccagaaactaaaggataaagctatcaaaactccaaaaagaccagggaattcaactgtgacttcttccccacctgttacgccaaagaaactgtttacctctcctttatgtgatgtctccaagaagagtccatttaggaaatctaaaatagagtgtccttccccaggagaactggatcagaaagagccccagatgtcacccagcgtagctgcatctctctcctgccctgttccctcaactccccctgaactctcacagagagctacattggacaccgtccctcctccacccccttctaaagttgggaaacggtgtagaaagacctctgatcccagaaggaagcttcgtggagtgtcagcttgatgcctccgctactcctggggttggcacagctgacagcccagctgcccccacagactctagagatgaccagaagggactgagcctctctcctcagtctcctcctgaaagacggggctacccaggccctggtctcaggagtgattggcatgcatcctctcctctgctcattacaagtgacacagagcatgtcactctcctcagtgaagccgaacaccatggcattggtgacttgaaaagtaacgtcttatcagtggaagagggtgaggggctaaggacagcagatgctgagaagtcttctctgtctcaccctgggattcccccatctcctccttcctgtgggcctggctctcctctgatgccttcccgtgacgtgcactgtaccacagatgggagacagtgccaggcttcggcacaactagacaacctgccagcatcagcttggcattccacagactctgccagcccacagacctatgaggttgagctggagatgcaagcttctggccttcccaaacttcgaattaagaagatagaccccagctcttcattagaggctgagcccctcagcaaggaggagagctctctgggagaagagagcttcctccctgctctcagcatgcccagggccagcaggtccttaagcaaacctgaacccacctatgtgtcacccccctgcccccgcctctcccacagcacacctggcaagagcagggggcaaacctacatctgccaggcctgtacccccacccacggcccttctagtaccccctctccatttcaaacagatggggttccttggacaccatcccccaagcacagtgggaagacaactccagacataattaaagactggcccaggaggaagagggcggtgggctgtggcgccggctcctcttccgggaggggcgaggtcggtgcagaccttcctgggagcctgtcactgcttgagtcagagggcaaggaccacggccttgaactcagcatccacaggacgcccatcttggaggattttgagctcgagggagtgtgccagctcccagaccagtcgcctcccaggaacagcatgcctaaggccgaggaagcctcttcctggggacagtttgggttgagttccaggaagagagtcctgttggccaaggaagaagctgaccgtggagccaaaaggatctgtgacctgagagaagattcagaagttagtaagagtaaagaggggtctccaagttggagtgcatggcagctaccctccacgggagacgaagaggtgtttgtttccggctccaccccacctcccagctgtgccgtgcggagctccctctcctgccagtgccctccaggctctgacccagtctccgctgctgttccaggggaaaacaccttcctctcagagcaaagaccccagag

SEQ ID NO: 156064 - DNA, 928 bp, Homo sapiens
gttacctgaacaaatatttcaatagtaaatattgataaaccatttttttttagagtcttgctctgttgcccaggctgcagtgcagtggcacaatctcagctcactgcaacctccacctcctgggttcaagtgattctcgtacctcagcttcctgagtagctgagactataagcatgcgcccaccacgcccggcaaatttttgtatttttagtagagacgcctgtttcacccatgttggccagctggtctcaaactcctgacctcaagtgatcccaaccgcctcagcctcccaaagtgctgggattataggtgtgagccactgtgcccagccgataagcattaattattaataatggcttacaaaactgtaccttttataaaggtgtgaaataaagaatcaattgagggtcccaaacatttaagtggaaacccagtttgctcacttagccacaaggcatacatgtgccttgtctcactggaacagctgccaccaattcaagttggaagatactaggttcccggcaatgacatatctccaaagttaggaacatggccctttctccagaacatacttttccttctgccctggttcctacctgtaatgacttacaaataaccgcctctccctatgctgtccttctctgactttgaaagtcagttcatcttaataactttggcccatgggtcacccaaaggatatatatggcttgaggtcccaggctagggaaaggttaacaaccagtagtcagcaaagaccggtctaggaacataactgagcattccaagagattgaaaagttttcaacattcatagacatcttcagaagctgttgaagttttcttggatttgctctaaacatatggtaataattttcaatgtaaataagagatctataaaaggcatttatatcttgccttttcctcgtgcc

SEQ ID NO: 156065 - DNA, 837 bp, Homo sapiens
atggtctccatctcccgacctcgtgatccacccgcctcggcctcccaaagtgctgggattacaggccctgcactgggtgctgaaggtgaacgggcattccacagacatagggttatgatcgttaccgaaggagcccctggtggcctgagctcagggcacctgagggatgcaatggacagtgaggctggaacagatgatggctgtgcctcccatgttagggttgtgcacagggacctgaagcccagcaacatcctgtatgtggacgagtccgggaatcccgagtgcctgcgcatctgtgactttggttttgccaaacagctgcgggctgagaatgggctcctcatgacaccttgctacacagccaactttgtggcgcctgaggtgctgaagcgccagggctacgatgaaggctgcgacatctggagcctgggcattctgctgtacaccatgctggcaggatatactccatttgccaacggtcccagtgacacaccagaggaaatcctaacccggatcggcagtgggaagtttaccctcagtgggggaaattggaacacagtttcagagacagccaaggacctggtgtccaagatgctacacgtggatccccaccagcgcctcacagctaagcaggttctgcagcatccatgggtcacccagaaagacaagcttccccaaagccagctgtcccaccaggacctacagcttgtgaagggagccatggctgccacgtactccgcactcaacagctccaagcccaccccccagctgaagcccatcgagtcatccatcctggcccagcggcgagtgaggaagttgccatccaccaccctgtga

SEQ ID NO: 156066 - DNA, 697 bp, Homo sapiens
  misc_feature (1)...(697): n = a,t,c or g
gagacggatctcgctctgtctgccaggctggagtgcagtgggcacgatcttggctcaccgcaagctccgcctcccaggttcacgccattctcctgcctcagcctcccaagtaggtgggactacaggcgcccgcaccacacctggctaattttttgtatttttagtagagacggggtttcaccgtgttagccaggatggtctcgatctcctgacctcgtgatccacccgccttggcctcccaaagtgctgggattacaggcgtgacgaccgcacccagccttcttttttttcttttgtaaaaacaaaacagaaaagatgcaagggtgacacagaaagttctcatgtacccatcactcagtaaagagataaattccccaggaatggaacagaatgtggcacccaagaatctgctgctcaggagagtccccagagctgtctccactgtgggaggatgggatggtgacggagatagaagagtccctgccttgtggcgggggaagagagattgcaaaacggtgagcaaagaaataaacacgttccacctccataggaaaacacagggggaaggggagaaattctgaccccccggggtcancgtggaagtgtcttggagacatttctggttgttgcaaccagtgtggggtgggagtgctactggtatctaagttggggggaagccagggattgcnagtaaacc

SEQ ID NO: 156067 - DNA, 483 bp, Homo sapiens
acatcgatacgactttttttttttttttttttttttttttttttgagacagagtctctctctgtcacccaggctggagtgcagtggcgcgatcttggctcactacaagctccgcctcccgggttcacgccattctcctgcctcagcctcccgagtagctgggactacaggcgcccgccaccacgcccggctgattttttgtattttttagtagagatgggatttcaccatgttagccaggatggtctcgatctcctgacctcgtgatcaggcccgcctcggcctcccaaaagtgctgggattacaggcgtgaactttccatcttttaaacatgtgtattaatggagctatctcctctctccaaaccccaccactggcccttcccttacccttctattttctcaaatttgtacccactccctgaccccctttgtttaggtgtgagccacaaatcctaagtaaagataaactttaccaactgggg

SEQ ID NO: 156068 - DNA, 792 bp, Homo sapiens; identical to SEQ ID NO: 152399

SEQ ID NO: 156069 - DNA, 1127 bp, Homo sapiens
cgacagtcaagatggcgggagcagctacccaggcttccctggagtcggccccacggatcatgcggctggtggccgaatgcagccgctccagggcccgggcaggcgagctgtggctgccgcatgggacagtggccactcctgtgttcatgccagtgggcacgcaggccaccatgaagggcatcacgtttcgaatttttggacgctctgggttgccgcatctgcctgggcaatacctaccatctgggtctaaggccgggacccgagctgatccagaaagccaacggtctccacggcttcatgaattggcctcataatctgctaacggacagcggcggtttccagatggtgtcgctggtgtctctgtccgaggtgacggaggagggcgtccgcttccgctccccctacgacggcaatgagaccctgctgagcccggagaaatccgtgcagatccagaatgcgctgggctcggacaatcatcatgcagctggacgacgtggttagcagtactgtgactgggccacgtgtggaggaggccatgtacaggtcaatccgctggctggaccggtgcattgcagcccatcagcggccggacaagcagaacctcttcgccattatccagggtgggctggacgcagatctccgggccacctgccttgaagagatgaccaagcgagacgtgcctggcttcgccatcgggggcctgagcgggggtgagagcaagtcgcagttctggcggatggtggcgctgagcacctctcggctgccgaaggacaagccccgatatctgatgggggttgggtatgttgtggatagggaagccagagccctacctgtgggaagtggattcctggggaccccctaccctgcttggggagggggcatttgggggaaacggacacaggtctgatctgaggagactaggaagacatggctgtcccttgggggccattctgagggaatatggcccagtctggggcagtgtgagggttgggaggggccctgggaagcccctgaggttctctgccccctcccgtcatggctgcaaccccagctatgccactgatctggtagtctgcgtggctcttggatgtgacatgttcgactgcgtcttccccacacggacagcg

SEQ ID NO: 156070 - DNA, 791 bp, Homo sapiens
  misc_feature (1)...(791): n = a,t,c or g
tcccgcttgtatagcggccggactgcagaacctcttcgccattatccagggtgggctggacgcagatctccgggccacctggccttgaagagatgaccaagcgagaaacgtgcctggcttcgccattcggggggccttgagcggggagtgagagcaaagtcgcgagttctggcaggatggttggcagctgagcacactctcggctagccgaaggacaagccccgatatctgatgggggttggctatgccactgatctggtagtctgcgtggctcttggatgtgacatgttcgactgcgtcttccccacacggacagcgcgctttggctctgccctggtgcccactggggaacctgcagttgaggaagaaggtgtttgagaaggacttcggccccataagacccggagtgcaccttcccccacgtcccaaaagcaccagccngggccttcctgcacgcaactgctgcacagtgacaacacgggccgcgctgcaccaccctcacggtccacaaccatcgcctaccagctgcagctcatgagcgccgtccgcaccagcatcgtggagaagcgcttcccggacttcgtgcgggacttcatgggccccatgtacggggatcccaccctctgtcccacctgggccactgacgctctggcctctgtgggaatcacactgggctgacctggcatttgggagagggagggagaaaaaaagggagggaggggctggaagatactgaaggattcctttttgaaaggtttttttttattgtaacttaaaaaaaaaaaaaaaaa

SEQ ID NO: 156071 - DNA, 691 bp, Homo sapiens
ggctggagtgcagtggcctgatctcagctcactgcaacctctgcctcctggtttcaagcgattcttccacctcggcctcccaagtagctgggattacaggtgcatgaggcaccacgcccagctaattttttaaatatttttagtagagatggcattttgccatgttggccaggctggtcttgaactcctgggctcaagtgatactcctgtcttggccttccaaagtgggattacaggggagagtcacctagcctggccagtcttcaacttttaaaatggtagttttaatgtattctcattaagagtaataaatgaacatctggcactgcatttgtaattttgttttatatgtttctttgctatctccttgattttctgtcttttgctatacggactgttttctttacttcaattatatattttatttattagtgatttctgttacatttttaataagcatacttcaacctattttactgtcaatgtcaaaatgaaataatatcaatgaatagagctcacaatggattagaaatttagtatgctttgaagtactaattaaaattatatttctcgtatgtagtgccaaatgcagagaattacgtatttcctagactggctgttgagatgtaaaatgataatgctggatggataaatacctggctgtaccatcacaggtgttcgaataattgcc

SEQ ID NO: 156072 - DNA, 620 bp, Homo sapiens
cttcatttatcaaatttatccaagacaagaaatcgaaatagcctatattcactaatattatcaaaatcctcccaaaaaaaaactcgcagccagctgtgggctctccccagttttacaggtccttaaatccctcaagggagaagtgcttcctttgggggagacacaacattatttcccactgaacagagagctgagactgttaactcagcacttcttgctcctcatgccacttagccaaagactagtaaggcaggtactataatagctaggctgattgatcccgattatcaaggaagaaccaagtttaaaatacgcaatgggaaaaaaatactcaatggaagaaggaaagaaattgcgtggaacgtaggattttctattacacttgtttattatggaaagttatcgggatattagagcaaagcaatatggccatttattggtacatacaccccagaatgaaggtttaggcctccccaccaggcaaagaacaaagaccatttgaggtgactcctgagggccaaaggaacatggaatggctagaggaagaaagaaatggcagatgcctgccatgatcacatgaaaggtacagaaaatgagatctgcaatagttaggcagatat

SEQ ID NO: 156073 - DNA, 1087 bp, Homo sapiens
agccgaacggcaaattgaagaagaaaaccgagagagagaatgggaacgggaagtgctgggcataaagcgagacaagagtgacagccctgccattcagctacgtctcaaagaacctatggatgttgatgtagaagattattacccagctttcctggacatggtgcggagcctgctggatggcaacatagactcatcacagtatgaagattcactgagagagatgttcaccattcatgcctacattgcctttaccatggacaaactgatccagagcattgtcagacagctgcagcatatcgtgagtgatgagatctgtgtgcaggtgactgacctttacctggcagaaaataataatggggccaccggaggccagctgaacacacagaactcaaggagcctcctggagtcaacgtatcagcggaaagctgagcagctaatgtcagatgagaattgctttaagcttatgtttattcagagccaaggccaggtccagctgactattgagcttctggacacagaagaggagaattcggatgaccctgtggaagcagagcgctggtcagactacgtggagcgatacatgaattcagatactacctcgcctgagcttcgtgaacatctagcacagaaaccagtatttctccccaggaatctacggcggatccggaagtgtcaacgtggtcgagagcagcaggaaaaggaagggaaggaaggaaacagcaagaagaccatggagaatgtggatagtctggataagctggagtgtagattcaagctgaattcctacaagatggtgtatgtgatcaaatcagaggactatatgtatcggaggaccgccctgctccgggctcatcagtcccatgagcgtgtaagcaagcgtctacatcagagattccaggcctgggtagataaatggaccaaggagcatgtgccccgtgaaatggcagcagagaccagcaagtggctcatgggtgaggggctggagggcctggtgccctgtaccaccacctgtgatacagagaccctgcattttgtgagcattaacaagtatcgtgtcaaatacggcacagtattcaaagccccttaa

SEQ ID NO: 156074 - DNA, 938 bp, Homo sapiens
tttttttttttttttttaagcgatgtcagaaatctagattgtaatgtgaaggaaactttcacacatttgccactataaattttgttctttaacaaaatgctctgtagggaaatgaaacttgtcagtgagccagcttctacctgtttatgacttctcataaccttagcacctcagaaacttagcagtattgctggctaacagaatttttaatccgtgttccaatacctactaacaatcatgtctttataggaaagggacttttttgatcttgaaatttatgaattcggggggcattgtaatcataggaatttactaggaggtgcccaatgcattaggagctgtttttgtgatttccttccacctgtattttgtgtttgccatcttagcgctggtcagactacgtggagcgatacatgaattcagatactacctcgcctgagcttcgtgaacatctagcaccagaaaccagtatttctcccccaaggtgagtgagccatgtcaatctgtcagcaagtccatactgtgcatgattgaggaatggagagttaaatgactttcacggttcttggccttcacatattttattcatttgttctatcttgctggggatgcttaattcaaggttttatatggctgtcacaacatgagcttaccttggagcatgtgtcaaagcatctgggaggtgagagttgtagagaatcaacaataacctccgtactttggatgggaatgtgtgtcagagtctccatggttcgatggaagaggactcacaggactctgcatatagtcagactgatttagtacagcgagaagatgcaaagcagaatcagcaaagcgaaaaggtgcctgtggcaaagctggaggaagccaggctcaagcttcctagaatcctctcccagtggagtcacacaggacactcttaattcttccctcgtgcc

SEQ ID NO: 156075 - DNA, 408 bp, Homo sapiens
gtatttttagtagaaacggggtttcgccatcttggccaggctggctctgaactcctaaccttgtgatccacctgcctcagcctcccagagtgttgggattacaggcgagagccactgtgcccggccaggaacgatattaatgaaacatcgtgggcaactctgtacataaactattgataggagagtgaggaacttagttggatagagtttagccaagtaatgaaaaagagggttttaaaattggaatacgctctattgtgtgtagggcttgaaagtaaaacagggggcttgatgggcatagcagattacaaaaccattgtgggatttcctcaacggaggatgttgacaaatgtgggcattaatgagctctgaagtgggataacaacaaattctttttatttatttatt

SEQ ID NO: 156076 - DNA, 514 bp, Homo sapiens
ttttttgagatggagtttcactcttgttgcccaggctggaatccaatggtgcggtgtcagttcactgcaacctctgcctcccgggttcaagcaattcttctgcctcagcctcccaagcagctgggactataggtgcccaccaccatgcccgactaacttttgtacttttagtagagatggggtttcaccatgttggtcaggctggtcttgaactcctgacctcaggtgatctgcctgcctcggcctcccaaagtgctgggattacaggcataagtcatcgcgccaggccaggcactttatttttttaggcagttaatgggggaggcaaccaggttttcctgtttctgcgggttctcaatggcctttagttaaccttaatcttaatgcctgtcaaaccacaaaattaaaccagttttagagatctttgaagatatttttggtttttttcatgagtgagagtcgctctgtggcccaggctggagcacagtgatgcaatcatagctcactgcagcct

SEQ ID NO: 156077 - DNA, 340 bp, Homo sapiens
tttcgtcctcagtcctgctgatgtcctccagctgattccaggctgttcccggccacccctgaggccgtcctttcgcttcttgtaaaagcctccccgcctcctgagctccctcggtcgcctcccgagaagccaacgggcctctctggtggagcgctaggttgacagcgttttagcagggccgcgagaaaccggggagatcctcttacgaggaaaaactccaagattacatccctgttatctttcctccaagagctgactaaggctttggaacagaaaccagatgatgcacatatattatcgtcaaagagcttattgtcacattcttcttgggaattactgt

SEQ ID NO: 156078 - DNA, 683 bp, Homo sapiens
gcggccgccgcctgcccccgcccccggcccccagggaccatggccccaaggaccctatccttaggccgagtccccgccagcgcgctcgcggacgccgcacgcctcccaactccctcggtgcggcccccgccccacggcagacccttcctccgcgccgtcgcgacgcctccggcccacgtcacgctcgcgccattgtttcccagccgccggctcgctgggaccccgcctcagcctcccagcgcggacgttcgccgcgttccgcccttttccccactttcctcacgctggtggtagccctttcctcagtcctgctgacgtcctccagctgattccaggctgttcccggccacccctgaggccgtcttttcgcttcttgtaaaagcctgcccgcccccagagctcctcggtcgcctcccgagaagccaaggggcctctggtggagcgccaggttgacagcgttttagcaggaccgcgagaaacggccagctcgtttgccacacgcccgtgtgcaacacttcctggaaaggtcacagcgaattgcaagccgccacaaaaaacatccggacagctcctggtcagggggctgagccgttcagtggcggcctattcttctccttttttcggggctcctgaaatcggagagggcgagatgccgatctgaggcctgaacccttagtttaaga

SEQ ID NO: 156079 - DNA, 377 bp, Homo sapiens
  misc_feature (1)...(377): n = a,t,c or g
gctttaatcatcacctccatgaaaatgacttctaatttccttctttttagttcaggaatattctcttccacattccagatccatttagatgtaccattggaacttcaaactcaaaatacagtcatgggttgcttaatgaggatacatccttagacatgcgtctttggatgactttatagttgtgggaatatcgnnnnnnnnnnnnnnnnnnnnnnnnnnnnnnnnnnnnnnnnnnnnnnnnnnnnnnnnnnnnnnnnnnnnnnnnnnnnnnnnnnnnnnnnnnnnnnnnnnnnnnnnnnnnnnnnnnnnnnnnnnnntctaaaatannnnnnnnnnnnnnnnnnnnnnnnnnnnnnnnnnnnnnnnnnnnnnnnnnn

SEQ ID NO: 156080 - DNA, 760 bp, Homo sapiens
tgagacaaagtcttgctctgttgcctaggctggagtgcagcggcgcaatcatggctcaatgtagcgtcaaccccctgggctcaagcaatcctcccatttcagcatcacgagtatttgggacacaggcatatgccaccgtacccatctaatttttctattttttgtagagacaggatctcattatgttgcccagggcagttcttgaactcctgaggctcaagtaatccggctgcatcagcctcctaaattgggttttcttttacatctttcaactatttctctgtttcctccttgtttgttattgaagggtttctttacaactctattgattcgtctagactttttttttgcaatctcacctattgaacaaaggcttttaattcatcacctcccatgaaaatgacttcctaatttccttctttttagttccaggaatattctcttcccacattccagatccatttagatgtaccattggaacttcaaactcaaaatacagtcatgggttgcttaatgaggatacatcctttagacatgcgtctttggatgactttatagttgtgggaatatcggtgtactcacacaaacctaaatggtatggcttgctacacacctatgctatgtgatacagcctattgctcctgggctacaaacctgtacagcatgttactgtactaaatactgtaggcaaactgtatctaaaatatacagcaaaaatacagtataaaacattaaaaatggcacacctgtataaggcaaa

SEQ ID NO: 156081 - DNA, 1342 bp, Homo sapiens
tttttttttttttttttggtctgagaatgatggacatttagacactggcgccaggtttgcgcctgaccggcgccacacaggggttgggcggacgaaagacacacaggtgggctacaggtgtcacacggcaccagccagggcccggggtggctggggtgaggatgggtgtttggccagttgaccaggagtcagggtcaagtccaggtggtcagtgccaggggctccaggcaggggagggcagtgccataacccttctgggtttccaacgtaaccaggcggtcgtcacagaaagcaacctcggcccggggcccgggtcctgcaagcaggtgggcagggtcaagcttttcttccattggcgggttggcatttgtctgggcccggatactggctctcgaccccttgggcatgcaaaggcttaggggtggtgctgtcagtcacaccgttgccaccaaggtccccttgggtcggctgaggcttgggatccaggcagcggtggaaggtcgggctgctcaaggccggtatctaagcttctgccctgggacccagtggtgatggccgccatctgccccgattcccacagggacctagtcagaggtcgcacacacaaaaggggtacctggccctggagaaccaccagctgcccggggtctgagaacactcaccctggccgttgggccaggcctgccaggctcccggctggtccaacaccctaaacggtacagagcgctgcaggccctcacctcatgcttttgcagcgcttgagggtgaaggtgtctccaaggggacgctggccagatgcatggagaggccggccaatcttagggccacagaccccccctggacagcagagggtgttggctcctgcagtgggcccgagatactaaggcacgaagctaacctaagcccagtggggtggggcggggcaggacaggcttggagagctgcgccccaggcctgcaaagcacagtgaccgagcaatggcgacggtctgtctgggacaattcggcacaggatggaggtgcggggtgagccggagtgcccatggctcttgctggaaggggctccatgccctggccgcctctataaaggcctgcggagagcggggagagccctggatgcggctggcacagcagcgcaagcccaggggccaatccggggccagagtctgggagtctgacgcccggctggaaagggcgtgtgatgatgccaaagtgccggagccgtcgccggcaggtcctcctccgcggggatcttaaggaggcagcaggaatgaggagaggagagcgggcggaggacctgggagctcaggcgccctcaggcaggtggcgcgggccctcgtgcc

SEQ ID NO: 156082 - DNA, 837 bp, Homo sapiens; identical to SEQ ID NO: 156065

SEQ ID NO: 156083 - DNA, 1268 bp, Homo sapiens; identical to SEQ ID NO: 153036

SEQ ID NO: 156084 - DNA, 963 bp, Homo sapiens
tcgatacgacttttttttttttttttttttttttttttttgtgacggagtctcgctctggctgactgcagagtcaagctggagtgcagttgcgtgatctcggctcactgcaagctccgcctcccaggttcacgccattctcctgcctcagcctctccgagtagctgggactacaggcgcccgccaccacgcccggctaatttttttttgtatttttatagtagagacggggtttcaccgtgttagccaggatggtctcgatctcctgacctcgtcatctgcccgccttggcctcccaaagggctggggattacaggcttgagccactgcacccggcttttttttttttaatggatggaatctccttctgtcacccaggctggaatacagtggcacgatcttggctcattgcaaccgatgcctccccagttcaggtgattttcctggctcagcctcccgagtagctgggactacaggcgcccgccaccacgcccggctgattttttgtacttttagtagagacggggtttcaccgtgttagccaggatggtctcgatctcctgacctcgtgatccacccgccttggcctcccaaagtgctgggattacaggcgtgagccactgcacccggccaagaacattatttttaaagaagtgttaactttgaggacatatctgttccctggagatatttgggcttgaatcaggagtttgtcctacaggtgtcgcccttgatctcaggatgctaccagggctttgttctcgggatcctcgcacctggagagtgaagacgggcatgacggcaggtgaaggggtttgctgtgaaggaagaggagataaggcatttccaggaaatgggaaactgcctcctcctacacatggggcctgtgctcagaatgggcttagttcttataggatggatgctcagtattccttaataaagtagagttccattcttaaaaaaa

SEQ ID NO: 156085 - DNA, 520 bp, Homo sapiens
tattcagaaattgtcatatgtctggctgatgttttttatttttagcggaaatgaggtcttgctatgttgccaaggctggtcttgaactcctgagctcaagcgagccttctgccttggccttccaaagggctgggattagagggctgagccaccacacttggccaaccatattttattttttatatttttattttatttgatccttgttctgaaaccataaagtgagtttaacatttctggctgggcacagtggctcatgcctgtagttctagcactttgggagaccaaggcaggaggatgccttgagcccaggagtttgagaccatcctggacaacataatgagaaaagaaaatacaaaaattaaggggtgtggtgacacatggcctgtagtctcaactatttggggaggctgaaggcgggaggactgcttgggcccgggaggttgaggctacagtgagcccatgtttacgccattgcagtccagcctgggcgacagagtgaaaccctgtctcaaaaaaa

SEQ ID NO: 156086 - DNA, 582 bp, Homo sapiens
gagagagactcgagtttttttttttttttttttttttttttttttttttttttgaggagtttcgctcttgttggctaggctggagtaaaatggggcgatctcggctcactgcacctccgcctcccaggttcaagcgattttcctgcctcagcctcccgagtagctggggttacaggcatgcaccaccatgcctggctaattttctgtatttttagtaaagacggggtttctccatgttggtcaggctggtcttgaactcctgacctcaggtgatctgcccgtctcggcctcccaaagtgctgggattaccggcatgagccactgcgcctggccgacaaaggctttgatatcaaaatgaactgtcaagggaggtgctggagagggattaacctgtgctgcctgggaccctcagggtcttaggttggggagtgtgaataggagtttgcagatggagaataggaagggcattccaggcagagggaaaacctgtgcagagaccaagaggtgtggaaggaaaagtggggttggggctgggtggtctggattatggcctggatgcaataaagtactgtgacagtagcc

SEQ ID NO: 156087 - DNA, 564 bp, Homo sapiens; identical to SEQ ID NO: 152326

SEQ ID NO: 156088 - DNA, 3451 bp, Homo sapiens
gccaccgctgtggtgtcggtgggtcggttggtttttgtctcaccgttggtgtccgtgccgttcagttgcccgccatggctgagctggatccgttcggcgcccctgccggcgcccctggcggtcccgcgctggggaacggagtggccggcgccggcgaagaagacccggctgcggccttcttggcgcagcaagagagcgagattgcgggcatcgagaacgacgaggccttcgccatcctggacggcggcgcccccgggccccagccgcacggcgagccgccggggggtccggatgctgttgatggagtaatgaatggtgaatactacccaggaaagtaatggtccaacagacagttatgcagctatttcacaagtggatcgattgcagtcagagcctgaaagtatccgtaaatggagagaagaacaaatggaacgcttggaagcccttgatgccaattctcggaagcaagaagcagagtggaaagaaaaggcaataaatgagctagaagaatggtatgcaagacaggacgagcagctacagaatacaaaagcaaacaacagggtggcagatgaaagctttctacaaacaacccttcgctgacgtgattggttatgtgtatgttgcaaaactaattcctttttctacatctgattctttctacttttgtttagagttaatgctccttttatgtcacaagttgctttgctttttaaattatttcaaattggcactttgggggctgcctaagaattgataagcggggtatgatctgttgatgaatcttccagatttgtgactccctgcatcctctgatggccatttttcatatttggggttttggagggaagaaagctaactcgctttcaaaatgtgtcatttgcgatcttatctgggaacggtttgaggctcgggggaactctgctctcttgctcttggctgccatcactgctgccatgccctgttgcctgcctgcctcaggtgggaaggaggtttccccacctgggagcaggtggcagtcccaggtggttaggagccagtgagcagcagcaccttgcattgccaaaatcagagctgtggggcagcatttttccatacttggttcattcaaacaatgtggggtcgtttgcctctccctcaggcagaagagtccagagcagagggggttgtctccagtgggtgtctataattgttcctctgtggtcttgcatgtcagaaattgctatttagtggtcagcttctgatgtcctgtctcctagcacagggaagcccccagctttgagatcaggatagtcaaagtgtcttgatacgggccacttgggcttctccccctgacccccccaaaagaaacctgcatcttctctggagaaggtgtttttcttattcttttttttttctttttttcttttttcttttttttaaggatttcttttatcaaagcagtattgctgaagagttggaaacagttctcattgtctcctccttaaaaaaagggctggctttacatgagaagtaagggtggaatggaagaggagaggaacctgtggaaggtgggcgatgagctcaggtctgtagagcctctcagggcctatgaccttgagatgttcatccccttagaagatagaactgggtttcctgggcccccagatgcatttgcagtgagacttgtgaaatgctggacttacaggtggtgtttgatttgatttctgcacattctctctggagtagaaatggagactggaaaggtcgagtctggttttgctgggcagctgggtggccagcaaagccagctgcacgtccccaagcacagatagagtggcaagggcatgtccagcttactgaccatctgcattgagctcattctcattttctatatctgacttaaagtttctctcgtttcttttcttctcttcacctttaagcacaaacataaaccatccttgctacagcctagaacagttaagtaaacctttctcactgcccctaactgtgtgtgccatgaagtcgcagtgttgtagtggctctgggcttcagcggtgtttgccacggccatccctgtgatagtgccacctcagtccccacagaccagtcatctccattgcttttctttgcccgtgatgcttgttggagtagatgaatatagtgtgtcttagcgctgtcctttccggctgtagctcccaccagttaattccgaactgggggtgggctgaccttgatgtgaaagaatgttggagcagcatcctgccaaaaagcaactcacgttggctctcctgccagtgtgccctgagtggccccaaggcacctggctggagggaaaatggcaaacttttggctgaactggagaatgtcctaacaaacccccttccagaatggctttagtctctagtgcttgctagcatgggagctttgtcttgaattccttttgatctgccccgtttctctccagccttaggaataaatctagaggctattgtgcaatgatctgtgggctttttagaagtctctaaatttccttgaaattcagtacagcccagcataaactactcaagttcttgatcagcctgctgctttgttcttattaataaaagcagtgtgtagctggctaaggacttgttttattaatgctccacaggagcagagacagacagagagacatagtgagccttgaaccaaacacctgtattccaacattttacacagcggtctgggcaccctgtgcctaggagagccagctacgtgtctacctgagtctgacctgggccaggggctgttatcttgggaaagccagaatgtcattaagaaagggacaaataggcagttgcttgtgtagcaaggcagccaccaggttgctcaaagggggttctgcataaaccaacatattttgttgttgcttccagggcaagcagaagcaagccctttgtaaaatgacattgaccgagtcgtcccccaggccactgaaatggggaaacgggtggccccgggctgtgtgaactttaaacccccccaagtcctaagcaaagcaggccccaaagatgtcctccccccccagcgcctcaagtccctcatcctccccctcaaagcaggcccccgctggtgccactgaaagaagcccacccctgtggaaaacacttacatcttgcattattctttaattcctacttcagttgaagttctttcacagttctttgggtttaatttatgtttgagttcttttttgggaccaaacctttttgtcctttagagttgttcattgtttgtgattgcatgtttccttccttcaactgtgttctccctggcattctgatgttggagggagaggaggaagaggaaggggagggaagcttcccaagagtagcctcaacccgtgcttctgtgcattattctgagaatacactttctgtttcaaactgtaaaaaaagtcgaccggccgcgaatttagtagtagtaggtagta

SEQ ID NO: 156089 - DNA, 1677 bp, Homo sapiens
  misc_feature (1)...(1677): n = a,t,c or g
aacagcttgggggagtcggcgaacgctttgggaaaccaaagcccatcacccaaaatgtctgtcccagatttctcaatgcaagcccctggcatggccccatccccttcattcattatgaacactttggaaacgaaaggcctttttgaagaggtttcccatggatgagtgcacccaattcaagttgggttagttggcttctgtttggtgtttgctacaccccctgtgttgtgccctgtttcctcagaaaagttccatgtctgtgacaagcttggaggccgagttgcaagcctaagatcccaagagagcccatccctgaattgcgacgcgtgtaccttcaataagggattgtaaagcagggaggaaaccctctgcagctcattcctgcccactgcaaagctggtgtagccatgctggtgagaaaaatcctgttcaaccctgggttctcccagttacggaaaccttttaaagatccacattagccttttagaataaagctgctactttaacagaggcacctggcgtgggccaagtgcctgatactcccttacactgaatcatgttatgatttatagaaatacctttcctgtagcttttatagtcattgtttttcaaagacgatataccagcccctcacccaggttttaaaaaaagcactggtaggcatagaataggtgctcagtatatggtcagtaaatgttctattgattatcaatcagtgaaaaaagaaatctgtttaaaatactgaattttcatctcactcccattgcaaatcaaggagatctcagcagtgaactgggaaaatacaaaagctctgggctaatctattaaaaccttaccctgaaatattaagggcagtttgcttctagtttggggattgcgctagcccaatgaaggtgatgaagcttttggatttggagggtaaaagctccttcacaccccttccaaaagtcagtcacagaccactgcaacatgccttccctgctggatcattatatacattcagattgtgagtggattgccttggttgacttttaatttattgttttttgttcttataaagatgataatcttaccttgcagttattgactttatattcaattatttacatcaaataatgaaataactgaaaatgtacaaatgtcaaattttggaagtatattcaataccaatgctgtatgagtgggctgaatccagttcattgtttttttttttggtaagaagtgagactacagttccagctacctacatgtcttttcttgtcatccttatagatctctttggctttcagaaagatacagtgataatgtgtgtatgaatcagtcacaatgaattttacttgaatattgtatgttgcattccacttcatttgaaaataatgaaaccatgtaccactgtttacatcatctgtagtgatttcatagataatatatttaatatgacagattatgtttcaactctgtagatgtttaacgtcatagacagttggccctctgtatccgtgagctctatatctgtgaattcaaccaagtttggatggaaaannnnnnnnnnnnnnnnnnnnnngaaacggagtttccctttgtaacccaaggctgaagggcaggggctaagtctgggttaattaaacctccgcctccgtggtaacgcagttttcctgcttaacctttttgaaaggg

SEQ ID NO: 156090 - DNA, 631 bp, Homo sapiens
ttttgagacagagtctcgctctgtcgcccaggctggagtgcactggcgcgatctcggctcacggtaagctccgcctcccgggttcacgccatcctcctgcctcagcctcccaagtagctgggactactggcacccaccacgacgcccggctgtttttttgtatttttaggagagacggggtttcaccgtgttggccaggatggtctcgatctcctgacgtcgtgatccacccgcctcggccccccaaagtgctgggattataggcatgagcaccgcgccagaccccaaattttattttttattcatatattctccactgtctcagctggcattaatgaatcttaagtttgcttttactgtatcataattttggaagtgcctagtaaggaggggatattagagtcctgatgtatttcagaagcagcacactagtcatctttgaatagtggcagatatcttttcaggtagaaaaatttcatgagtaatgccagataagtacaaatataggctctaatgatttcttttaatatttctggaaagtaattagattatatatctgtgatacaatataatactaagtattagactgtagaaggctttgtttcaaggcggtttattcattcatgaaact

SEQ ID NO: 156091 - DNA, 759 bp, Homo sapiens; identical to SEQ ID NO: 125963

SEQ ID NO: 156092 - DNA, 773 bp, Homo sapiens
cctggctaatttttgtatttttagtagagacggggtttcaccatagtggtcaggctggtctcgaactcctgacctcaggtgatccacccgcgtcggcctcccaaagtgctgagattacagacgtgagccaccgcacccacccggcctcctgcctgtattctcttcccacttcgcttttgggttatttcaaagacgccggcgcctttttgtttgtttctttgcttgttttgagacagagtcttgctctagttacccaggctggagtgcagtaggcatgatcttggctcactgcaacctccacctcctgggttcaagtgattctcctgcctcagcctcctgagtggctggaattacaggtgtgtgccaccacgtcaggctaatttttgtatttttagtagagacgggatttcaccatgttggccaggctggtctcgaactcctgacctcaagtgatccacccacttcggcctcccaaagtgctgggattacaggcgtgagccacccggcgcctggcctttgtgtcagttacacacacacacacacacacacacacacacttgcctgaattccctttccttctgtcttccccccaaattctctctcccctccactccagcagggcttctgtccccaccactgcactgaactgacatcttatcttatcaagatcaccaaccctgtccatgtcatcagacctaatggtcactctgctctctgcatccttgtccaagtctcagcacccttgcacagctggctgtctcctctccttgaaa

SEQ ID NO: 156093 - DNA, 415 bp, Homo sapiens; identical to SEQ ID NO: 147835

SEQ ID NO: 156094 - DNA, 1671 bp, Homo sapiens
gtccctgtccgctgtggggatggagagacactaacagaactgggatgggcgatgttggctgaacggatccacctattattagtgcgcggggattggctccttggcgcagcgtacccgaggtggagccaatcaggatgctggggctcggagatgatgggcggccgcctcctcactggagggattcctggagaagctgcagtgtggggatgctctagaccgagtactgcccccagtgtctttccacctcctcctgcagcagcggcagcggcagcagcagttagcagcggcaacttgaggctgcaccccgggcaagtccccagggtggtgctcagccgagaggggggcttggcgccccgaaggggctgcccctccaagagcggaggcagcgagagtacgcgtgtgcctcgcgccggtccacgcggggagagcactggggaccgagacccggcaccacctcccggtccgccctccagcagccatcatttcagtcccttgagaatagaaaggaaagcagacaaaccacctgaaaactctggtgaaagttctcatgatgtggcctccagggaacagcctcttgttttacttgaggctcatttccgctgggccatcctccttgcatgtcactccatgcctactgtgggtaggaaacaggtaaataatgaaattaagacagaaatcaagaagttctttgaaaccagtgagaacaaagatacaacataccagaatctctgggacacagctaagatctccttctttcctgatttctcatacaacttttttatgcccatctctgtccttgatgctggagggggaagtgaaactgccaaacatcatcaccaggatgtgcatgaaatccaaccacacattgaaccccagatttccttgggctcttttgaacacccaatctttggttcatgtacgatcaaagaaggcacctatcggaagagagtagtactggatggcgaggaagtacagatcggtatcttagaaacagctgggcaggaggactatgctgcaattagggacaactatttccgaagcagagaggggtttctctgtgtcttctctattacagaaatggaatcctttgcagctacagctgacttcagggagcagattttaagagtaaaagaagatgagaatgttccatttctactggttggtaacaaatcagatttagaagataaaaggccggtttctgtaaaagaggcaaaaaacagagctgaccagtggaatgttaactatgtggaaacatctgctaaaacacagctaatgttgacaagacacaagcctggcacatcctcccagtcaagtaagaaagcttctatgagcatattcagaaagattgacaagaatccaagggctggaaaggaactaccactgatgtctgtgtcaagcccgaaaatacctgaaggccagaggctggctggaagggcctggcctgacagaggtgagaaagtgtatgtgaaagcttgcgtacaaaaagaaggggcaacaactatacaggaaggagaacaggtatccatgcactgcatgtccgggttacccatagatatccgtgcactgcatgtccagcatatccgggttacccatagcacgtccgggttacccatagatatccacgcaccgcacgttcaggcgacccatagatatccacgcaccgatgttcag

SEQ ID NO: 156095 - DNA, 1020 bp, Homo sapiens
tcctcctcctccttctcctcctcctcctcctcctcctccagccgcccaggctcccccgccacccgtcagactcctccttcgaccgctcccggcgcggggccttccaggcgacaaggaccgagtaccctccgggcggagccacgcagccgcggcttccggagccctcggggcggcggactggctcgcggtgcaaattcttcttaatcctttggagaaaactgagacacaaaatggctgcaaataagcccaagggtcagaattctttggctttacacaaagtcatcatggggggcagtggtggcgtgggcaagtcagctctgactctacagttcatgtacgatgagtttgtggaggactatgagcctaccaaagcagacagctatcggaagaaggtagtgctagatggggaggaagtccagatcgatatcttagatacagctgggcaggaggactacgctgcaattagagacaactacttccgaagtggggaggggttcctctgtgttttctctattacagaaatggaatcctttgcagctacagctgacttcagggagcagattttaagagtaaaagaagatgagaatgttccatttctactggttggtaacaaatcagatttagaagataaaagacaggtttctgtagaagaggcaaaaaacagagctgagcagtggaatgttaactacgtggaaacatctgctaaaacacgagctaatgttgacaagagtggcccttcctgaagaccagatggtggaacacctgcaagtacatttcatcccactgccctagaccagctccagtatctagaaagactgctcactgggctgaggtattttttgatttaatgagagaaattcgagcgagaaagatggaagacagcaaagaaaagaatggaaaaaagaagaggaaaagtttagccaagagaatcagagaaagatgctgcattttataatcaaagcccaaactcctttcttatcttgaccatactaataaatataatttataagcattgccaaa

SEQ ID NO: 156096 - DNA, 2107 bp, Homo sapiens
atggctgcaaataagcccaagggtcagaattctttggctttacacaaagtcatcatggtgggcagtggtggcgtgggcaagtcagctctgactctaccagttcatgtacgatgagtttgtggaggactaagaagcctacaaaagcagacagctctcggaagagggtaggtcctagatggggaggaagtcccagatcggatatcctttagatacagctgggccaggaggacttacgctgcaattagagacaaactacttccgaagtggggaggggttcctctgtgttttctctattacagaaatggaatcctttgcagctacagctgagattcagggagcagattttaagagtaaaagaagatgagaatgttccatttctactggttggtaacaaatcagatttagaagataaaagaccaggttttctctaggaagaggcaaaaaaacagagctgagcagtggaatgttaactacgtggaaacatctgctaaaacacgagctaatgttgacaaggtattttttgatttaatgagagaaattcgagcgagaaagatggaagacattttattatttgaatggaacaaagaacacgaaaaggttagccgagagaatcagagagggaggctgcattttataatcaaagcccaaactcctttcttatcttgaccatactaataaatataatttataagcattgccattgaaggcttaattgactgaaattactttaacattttggaaattgttgtatatcactaaaagcatgaattggaactgcaatgaaagtcaaatttactttaaaaagaaactaatatggcttcaccaagaagcaaagctcaacttatttcataactgcctacatttatcatggtcctgaatgtagcgtgtaagcttgcgtttcttgggcagcctttcttgaaattgaagaagtgaaatgggggtggggagtgggaggaaaggtgacttcctctggtgtttattataaagcttaaattttatatcattttaaaatgtcttggtcttctactgccttgcaaaaatgacaattgtgaacatgatagttaaactaccacttttttttaaccattattatgcaaaatttacaagaaaagttattggcatggttgttgcatatagttaaactgaggagtaattcatctgtgaatctgctttaattacctgggtgagtaacttaggaaaagtgggtgtaaacttgtacatgggaattttttgaatatgccttaatttaggaaactgaaaaatatccggttatatcattctggggtgtgttcttactgacaccaggggtccgctgccccatgtgtcctgggtgagaaaatatatgcctgggcacagcttttgtataggaaaattcttgaggaagtaactgtccgctaggaagtctgtcccaaatttaaaatgtgtgccatattctgggttcttggaaaataaggttccagagctctttggatccgctttttaattaaactgcagttcatgtaaatgaagggccagcatatatacttgcaagataattttcagctgcaaggattcagcaccagttatgtttgaatgaaccctccttttctctgagattctgggtccctgggaaatcccttttctggctagtggttgagcatgttaagtgttaagtttttaatctgggagcagggcataggaagaaaatgtcagtagtgctaatgcattttgcactagaacgcttcgggaaaatattcatgcttgccatctgttcatttctaaatttatattcataaagttacagtttgatacaggaattattaggagtaattcttttctgtttctgtttataatgaagaacactgtagctacattttcagaagttaacatcaagccatcaaacctgggtatagtgcagaaaacgtggcacacactgaccacacattaggctgtgttaccattgtgtggtgtacctgctggaagaattctagcatgctacttggggacataatttcagtgggaaatatgccactgaccgatttttttttttttcctctttgcagtggggctaggacagttgattcaacaaagtatttttttcttttttctcagtcctaatttgaacagg

SEQ ID NO: 156097 - DNA, 1101 bp, Homo sapiens; identical to SEQ ID NO: 150698

SEQ ID NO: 156098 - DNA, 339 bp, Homo sapiens; identical to SEQ ID NO: 122381

SEQ ID NO: 156099 - DNA, 424 bp, Homo sapiens
ctttctcttgacatacatatttgaattttgtaaagcaggaaaaacagaattaatgactactcaaatacttaagataaaatttttttttttttttttggccaggaaaaaaaaatggtaggaaagaatgggaaagtgggccgggtgtgttggctcatgcctgtaatcccagcactttgggaggccgaggcaggtggatcacctgaggtcaggagttcaagaccagcctgaccaacatggtgaaaccctgtctctactaaaaatacaaaaattagctgggcgtggtggcacatgcctgtaatcccagctacttgggcggctaaggcaggagaattgcttgaactgggaggcggaggttgcagtgagccgggatcgtgccactgaactccagcctgggcgacagagtgagactcggtctcaaaaaaaa

SEQ ID NO: 156100 - DNA, 1778 bp, Homo sapiens
aagaagccttatgaatgcaaagaatgcgggaaggcctttagtagtggctcaaactttactcaacatcagagaattcatactggggaaaaaccctatgaatgtaaggaatgtggcaatgcctttagtcagagctcacaacttattaaacatcaaagaatccatacaggtgagaaaccttacgaatgtaaggaatgtgaaaaggcttttcgttctggctcagaccttactagacatcagagaattcatactggggagaaaccctatgaatgtaagatatgtgggaaggcttattctcagagttcacagcttattagtcatcatagaattcatactagtgagaaaccctatgaatatagggaatgtggaaagaactttaattatgacccacaacttattcagcatcaaaatttgtactggtgatgaaacagaatatatgaaatgtgtagggaggcttttaattatggctcaaaacagaatttatcttgttaataattcctctagatagaataatgtagaaacattttatttgtggactacagcttattcagcctgggaaaaataatgttggagaaatactctatgaatagaatatactttggaagcccttaactaaacgcttacttctcttgacatcagataattcagtctagcaatatgatagataattcagtctgtcatactgaaaatgacagcacttttaacacctttctaaccttcttaacgtcagagaatttttgtagaaatgtagtcctgtgattgtcattttttcccctaatttctctaattggtacattcttacgtattttaatccatattaaatttatatggctataaatttcatctgtttacatcctgatttggatactattttaaaaatacctttagtacctgggagaagtgacctctttatttttgaagatggcttattctttttgttctttataacattaaggctttcttattgtaaaaatgttcatgaacgacattttactcaatagagattcttcattatcttcatggtgttttgttgtgttactgtaatatcacttatgaaatcctattggtggatatcgtagtctcctctagatattttgccataatacatgaccaaaatacaagtccctgctggacattctccctaagtcacatgctttgtatcatatcttttaattgcagaagtaatgtgtgaatatattttccttataaaagatgcaaacattacaaaaaggcaaatgtaccctttgaccatatcccaaaggatagtctttatcagttcattatttattgctgatcatttttctgttcatatatacatgcgtgtctcagtaaaaattataaaatgggggataattataatacctacctcataatgctttgtgaggattaaatgaattaagatcgataaagtgcttagaattgtgcctgacatgataaatacatactcactgaatgttagtcatcgttattatattcatcatcatcagtattattatttgtagaaaggctttttaacttctgcagaacttagtcaccattaggcagggtgtttgactgaagaaagaccctttgaaggtaacaagttaaggaaaatttcccatcgatcgatgtacttactattggaacatggaaataatcctagggtgttgggggggggaaaggtactgtggaataatgtgtgtggagggactttattcccgactaatactctttttgtcgcattttatacccagtaaaaaagaaaagagaacataagcaaaatattggtgcactaatgagga

SEQ ID NO: 156101 - DNA, 392 bp, Homo sapiens
cctttttctttcttttcttttcttttcttttttttttttttttgagacagggcctcactctgttgcccaggctgtagtgcagtggctcaatcatggctcgctgcagcctcaactttctgggttcaagcaatccttccgcctcagactcctgagtggctgagactacaggtgcacccccctacgcctggctagtttttgtattttttgtagagatggggtgtcactatgttgcccaggctggtctccaactcctggactcaggagatttgcctgcctcagcctctcaaagggctgggataacagatgtaagcccctgcatctggcctccaatgagttgttatgtgaaaagaacgtgattgtaggtgcttaataaatgcttgctgttataaacc

SEQ ID NO: 156102 - DNA, 2022 bp, Homo sapiens
ttttttttttggcttttcaaataaatatataggtgtctttattgtcttgtattcaaatatagtttaaaaaatgcattgtagtgtggaataccagctggtggaagcgtgcttcttgacagcagagcaatcagaggggtgttctcaagggtaccgtggacctggagggggccttctggcaaatccagactcttctctggtttgttcttcagaccacgaggtgggaaccatctcttcaaaggagccctgccaccatcaccaaagctcacaccagaaaaaaaaccgccatttacacaacaaactgaacctgaaaaaggaacggaacatggtgcttccgccgtgaacaaaatcagcaagttgaatccgtttttcctttcccgggctgttcgaaaaagattcggctagaggaaaaggggggcactttggggcagcccgtaggggatgggcctggagctgtggggcccgggctgagccctccctgccttttaactgcaggatgtaaactctatggaaatgtatagaacttcagttttctcccaaccctccacaacctcaactcttgagaccaccaaattaactgttaggaaaccccagaagagagtccttcaaatgagctacacccaggttcagagcgcagaaccaacagtgtgactggggcatggaggtaaattctgacacgattggaggggaatttcacaaaacaaaattccatgaagtcaaacacgcaacacgcgcgcgtgcacacacacacacacacacgcatacacacaaagtcaacattcaacgtgaagagttcccttttctttctcgaaggttggtttttgcaagccctgacaagcaaagaggtccgttgcggtggccaggggggccaagacctcagaatgaaaagcccacagctgctctgtcctcacccgctctggtagacccagccctggtacaggcatgggggtgggggtcctaaaacccttcgtcagcgttcctggagcccttgccaagcttaccatgtgccccatgcatgtccttcacatcacaaaaacctgtccagccgcccaaggccatggtgtccaccgaatgccacaaacatgctgctgagcctcaaagctcttcaacctcccaccttgctgtcccctctcccctgacaagtgtgcagacaaggtaaaaatcccccaaagcagagatgtcgagggcccggagccacacaccacatccccgtgcatctttggcactctggctggccactgctgcacacgctgcctgcccggatcagtgctgtccagccctcctttcccttccccaaggaaacgctgggccaagctgagctccaaaacaggtgggttcctctgggtccggggaagcaggtgttgagggaaaggccactttcccaccagagggaaaagagagaggctcaactcacacccaggctgcttgctaggaggcctcaggcgggcgaggcagcggccaggcgtcaagggaaagggacagctgagggcgaacgggggtgatgagacgggccctccaagccttccctcgtcagagccagggtaaggaaaagagctggaccaaagcaaggtccatctgccagtgcataaccaggcccacagcaccccaaatcccccaacaacacaggggtcccactggccccgggaacaggccccagctcccacacccatgagttctgaagagcctaacgtactgtcccagcagacagcgagacctcaccatcttgaaaacctgaacctgcccacctcaggttcacccgggggccagctagggccttggaggaaggggcctcgccagttctcagctgcagctcccctctatgagagagacccttacctgcaccccagctgccggcagggccagtcatggctgtgcacggagatgaggtgggtgtgtaagccccccaacgtcagcaacagacagaggtgctgcatgccactgtgctactttatctgggcagggactgggggtgccatgccctctaagaatccaaatttcatcctatagccagaaattcaccgcaag

SEQ ID NO: 156103 - DNA, 2046 bp, Homo sapiens; identical to SEQ ID NO: 156028

SEQ ID NO: 156104 - DNA, 837 bp, Homo sapiens; identical to SEQ ID NO: 156065

SEQ ID NO: 156105 - DNA, 1350 bp, Homo sapiens
gtatacaaattactgatgattaagtcttgttaaatacaaatagccatacacatgaagcaaagcaacagccatacatatgaagctagcatttgtttcttgagaactaataaggaactaaagataaataattaaggcaggtaaacagtttatttttctagttgttgagctgtatagttatctgtcgctatgtaacaaattatactcaaaattaatggtgttaaacaataagcacttattatctaatagtgttagaagttcagaaatttagtaaaaggcttagctgggtagttctggctctcttgaggtcttggtcaaaagatcaactgaagttgcaattatctgaagacttgactggaggctggaggatctgcttccaagatggctcccttacatggctggcaagttggtgcttgttagcaaaataccttagttccttgacaggtagatttctttctttctttctttctttctttcttttttttttttttttgaggcggagtctcggtctttcacccagattggagtgtgcagtggcacaatctcggctcactgcaagctctgcctcccgggttcccacccttctcctgcctcagcctcctgagtagctgggactacaggtgcccgacaccacacccggctaatttttttatatttttagtagaagacggggtttcaccgttttagccgggatggtctcgatctcctgacctcgtgatccgcccgcctcggcctcccaaagtgctgggattacaggcgtgagccaccgcgcctggcctgatcttatctctcttttttgcttaaaactcttcaatgccttcccattgtctttaggataaaagtcaaaatctgggacattgcttgtaagacttgatgtgatcgagtgtttgcttgcctttgcagctactgtccccttgcttacactgcttcagccttatggaccttctttttgttctaattggctatcttctttcctacctcaggctttcatgcctttctcttgcctgtagagttctttgcttgtctcttcacacagttaacctatcttctaggtcttctttaaacatttttattgtgagataaactttctctgatctcctagactaggttagtgttccctttcataggtgtttttctgactctgtacatgttcacagctctcaccacacctttgattatttgtgttctgataggcttcaaataactttcatgagggttgggacagtcttgtcatgtttatcattttatctccacacctaccttaatacattgccatgtataattcatagcttcaccctgaaccttcctgtctttcttcttacagcagcccataacggtacgtgaaggccaaac

SEQ ID NO: 156106 - DNA, 726 bp, Homo sapiens
  misc_feature (1)...(726): n = a,t,c or g
tttgagatggagtttctctcttgttgtccaggctggagtgcaatggtgcgatctcggctcactgcaacctccgccttccgggttcaagtgactctcctgcctcagcctccccagtagctgggattacagatctgcaccaccatgcccagctaattttgtatttttagtagagacggggtttctccatgttggtcaggcctggtctcgaactcctgacctcaagtgatctgtccacctcggcctccccagagtgctgggattaccaggcgtgagcaacntgtttcccagcaggaatttcttttttatagtattggataaagtttggtgtttttacagaggagaagcaaatgggtcttagctctttctctattatgttatcaatcctcccttttttgtacaatatgttgtttacctgaaagaaagggtttctattcgttggttgtggacctgggacaaagtccaagtctgtggaacttaaaacccttgaaggtctgtcataggactctggacaatctcacaaccttagctattcccagggaaccccagggggcaactgacattgctccaagatgttctcctgatgtagcttgagatataaaggaaaggccctgcccaggtggctgtttcttgtctgttatgtcagaggaacagtcctgttcagaaaggggctcttttgagcagaaatggctaataaactttgtgctgatctggaaaaaaaaaaaaaaa

SEQ ID NO: 156107 - DNA, 236 bp, Homo sapiens
ggtaggaaaatgtctgtgtgcaccgacaatgtcactgacctccggattcctgagggtgagtcagggttctccaaatctatcacagcctacgtctgccaggcagtcatcatccccccagaggtgacaggctacaaggccggggtttcctcacagcctgtcagccttgctgatcgacttattgctgaacttttccacctggagtccttgggaataccggacgtgatcttcttttatag

SEQ ID NO: 156108 - DNA, 2352 bp, Homo sapiens
  misc_feature (1)...(2352): n = a,t,c or g
atgtcctctcaggaggtgacatttgagcagagacctgaaggagatgagggaggagccgtggagctttccaggcagcagacacagcaggagaggaggcggcagctgggccagacacaactcatgtacaaatgggccaagccgaaaatctgtagcgaggaccttgagggggcagtgaagctgcctgcctctggtgtgaagacccactgcccaccctgcaacccaggcttcttcaaaaccaacaacagcacctgccagccctgcccatatggttcctactccaatggctcagactgtacccgctgccctgcagggactgaacctgctgtgggatttgaatacaaatggtggaacacgctgcccacaaacatgggaaacgaccgttctcagtgggatcaacttcgagtacaagggcatgacaggctgggaggtggctggtgatcacatttacacagctgctggagcctcagacaatgacttcatgattctcactctggttgtgccaggatttagacctccgcagtcggtgatggcagacacagagaataaagaggtggccagaatcacatttgtctttgagaccctctgttctgtgaactgtgagctctacttcatggtgggtgtgaattctaggaccaacactcctgtggagacgtggaaaggttccaaaggcagacaggcctatacctacatcattgaggagaacactaccacgagctacacctgtgccttccagaggaccacttttcatgaggcaagcaggaagtacaccaatgacgctgccgagatctactccatcatatgtcacccatgttattaaatgccgtgggcttcttatgccggtccttgtgcccaaaaagcctctgaggaggggtcttcctgcacctcttgtcctgctggttactatattgaccgagattcaggaacctgccactcctgcccccctaacacaattctgaaagcccaccagccttatggtgtccaggcctgtgtgccctgtggtccagggaccaagaacaacaagatccactctctgtgctacaatgattgcaccttctcacgcaacactccaaccaggactttcaactacaacttctccgctttggcaaacaccgtcactcttgctggagggccaagcttcacttccaaagggttgaaatacttccatcactttaccctcagtctctgtggaaaccagggtaggaaaatgtctgtgtgcaccgacaatgtcactgacctccggattcctgagggtgagtcagggttctccaaatctatcacagcctacgtctgccaggcagtcatcatccccccagaggtgacaggctacaaggccggggtttcctcacagcctgtcagccttgctgatcgacttattggggtgacaacagatatgactctggatggaatcacctccccagctgaacttttccacctggagtccttgggaataccggacgtgatcttcttttataggtccaatgatgtgacccagtcctgcagttctgggagatcaaccaccatccgcgtcaggtgcagtccacagaaaactgtccctggaagtttgctgctgccaggaacgtgctcggatgggacctgtgatggctgcaacttccacttcctgtgggagagcgcggctgcttgcccgctctgctcagtggctgactaccatgctatcgtcagcagctgtgtggctgggatccagaagactacttacgtgtggcgagaacccaagctatgctctggtggcatttctctgcctgagcagagagtcaccatctgcaaaaccatagatttctggctgaaagtgggcatctctgcaggcacctgtactgccatcctgctcaccgtcttgacctgctacttttggaaaaagaatcaaaaactagagtacaagtactccaagctggtgatgaatgctactctcaaggactgtgacctgccagcagctgacacgtgcgccatcatggaaggcgaggatgtagaggacgacctcatcttgaccagcaagaagtcacttcttggggaagatcaaatcatttacctccaagaggactcctgatggatttggggnaaaanncccttncccaaggtngcccggctgaagacatcctcaggaggcccagacatggacctgtgagaggcactgcctgcctcacctgcctcctcaccttgcatagcacctttgcaagcctgcggcgatttgggtgccagcatcctgcaacacccactgctggaaatctcttcattgtggccttatcagatgtttgaatttcagatctttttttatagagtacccaaaccctcctttctgcttgcctcaaacctgccaaatatacccacactttgtttgta

SEQ ID NO: 156109 - DNA, 1101 bp, Homo sapiens; identical to SEQ ID NO: 150698

SEQ ID NO: 156110 - DNA, 2004 bp, Homo sapiens
atggagtttggtgttacatccctgaagggtgttgacttgattcttagttatccctgcagattgagggagaaggatcttcttccagccatgaggtgtcagaatgtgtctgctttaccaaaaggcttcggagttcaagaattaaaaatactgcagtcagatttactatttgaacagagccgcagtgcggtgcaggcaaaaagggctgatagcccaggtcgacttgttccttgtggggcagtgttcaagtcaacttttatgggcatcttattttacacaaatgttaacacagacaacagccacgactctggtccacggaaacgttctatcgccgcccagcctttacgcaaacaccgaggcgatggcaaccaggagaagccaaacttggtcccccggctcgcggagtgcctgcgagcggtgctcatggcgctctatgagctcttctctcacccggtcgagcgcagttaccgcgcggggctctgctccaaagccgcgctgttcctgctgctggccgctgcgctcacgtacatcccgccgctgctggtggccttccggagccacgggttttggctgaagcggagcagctacgaggagcagccgaccgtgcgcttccaacaccaggtgctgctcgtggccctgctcggacccgaaagcgacgggttcctcgcctggagcacgttccccgccttcaaccggctgcaaggggatcgcctgcgcgtcccgctcgtttcggtagtaggaaaagatggccaccggcagtcccatgattatgtgacccttacagctccagatcaaaacagaaagcctttcctgatacctctgagaacaagtccagggcagtccagggctggctcacaggctattcctagagccagggatgagctgaagaggcgcctgaaagctgagaagaaagtagcagagaaggaggccaaacagaaagagctcagtgagaaacagctaagccaagccactgctgctgccaccaaccacaccactgataatggtgtgggtcctgaggaagagagcgtggacccaaatcaatactacaaaatccgcagtcaagcaattcatcagctgaaggtcaatggggaagacccatacccacacaagttccatgtagacatctcactcactgacttcatccaaaaatatagtcacctgcagcctggggatcacctgactgacatcaccttaaaggtggcagctttcccagctgaagaggatcatcataatgaagaaagacaaacaaagaaaaaaagaaaaacaaaacaccgacataaattttctgaagaattattgcaggaacttaaggaaatatttggagagaacggttatcctgatttcaccactaggaaaacactggccaacaaatttgattgtccggttaacgtgataaaccccaggagcccccaaaggggtcctccgcggccccgcccctttacgtgcggccccgccccttggcgtggcgccctgacaaatggcgccggaagccccgcccccggccggttgctaggctccgacagccggaagtcccgcctgccgtgtagtcgccgccgtcgctgccgctgccgctgccgccgtcgttgttgttgtgctcggtgcgctgagctccgcggctccgcgagccggttccgtccccttcccgccgccgccatgaagtggatgttcaaggaggaccactcgctggaacacagatgcgtggagtccgcgaagattcgagcgaaatatcccgacagggttccggtgattgtggaaaaggtctcaggctctcagattgttgacattgacaaacggaagtacttggttccatctgatatcactgtggctcagttcatgtggatcatcaggaaaaggatccagcttccttctgaaaaggcgatcttcctgtttgtggataagacagtcccacagtccagcctaactatgggacagctttacgagaaggaaaaagatgaagatggattcttatatgtggcctacagcggagagaacacttttggcttctga

SEQ ID NO: 156111 - DNA, 631 bp, Homo sapiens
tttttgagatagggtcttgctctatcacccaggctggagtgcagcggcacgattctttgctcaccactacctccgcctcctgggttcaagcaatccccccgccccagcctcccgagtagctaggaccacaggtgtgcgccaccatgcccggccagtttttgcattttctagtagagacaggggtttcaccatgttggccaggctggtctcgaactcctgacctcaggtgatccgcccgccttggcctcccaaagtgctgggattacaggcgtgagccaccaagcctggccaccttttggctttttggacagaactctttcaattgtaagtcagaaaaccaacacaaaccggccttaatcaaattaacaacaggaatctgtctcacataattggagacatctaaacagtgttactagatctttgattcttcttggctgtttcctttgttgccttcattctttgctgggctttctctaggtagtaggaaaagatggccacgggagttcccatgattatgtgacccttacagctccagatcaaaacagaaagcctttcctgatacctctgagaacaagtccagggcagtccagggctggctcacaggctattcctagagccaggctgaaggtaa

SEQ ID NO: 156112 - DNA, 3403 bp, Homo sapiens
aggtacgatcttgctctgtggcccaggctggagtgcagtggtgctatcacagctcgctgtaacctcaaactcctgggttcaagcaattctcccacctccacctcctgcatagctagggctacaggctaattttttttaaattttttgtagacacagggtcttgctatgttgcccaggctggtttcaaactcccagcctcaagtgatcctccacctcccaaaatgctgagattataggcctgagccaccatgccagacctgcttgtgcttttgatatcatatttaagaaaccactgcatatcccattgtcacgtttactaagtttccaagaattttatagttttaactcttacatttaggcctttgatccattttgagttaattttcttatatggtgtatgaggtagtggatggtataactttatttactcatttttctcagggcagggtatagccccagtggatcgaggtcagagctgtgggaaggccccaaaggcatttgctgaggtctgattatgccagacacctaggtgggactctagtcatgcacagccttgtgctttatgttaagggtttcaccctatctaagagcaacaggagagaagagatcaggtctgtatattgaaaactctggctgcaatgtaaggaatggggtgagactagagacctgttaggaggttactgcaccaatttggaggagttaatagctaaataggatatagtgcctagttagggaagtggaaagatgagagagaaatattctaggaggtagaatggatgagagtcaagactggatgatgtaaagaatgcagcctttggtcaaaaacaaggtatgagtaaagtcactggttttattgagcagctcaaactagttctgaaggcaactgttcagaaggcgttcccaacagcttttgagcaatgcacagcctcccataaaaccttaaaaagtacatctgttaatgtgcacattagtctttgttagtcacgttcactaaatgcattaaccttacatatacttccaattaaaaaaacacataggcttttcagtattttggcctagatttttgttcaaatgagtccaaatgtgtgagtgaggtttacctgttttctgattctgatctataaaaatgggtggtctcaaaagaccagaaagtttattcatagccaaaaatggacaaaaagagttcttattctcccaaaatagggaaattttgtattcctatagtcaaaacaataaacaatttttgaaattaaaaaagttgagaatcttgaaattcatttttttcagtagaataaaacaataagcagcatgaaaacgtaaagtgctacataaaagccccacattacataaattttcgaaaagttttattggccttaaacagttacaggtgaaacaagattaccgtattttttttttcaagcatgctattttaattaccttgatatctcatcatgtgctatgttggtcaaataaaatgtcatgagttatctagatctgaggattaaagaggagtcctcagcctttacttcgccagaatatacatccagttttagctgtatgctgggaattaagggagttaaaagtaggggctttaaaggataatagttttctgaagagggcctttcagtgggggcttgggacaaaaaggggccccaaaggaccaattttggctcatttaaccctcacactggggggatccagattgacaacttaagggtttttagggagcatatgttgagatcaaagggaagaagaaaatggtgcccctttcagaatggtgctttcaggtgctaaaaaatatcccaacacaaacaagcaggtggctagctgacaggtgggggaagagatgcaagtcagatagcaaaggatctgcacagtgccaaaatcttcttggctttttatttaacttagcagtgaatgcagcaggattggcttaaagtataggtacaccccatggaaacatgcaataagatcacatcgatccagaggctggctcaagtttgactcgagggcgaaacgcgagggaaggctcgttcctagcacacaatctcagcagagcgttgaggtggtggggatttctttcttctcatatgacgctaccgtcgcgtgacttcttactaggagaccactgagcactgaatcaaggtttctaatatgtttcaaatcaagattttagagtgtattttcttatggcaatagagttataaaatggtaacctatgattttcctcatataatgagatcttcataaagtccttgagctttttagactttaacaaattcagctacagatataaaaaaataatctgtaaacacctttaaaaatgcgaatttattaaagtttaagacaattctgtattatataatagtgtacaatatgttcttattttagatgtagaaataaaggaaaactggctctcagatgaaaacagaaaattgtgtctgacagttaatagaacgaatgtcccataaacaggagtaaaaattaaatttgcctttaagacgcattggcacaattagttctctagtccataattgcacggagttaaaacctcataatgtctttatgaatccctccccctatacctattccaagataatacatatgggctaacttttcgtggacccgatctaggaacctaaatacccacttcccaacattgtttggacttggtaaaaaaatttaactttacaaataacacttttgggagccataaccctatttgaaagccttggaacccacctgtatttaaaaattaaatcttcattaacaacaccctcaagagtgccctcagtgctgcgaactgaacatgctgaaggcaatgtttttctgtgattatatggtttcaccagccattatgatgataatattatcctactagagtctgtggcgctagctagcactaagttatatattgatttttccactgaaaattctttcttgggctctgactaggtggacaattctaagtaaaggtttttctaacttctatcactggttacttggggccctgaggttttctattaaaataggacatgaaatattttccaatattatgcatattcctggaataattaaaatttatactgattataaagctaggcatataatacatcccaaaagacatacatttcaaagcagaccaaacattcaaatcttcagatccccccatttaacttctggaagaaaaccaagcgatctcctggcttgggccctttcttccttaaaaatctatggaagactgttttctttctttttaaatttgtgtgattatggcagcagagggcagggggtggtgataacagcatatcaaagtggttacaaagtactccctcttcaagtagcatccagtgacaaagatgtgatctcatttcctcataaatgtttgactgaaataaaatta

SEQ ID NO: 156113 - DNA, 628 bp, Homo sapiens
ctagacagggtctcgctctgttgcacaggctggagtgcagtgacatgatatcagggctcactgcagcctccacctcccaggcccatgtgatcctcccacctcagcctcccaaggaactgggactacagccacacagcaccacacccagctaagttatttttttttttagacacggggtctcactatgttgcccaggctggtctcaaactcctgggttcaagtgatccttccacctcagcatcccaaagtgctgggattacaggcatgagccaccgcatccagccacacatctctttttgaacatggtcattctgaaacctattcagaagtggttaggttatgaccatgcccattttccaacctagggaactgctggcagcttgacagggaagtcacggtgactccagaggttactgcatgtttcatttacgttacatcctgtagtgcttggctttttaaagcaaaagttgtgagctcctctgcattgtgcctccttccccaaaaaggctgccacactaccgtattaagaaaccgtataagttgctactgcagggggtgaccttgagagaaagagttgttacagaaaaggaaaataaatgaaaatttttaattcagaaaaagaaagtct

SEQ ID NO: 156114 - DNA, 614 bp, Homo sapiens
  misc_feature (1)...(614): n = a,t,c or g
gttanngatttatttatttatttgagatggagtcttgctctgttgcccaggccagagcgcagtagcgntncttcggctcactgtaacctccacctcctgtgatctcctgacggtgaactcctgactttgtgatccacccgcctcggcctcctaaagtggtgggattacaagggagagccaccgcgcccggtctttttattttgttttttaaatgtttagtagagatgcagtctcgctatgttgtctaggctggtcctgaactcctgagctcaagctatcttcctccctcagccttccaaagtgttgggattacaggggtgagccaccgtgctcagctgctaaagacttttaaatcataaggaaaaggataactgcaggaacatcatcaggaactcagacgcctgggcaaaggtaaaccacactggtttcttatgacagaaaccctccttgattcccttcaccaccaccaaattctcccctttgcccagcagcctaggctgcagaatagggcactgcctttctcactacccatgaagagaggcactctgatccctgatattgaggggttcattgcaagtcacttcaggaacaggcaatcaagcttacaatgtttc

SEQ ID NO: 156115 - DNA, 1104 bp, Homo sapiens
tttttttttttttttttcccggctggaaaattttgagttttataacaaaccgttttgtacaaacccggggcccaggggcccaccccgggtgggtcccccgtttgcccctcgccggggtgccttttccctcccccaagggggcccattttaaagccttttgttttccccaaggcccaacccctcgggcctttggtccggccaggcctcccccccaccggcgcacttccttgttccgtaaggtaggtggatagatctcccctcccctacatggtaagccccggcccccccggaggcctgcgcggaggggcgggacctggcccggttcatccccggggtcccgaagccccaccccgcgctcgaggaaggggcagggaaggagggccagcagagtctgttactaggttcccatggcaactaagagggggccatttccagccttagcactggcatcgggaggtgtccgttggctgctatttccatggcaaccaggagtggcagttccctgggcaaatgggatacaagtttccatgacgatgaaagagtgggaagagccaggctggaggagtcccatggtccccattcttgggctggcgcccccagccataatgcgggtccggcgggtgccgccgctcaatacagtaaaacaagaacaagcctgggggtggcgcagtcccaaatgggcgcccaccggcccggtctcaggtctcagtacaagctggtccagtcccctcacaccccggctcccccaggtccgagattcccccggttcaagtaacacttcagtacagatgaatgttcaagtattgtgcgaagaggcggccagggggttggggcgcccctcgccactcccttgggccgcgagctgaagagcggctgcccgcggcccccactccttgcaatagctgccgttttcagtgacgttcaaggagtcagggtcagggggaaggaactgaagcctggggaggggggaagcagagaggtgacccacaagggggtattgctgtccccacacctgctctcatcctcacctccagctcagccccagcttgcccctggttcccctacctcatgacacctggatccccaattgctcctccggttttc

SEQ ID NO: 156116 - DNA, 377 bp, Homo sapiens
ttgtatgtcttgtaatttgtatgtcatcttgcaattgtgtactatgtaccttggatgtaccttttaaagatcgttggtggtgggacacgtgttttttgaggaagatggtactgaggtcagcaccctggctgccctgagagtgcagtgccacgttccccaccctctcgccaaccacaggattatgctgcaaatgtaaatctttaccaatttgataggcaaaaaatgggatctcagcattttagcctgcatctctgagtactaacgaggctgaacacgaaatgagcttattttcttttcagaagcccctgaatgtgacagtgatccgcagggggggaaaacaccagcttagacttgttccaacacgctgggcaggaaaa

SEQ ID NO: 156117 - DNA, 867 bp, Homo sapiens
gaatatgtggactataacgggggcgctggggtccagcacatcgctctcaagaccgaagacatcatcacagcggttagaacccccttccctgtccgaattcctctctcattcagagccagggacgatctctgcaaaattgagagggcgggtggcggcagtcctgggcccgtttctctgggctgggagactgacaggactccctcactgcttcttgcaactcatgggcaggcacagccacacccacccccagagagttcagtctccacagaacccctgggctttggaggcctgcagaatgatcacaaggcagtgatgaagcaggtggaggaggccctgcaccagctgcacgctcgcgacaaggagaagcaggcccgggacatggctgaggcccacaaagaggccatgagccgcaaactgggtcagagtgagagccagggccctccatgggccttcgccaaagtgaacagcatcagccccggctccccagccagcatcgcgaaaacccaaagaggtagcaagtcaaagctttccttacaattggaggatgcagaaacagatgagcttttaagagacctgagcacacaaattgaatttcttgatttggatcaaatcagtcctgaggaacaacagattagttcccctgaaaggcagccctcaggagagcttgaggagaaaaccgaccggatgccccaagatgaactgggacaagaaagaagggacttggagccagaaaacagagaggagggacaagaaaggagagtatccgacatccagtccaaagcagggatctcccgggagtcactggtgtccagcaccacagaggacattctgtttcaaaaggataaaagcaccccggtgtatcccttg

SEQ ID NO: 156118 - DNA, 1206 bp, Homo sapiens
  misc_feature (1)...(1206): n = a,t,c or g
actgttctcgcgttcgcggacggctgtggtgttttggcgcatgggcggagccgtagttacggtcgactggggcgtcgtccctattctcgggagccgggtctctggagtcgcggcccggggttcacgatgtccgacgaggaagcgaggcagagcggaggctcctcgcaggccggcgccgtgactgtcagcgacgtccaggagctgatgcggcgcaaggagcgagatagaagcccaagatcaaggccaactatgacgtgctggaaagccaaaaaggcattgggatgaacgagccgctggtggactgtgagggctacccccggtcagacgtggacctgtaccaagtccgcaccgccaggcacatacatcatatgcctgcagaatgatcacaaggcagtgatgaagcaggtggaggagagccctgcaccagctgcacgctcgcgacatggagaagcaggccccgggacatggcttgaggcccacaaagaggccatgagccgcaaactgggtcagagtgagagccagggccctccacgggccttcgccaaagtgaacagcatcagccccgggntccccagccagcatcgcgggtctgcaagtggatgattgagattgtgggagtttcgggctctgtgaacacccagaacttccagtcactgcataacattggcagtgtggtgcagcacagtgagggggccctggcacccaccatcctactttctgtctctatgaatttgactactccagggacctcatctagaagcccctgaatgtgacagtgatccgcaggggggaaaaacaccagcttagacttgttccaacacgctgggcaggaaaaggactgctgggctgcaacattattcctctgcaaagatgattgtccctggggaacagtaacaggaaagcatcttcccttgccctggacttgggtctagggatttccaacttgtcttctctccctgaagcataaggatctggaagaggcttgtaacctgaacttctgtgtggtggcagtactgtggcccaccagtgtaatctccctggattaaggcattcttaaaaacttaggcttggcctctttcacaaattaggccacggccctaaataggaattccctggattgtgggcaagtgggcggaagttattctggcaggtactggtgtgattattattattatttttaataaagagttttacagtgctgatatg

SEQ ID NO: 156119 - DNA, 1083 bp, Homo sapiens
  misc_feature (1)...(1083): n = a,t,c or g
gctcgagacccctgtccangtggtgttagacgcccgtccgggacatggctgaggcccacaaagaggcccatgagccgcaaactgggtcagagtgagagccagggccctccacgggccttcgccaaaatgaacaggcatcgagccccggctcccccagcccagcatcgcgggtctgcaagtggatgatgagattgtggagttcggctctgtgaacacccccaagacttccaatcactgcaataacaatggcaatgtggtgcagccacagtgaggggaagccccctgaatgtgaccagtgatccgcaaggggggaaaaacacccagcttaaacttgttcccaaaaacgctgggccaggaaaaggaactgctgggctgccaacattattccctctgccaaagatgaattgtccccccggggaaacagtaaacaggaaaagcatccttccccttgcccccggacttgggtcctaggggatttcccaacttgtccttcctctcccctgaaagcataaaggatctgggaaggagggtttgttaacctggaacttctgtgtggtggccagtactgtggccccacccagtgtaatctcccctggattaaggcgattcttaaaaacttaggctttggcctttttcacaaattaggccacggccctaaataggaattccctggattgtgggcaagtgggcggaagttattctggcaggtactggtgtgatacattattattatttttaataaagagttataacagtgctgatatgaccctgttgtcaccccagctgaatttcttatgacccttccaaaccaccgctcagatggtgtaagaagagcttcatagaaagttgggcaaaacaggctagcaattgcaaagtcaggctttgaccaacatatttctttgcactgaagccttgctgctgtggatacggaaatggataagtactgagcttgctcaacagctggactgtcagggccatactacctgactttgaataacaggcatgcatggacgcttttcaagtggcccagcgtggtgtcctgtcagcttcctctttatgaactcaccagagggcagcaagctc

SEQ ID NO: 156120 - DNA, 1488 bp, Homo sapiens
ctctcgggtcgacgatttcgtgtctgctggagatcatgaccaaggacggcggcgacatgccggcgcccctggaggtgtccaccgtgccggcagtgggggacgtgatctccggggagtacaacggcggcatgaaggaactgatggagcacctgaaagcccagctgcaagccctgtttgaggacgtgagggccatgaggggggccctggacgagcaggcctcgcacatccaggtgctctcggacgacgtgtgcgccaaccagcgagccatcgtctccatgtgccagattatgaccactgcgccccgccagggcggcttgggcgtggtcggcggcaaggggagcttccagagcgacccccaagagccggagactcctttcgcctggggattcggggacagcggcttgcttggttcgcgattcccgaggacgaggaggaacgaggaagaagagaaggagatgcccagccccgccacaccctccagtcactgtgagcgccccgaaagcccctgtgctggtctccttgggggggacgggccacttgtggagcccctcgacatgcccgacattaccctgctgcaactggagggcgaggcctccctgtgaggggactccgtggggcactaccttcccgggctgtctttgggtttccgagtgcatgacgcgagggggactgaacggcgcggtgcggcatgcttcacttggacagctgctcttgtgggtcaggcagagagagactccctcgaggaaggatttgtagggtgaaggactttgggagcatcgagaattctttctgcccaactaagcgaattatagcgaactgcggaaaggtgaggctccgggagaggaagcgcccatctctggactcccatccatccctatcctgtcctttcccccttcccagacaacaggagaacccgtgaactgtgtaaataaaattctgctttttctattctgaaaaaggacttacctaggaccatggcaaataatctctaacaatttacctggaaattaaggaattgggggtattttgttctggcaacaggaaatttacccttctgctgaaatccaagatattcagtgctctgcagaagcctctccccctcacagatctctgcggctgctgattggtaaaggaagcttgaggagggaactgcagccctaggaatctgggtgaatggggttccaagggcccctgggctgggaggagctggctatgaatgtgcatgaagacataatagctcaacctctaggattttgcatgcagagcggatcctgccttgtcactgacttcatctgggattgcttttccactccctggggcttaaagaacaaagagcccggttcacaggcagagactcgggggtgctcagcagcagcccagatttaggggacatttgagggactcttggggccgcagccaaaaactgtctctcctggctacacctgcttaacttcagttcctttttctgtcaatatgtcccttgccact

SEQ ID NO: 156121 - DNA, 1031 bp, Homo sapiens
tttttttttttttttttttgagacagagtctcgctccgttgcccaggctggagcgcaggggcacaatcccggcccactgcaagctccgcctcccaggttcacgccattctcccgcctcagcctcccgagtagctgggaccacaggcgcccgccaccatgcccgactaatttttctgcattcccagtagagacggggtttcactgtgttagccaggatggtctcgatctcctgaccctgtgatctgctcacctcggcctcccaaagtgctgggaccacaggcacgagccaccgcgcccggcccattatttttaaatagttagaacatagtgaataagctataattgtagacactgaaaaacaagacaaagtgatcaaactaattatagcactgacaggatgcaaaatggaagacagaggtaggtctgcaaacagccacacaggtggaaattccaattgtaaatggttctctttgaaatactcagttttacataaatgcttatccagcagcacgtcataaaccacagggccaaaacaatttcttgtcacgtaaacatggcgttggtagctaaaactcaaatttagcaacaaataattgttttcatagggactcataaggataaccttaaattgttaggatgcttttaggggcattgggctaattcaggaattgggctggtatttataacaggaactttaatttttgcagggcatttaaaggttttcatgcattatgtacctgaaggttttgtctcttaattttctttgaaccacacctcttctccttattataagaaaaaccctcttagggtaagggaagcccaaattaactgtcctgaaattttgcattatatttaaaccataatatttgatttacttctgtcaaacaaaacactaccatttgggttctcatttgtagattatttaaaaacatgtttttcctgttaattatcaatgcatttactatcacaaggattaaaaagatcacttcaggtggtggggatgtttcataaaacaccatggtggggagtag

SEQ ID NO: 156122 - DNA, 996 bp, Homo sapiens
actggcaatatacaagcatgctgggggggtcttttcttttatccttttacaaacacttaatacatatggtccggggcaagataccaaaggttcagtgcttgcatactggcgcctgcctggtttatgcattatcatctacctggtgaaacagagtgctaaagacttcttcagctattatgacatcaatcgacagagtgtcagcaagctacataaatgtagagcagcttccccccagatgagataaaagagttgcgtcaaactagcgatgcctgctggggtggataaaagctccactgatcaaaaatatgttcaagcaggccggcggctgggtaaggtgatccaacaatcgaggctaaactgcttccccttggtttcttatatcatagagaccctgcctatttattctttggcgccatctggagtactaccttgttacattgcatgcccacggatttctcaaaaatccttatttgcctcgaggaaccttgttttaaaagcagaaggactgccaaggattcccttcgcctcaggaaacccaatcctaggatttttagaaagtggggctggcctatagtgaggccaaccatggattttagacccagctttcaggcctgatgccaatcaacggctttttggagaatcactacccaaaaagaaacttcttggacattgaagggttattatatcaaaagttcgattcttcggatatagtttcatacaggctcttgtcagacgtatccgtggcctcttgaggatatcaaggaactgagaagcccgtgcttatgctcttctatgagaggggatgaaattggggagaattgtctccatgtttatagattagtttctttctaaatttatgaccaaaaaatattttgcctatttctttcttttgtatatggacatctttttctgtaaacttcttccccctaggttccatcctctctagtaaaatataaaatactttttaaaaaaacaaaaaaaaaaaaaaaaaagcat

SEQ ID NO: 156123 - DNA, 424 bp, Homo sapiens
  misc_feature (1)...(424): n = a,t,c or g
actggcttccactttgtcctggggtttagatgggactggtgtccggctcagctcaccncagtgcccaggtccaggctctatgcannnnnnnnnnnnnnnnnnnnnnnnnnnnnnnnnnnnnnnnnnnnnnnnnnnnnnnnnnnnnnnnnnnnnnnnnnnnnnnnnnnnnnnnnnnnnnnnnnnnnngcaccctgccaatctccatataccaatcatctccatctggcttccacaattaccaattcttggccagtggtgttggagccacgcttccaatcacacctcacccgacgtcggattaccttatcgggttccttcgccgccgtcgccgtcgccacggcctccatcctgattctctcggacttttcaaccgcccggcgggccccgcacactaacctccggacgaaatcgtcgaaccgggaat

SEQ ID NO: 156124 - DNA, 3402 bp, Homo sapiens
atgcgcaatgcaacgtctgccttaggcccggaacttcggtgcctgggcgcagcggtgcacccggacccggaacattctcaggcgaaagtgtctcttgcgtgcgtgggccggaggttagtgtgcggggcccgccgggcggttgaaaagtccgagagaatcaggatggaggccgtggcgacggcgacggcggcgaaggaacccgataagggctgcatagagcctggacctgggcactggggtgagctgagccggacaccagtcccatctaaaccccaggacaaagtggaagcagctgaggcaacaccagtggccctggacagtgacacctccggggctgaaaatgcagcagagagtgctatgctgcacgctgtagccgccagccgcctgcctgtttgcaggccagcagcagggtgaacccgacttgacagagcatgagaaagtggccatcctggcccagctgtaccacgagaagccactggtgttcctggagcgcttcccgcacaggcctccgtgaggagcatctggcctgctttggccacgtgcgtggcgaccaccgtgcagacttctactgtgctgaggtggcccggcagggcactgcccggccccgcaccctgcgtacccgcctgcgtaaccggcgctatgctgccctgcgagagctgatccaagggggcgagtacttcagtgatgagcagatgcggttccgggcccccctgctatatgagcagtacatcgggcagtatctcacccaggaggagctcagtgcccgcaccccaacccaccagccccccaagcccgggtcccccgggagacctgcttgcccgctctccaacttgctgctccagtcctacgaggagcgggagctacagcagcgtctgctccaacagcaggaggaggaggaggcctgcttggaggaagaggaagaggaggaggacagtgacgaggaagaccagaggtcaggcaaggactcggaggcctgggttcccgactcggaggagaggctgatcctgcgagaggagttcaccagccgcatgcaccagcgcttcctagatggcaaggacggggactttgactacagcacagtagacgacaaccccgacttcgacaacctcgacatcgtggcacgggatgaggaggagaggtactttgatgaggaagaacctgaggatgcgcccagcccagagctggatggggactgatggccgccacccttcccaccgcctgccccatccccatccccaacaaggcagctgattccaggcctgctcagtgaccctttctctagggggacatcagggcagtgccccacaacccacacacaccaccatctcactgggtctagtctcatctcagacaacccccacccccactgtttctggggttccctttctcatctctcccaccctgtctcctgcctctgtctttcttggtgtctgtctgggcttctttctgtctctttctgtctttctgtctctctccctacccccgctccctctttccagtgctctggctggctgtctctccctttctccccctctctctctgccttaggctctgtctccaccgcagggcccaaggtgaaagtcctccccttgccggaggccagctggcggggcctttcgtggctggaagtggccagtttggttccggtgctgacccctaggccccagcgcagctgcctaaccgtgctgtctgtcttcccctctctgtttatgtctgcgctgtgtctcacactcagagcctccttgctttctgttaggttcccatctctccttctgcctcactctggggcctcttctttctacttgtacatttccacctctctaggcctctgctctcactgtccctctctgtctgtctctcagcctttatctctgggttttgatcccccactccaggctctgggccccttcttcccccttccctcaaacctggctgctataggcagaagaaaccctgaaccaatgagtaaataacagccccaggggagggaggagaccccaggcagggaggatgggggcagctctcttctctccccaggacccaggctgtggatcacggggcctgccagcttgagtgtagagggaggggggactctacccttctcagccccaccagcccccctctgcccaaccacaattttcccttcctccgccttcctctccctctcctgtttacactccccaaatgcgcacaggctgttatcatgggtcctgagtcatcccacacacagcctgccccagcgtccctgcccccagctggccgcagggcccgccccatggagccccctgccgccctgggctaatgggagccagatggccgcctggtgactcagccaccgggcctgtgggaacccaggcgtcccgctgtgcccatgcccccacacccgggtcctgctcctacagcagacacacacaggagggccttggccactgttgagggggcacacagggcaagggtcaccaaagtcggggcctagggactccttcatgcctctgagatggaatggtggtatcctgccgtggccaagcctgaaggaccctcaaaactgcctcctggagtccacggttcctgacctccgagcctcagctatgccctctgggtcaaccagaattagagccagacagggaaagtgagagctggatggaggcagacaagatgctcagagcgactattaaagaaaaaaaagcctctgctacggagcgcttctgtcctctgtcaggcccgagcgaagtgcctgacaccgggttggatcctcagatggccccatgaactagtgaagtgggtcaaaggaggcctggaaagaaggtgcttcctgcaaggccactcggccatcagaggcagaaatgaaacgggaacccactgctctaaaatcacaaaggtcctagaaaccacttggctgtctggcctctcaggtgtcagggccatccagagtgagacagcattggagggacaagtgtgcatgcagatgtccctcagacgggaaggtttgaaaaagggtcaagatggtaggcgggccctaacaagggctcccgtgcctagccactgtcccgcacacagacaggatcaggtcatcttgaatatggagatcagttccccaaatcactgaattgtcccagcagtgctatgccctaggtactaccaatatcactcctctatttcccagaggaggaagcagccagctagactcccaggaccttggggtcatatctctcagaaagccaagagtgcaggatgagagctgtctgtctcttacctgcctgtatttgtgccccatttttaaagagcagagggcctgggccacaggaaaggtatcagcccttggtgataggcacattttttaccagtctatcatttggtaaattaaatttgtttacaataaaaaaataaaaaaaaaaagaaaag

SEQ ID NO: 156125 - DNA, 1192 bp, Homo sapiens
ccttgaggatggcttgacctgggattgacaaagtgtgtctgctgaaatgctgaggtccccacgtgtgaatgggtgaggctgatgtgtatgtctgtgtgtgccagcaagtgggcgggggatgtgggtgtctgtgtatgccagtgggcactgtgaatgcctaggcatgtgctggtctctgtgagcttgtgtgttcctcagcaagaatgagtgtctttgtgtatcacctggggacttgtcagtgtctgtgtctgtgtgtgcctgtgagccatcatctctgtatcagggttgctcatgctgcgtctttgtgcgccatggtgtgtcagtgtctgtgtgttgatgggtggcccatgagtgacccccgccaggggagaccaggctggctggatccagcacatctccccagtggcagcctcgccctctgggtcagggtgactgaggcattttgtggccttaaaacggggtgttcagggtcagccctcagggtggctgggggccttccatcccttctccccttcaggttggtgaaaaggactccggggggccagggtgctgtatagcagctttatggaagttttcaagcttgggctatccttcccttgggaagcacaagacaagggttcctagggttgctgagtgaagcctgaagaccaagccccctcctcctggaatgctccttccacccctacctctcagagatgggcctgacacctctttctcattcattctccttttccctgtgctctgggaaagcccctggctcaggctgtcagagtgaggatggacctcaaaagtttgatcccctcgtgcagatgaagaagctgaagcccagagtgcggaaggggagttggcccaaggttcacacagctaagttttgagttagagccagtctttgggagagccaagtactacaagccctgggggtgtcacaccgcttgtcactgcccctgaggtctcctgccaaacaactgcagggagtttggctaacagtcctgtgtccagggtgccggtggggatgttatagatgttgctgggatcctgccctcggctccaaattctggcctctcatcccaggctgcagacccttctgccccatgacaggcctgggtgccacacagaggtggccacccctcccaccacagtgtctggcagctgctgcccttctcccaggcccccaaacagaagaagaccttgt

SEQ ID NO: 156126 - DNA, 1887 bp, Homo sapiens
  misc_feature (1)...(1887): n = a,t,c or g
cccacgcgtccgctcagaaccgagtgaggtgtacattgccgtcctgcagagatccaggctgcacgcggcggactgggcaggccgggcccgggcactggtgggtgacagtcatacttcgtggagcccagcgagcatcccgggcaagcactaccaggctgtgggtctgcacctctggaagggtgtgacacttggcaccacactgttccctgtcccttcatggatgtggcccacatgatgttcctttcctcgttgacananannanggcanangggttttttggggctggaaggcccactgtccagcagcccccaggttgcctgggccacggtgcctttgtgggcccagctacaaggaggacttgcaggctcgtgtctgggacagatactggcgccagggccaagtgaagcccgggattggtgggcatctctagctggtccctgagagagggtggagggtgctgacaggccttggcgctttcatctgtcaactccagaggcccttgtgcttgcagcagggaggtcaaggccagggcgtctgaccccggccgctcctccacactgagcctcctgcacgtgctcacaggtagagaagcggcgggtcaatctgcctagggtcctgtccatgccccccgtggctggcaccgcgtgccatgcatacgaccgggaggtccacctgcgttgtgagctctcaccgggctactacctggctgtccccagcaccttcctgaaggacgcgccaggggagttcctgctccgagtcttctctaccgggcgagtctcccttagcgccatcagggcagtggccaagaacaccacccccggggcagccctgcctgcgggggagtgggggaccggtccaattccggggtttcttggaaattcggcccaaacggcggggggccacaagaacttttgcctcataccccaccaacccctggttcccctttttgggtccccgaagggccctggcccccgctgcgtccgcatcactctgcatcagcactgccgggcccagtgacaccgagttccaccccatcggcttccatatcttccaggtcccagagggtggaaggagccaggacgcacccccactgctgctgcaggacccgctgctgagctgcgtgccacatcgttacgcccaggaggtgagccggctctgcctcctgcctgcaggcacctacaaggttgtgccctccacctacctgccggacacagagggggccttcacagtgaccatcgcaaccaggattgacaggccatccattcacagccaggagatgctgggccagttcctccaagaggtctccgtcatggcagtgatgaaaacctaacaggggtggccccctgtgccagctcaggtgactggacgccgagggcctgacaggttcccagcagctgggacggccagccttgcactgtgggggctggtcctgagtcttggcctgcctcccagccctgccaggaggctgcggcctaggggtccacgggaagcctccgtcaggagagacgcagccctgggggcccagctggtgcctgcaaggaagggtgggaagcttgcctggcttctgttgcgcccactgagacggcagagaccccaggatcccagagcttcccaggatccctcccagatcctctgctgactccatatggaggcctcaacacccagagggtagggcagcagatcttctttataactatttattgttcgaatcacttttaggatgtaactttataaataaacatgagcgctgatgatttgcnnnnnnnnnnnnnnnnnngggggggccctttaaagggaaccaattttacgtcccgggggttgcaaagttataatttttttttggggcccccaaaataaaatcccggggccggggtttaaaaaggggc

SEQ ID NO: 156127 - DNA, 579 bp, Homo sapiens
  misc_feature (1)...(579): n = a,t,c or g
ctttggtttaaaagcctgctattacaaaataatagtgatgtctcaaagcttgcaaactgttagtctcaaatgccctaaaatgattgatagtttcctccttgattttatgtacgtttggcttggggatgaaaattctaattctagagtgtaggtaataccctattacagagtagataacgcatatcgcattcttaaggagcgaaaataattttgataatggtcttggtatatagattgcataaatattgttaaattgttaatgtttactaaactaagataggacagctctaagtatagattgttttacatagatgcgtttagcccagcccctgctggtaaccaaggtcctcctccaatgatgggtatgaatatgaacaacagagcaactatacctggcccaccaatgggtcctggtcctgccatgggaccagaaggagccgcaaatatgggaactccaatgatgccagataatgggagcagttgcacaatgacagatttcctcaagggaccaccatctcagatggggttcacctaatggggaagtagaacanggttctgnaaacccctcaagcaccaatg

SEQ ID NO: 156128 - DNA, 1017 bp, Homo sapiens
atggagccagaaatggagctgatttcaataacaacaggaaaaacagcttgtgaagatttgactactgaatccaagatgaattcggttttctggaagattcggtttacttattcttcatctcggatatcatcagatgagtacaccacttcttgggctagtgtcttcgtgaatagaaacctcaaaagacgttatgatgttcacattgctcacatcataaggcatagactccatgccagctatgacacttcaaacatttgtttgtctgaaaaagactacatcttcccttcatttatgaagctgcaaggcgagagccatctgatccaacttagacacggcaaggtaatagccatctggtccaccttagacatgggaagggaaagagaacaaccaccacgttttgctcaacctgggacgtatgcatctcgatggaaggctcttgaagaaatggaaaagcagcagcgtgagcaggttgatagaaacatcagagaagccaaagagaaactggaggcagaaatggaagcagctaggcatgaacaccaattaatgctaatgaggcaagccaatcagatggtcaagtgtgaccctcgccacggcaagtacatggcctgctgcatgttgtacaggggggatgtggtcccgaaagatgtcaacgcggccatcgccaccatcaagaccaagcgcaccatccagtttgtagattggtgcccaactggatttaaggtgggcattaactaccagccccccacggtggtccctgggggagacctggccaaggtgcagcgggctgtgtgcatgctgagcaacaccacggccatcgcggaggcctgggctcgcctggaccataagttcgatctcatgtatgccaagcgggcctttgtgcactggtacgtgggagaaggcatggaggagggggagttctctgaggcccgcgaggacctggcagctctggagaaggattatgaagaggtgggcgtggattccgtggaagccgaggctgaagaaggtgaagaatactga

SEQ ID NO: 156129 - DNA, 2919 bp, Homo sapiens
atggatgtgtattgtgcacatgaaagccttagacatacaaagagccctgaggccacaggccaaacatctggccaaaggcctgaagctctgcaagctttctggccggcctttgggtcctctcctgtaactgggtcctctcctgtaactgaagtgacaacaaaaggccgctggagttcttcccggcaagttctatgggaccgtattcccctggcaaagagcaggccagcaatttcaaacagacaaagccaaaggactaacattccttggtgggaaagctgtccacctatcctgaacctggaaagagaacaaccaccacgttttgctcaacctgggacgtatgcatctcgatggaaggctcttgaagaaatggaaaagcagcagcgtgagcaggttgatagaaacatcagagaagccaaagagaaactggaggcagaaatggaagcagctaggcatgaacaccaattaatgctaatgaggcaagatccaggcttggccctggtgtcctgcatgcagcagggacagtccatgagtaggagtcccaagaaggtctttaaacatctgtatgaactcaaccttacaaaactgcaaagtctcggcagccggagccgactaagatggaaggattcacccttctggggagaagaggcaggaggcaagaggcctcctctggtttccctggctctccacagatctccctccctgctcctcctctttgtgccaaaacatccttctaagggcagacctgattgcactgttcagaggtccccaaagcccacagaaaagtctcaactcctggacctccgtgagtgtatctctatccacgtggggcaggcaggagtccagatcggcaatgcctgctgggaactgtactgcctggaacatggaattcagcccgatggtcagatgccaagtgataaaaccattggtggtggggacgactccttcaacacgttcttcagtgagactggagctggcaagcacgtgcccagagcagtgtttgtggacctggagcccactgtggtcgatgaagtgcgcacaggaacctataggcagctcttccacccagagcagctgatcaccgggaaggaagatgcggccaataattacgccagaggccattacaccatcggcaaggagatcgtcgacctggtcctggaccggatccgcaaactggcggatctgtgcacgggactgcagggcttcctcatcttccacagttttgggggtggcactggctctgggttcgcatctctgctcatggagcggctctcagtggattacggcaagaagtccaagctagaatttgccatttacccagccccccaggtctccacggccgtggtggagccctacaactccatcctgaccacccacacgaccctggaacattctgactgtgccttcatggtcgacaatgaagccatctatgacatatgtcggcgcaacctggacatcgagcgtcccacgtacaccaacctcaatcgcctgattgggcagatcgtgtcctccatcacggcctccctgcgatttgacggggccctgaatgtggacttgacggaattccagaccaacctagtgccgtacccccgcatccacttccccctggccacctacgccccggtcatctcagccgagaaggcctaccacgagcagctgtccgtggctgagatcaccaatgcctgcttcgagccagccaatcagatggtcaagtgtgaccctcgccacggcaagtacatggcctgctgcatgttgtacaggggggatgtggtcccgaaagatgtcaacgcggccatcgccaccatcaagaccaagcgcaccatccagtttgtagattggtgcccaactggatttaaggtaaaacagggatttcttcttggtttggatccattgctgctacccagcagtgctaccagcctccatggtggtactggggatgtctgcagagtcctgtggtgtgatttgtcttcgagtctcccacccgtggataacagcacctgcttcagtggaggtggcaggggagtgaagcagactctgtgggagtccttggttgtagttttgtttagtgccctggctttattgaatgctggttatgctaggagtgaagctgattggggacacagctctgatgcgtttagcccagcccctgctggtaaccaaggtcctcctccaatgacgggtatgaatatgaacaacagagcaactatacctggcccaccaatgggtcctggtcctgccatgggaccagaaggagccgcaaatatgggaactccaatgatgccagataatggagcagtgataatggcatctatgtctttccagtgctgtctagaggcttttggcgtcactttggactctgccttctccccctacccctgcctgctgaattccatatttagtcagcaaatgctgtctgctctatcttccaaatgtatcccatgtcccattacttctgtaaaggtgctgaatgattgggtccccactgcacctacaccctctgtgcctacaccctctgcacctacaccctttgtacctgcaccctctgcactacttacatccactgcacctacaccctctgcactacttacatccactgcacctacaccctctgcacctacaccctttacacctgcaccctctgcactacttacatccactgcacctacaccctctgcacctgcaccctctgcactacttacatccactgcacctacaccctctgcacctacaccctctgtacctgcaccctctgcactacttacatccactgcatctacaccccctgcacctatactttctgcatctacatccgctgcacctacaccgtctgcacctacactatctgcgcctactatctgctgcacctacatcatctgcacctacaccctctgcacctacatcctccgcatctacaccctctga

SEQ ID NO: 156130 - DNA, 1858 bp, Homo sapiens
  misc_feature (1)...(1858): n = a,t,c or g
gcggccgcggcagccagtgagcgctacgcatcttaaccgcgggagccgacaccgcccgcgcaccgcgcctccagaggaccacccggacgaggagatgcgggttcactatcgacatcaagagtttcctcaagccgggcgaggaagacgtacacgcagcgctgccgcctcttcgtgggaaatctgcccaccgacatcacggaggaggacttcaagaggctcttcgaacgctatggcgagcccagcgaagtcttcatcaaccgggaccgtggcttcggcttcatccgcttgggaatccnagaacccctgggctgaaattgcaaaagcagagcttggacgggcaccatttctcaagagcagacctcctacggatttgctttcggttacacatgggagcagcctttgactgttcaagaaaccttttctccagtttgtttttccaattgagctgcttagagcaaagcattttctcagtttggttccagtagagaaagctggtgtggttgtggatgatcgcggtagagcctacaggaaaaaggttttgtagagtttgccagcaaaaacctccctgccacgaaaaggctctggaaaagatgttgtgatggggcattctttgctaacaacgacccctcgtcccagtccattgtggaaacccatggagcagtttgatgatgaagatgggcttgcccagagattgctgatgcacaaaactcaacaagtatcataaggaaaggagaacaaccaccacggttttgctcaacctggggacatttgaaatttgagtatcaatctcgatggaaggctccttgatgaaatggaaaagcagcagcgtgagcaggttgatagaaacatcagagaagccaaagagaaactggaggcagaaatggaagcagctaggcatgaacaccaattaatgctaatgaggcaagatctaatgaggcgtcaagaagaactcagacgcttggaagaactcaggaaaccaaaagttgcaaaaacggaagcaaatacaactaagacatgaagaggagcatcggcggcgtgaggatagatatgatccgacaccaaagaacaggagggactgaggcgacagcaagagggctttaagccaaactacatggaaaatagagaacaggaaatgagaatgggtgatatgggtccccgcggagcaataaacatgggagatgcgtttagcccagcccctgctggtaaccaaggtcctcctccaatgatgggtatgaatatgaacaacagagcaactatacctggcccaccaatgggtcctggtcctgcccatgggaccagaaggagccgcaaatatgggaactcccaatgatgccagataatggagcagtgcaccaatgacagatttcctcaaggaccaccatctcagatgggttcacctatggggagtagaaccaggttctgaaaccccctcaagcacccaatgagtggtgtaggtcctgtgagtggtggtcctggtggctttggtagaggaagtccaagggggcaactttgaaggccctaataaccgccgtagatattaaacattccgttcattccctggctatctagaaaaaaaaaaagtcagtggtatgccctttatacttttacctgttatctggaagaaatggttttattgttaatgtatgtagacttaaaagtttttttttttttgtaaaacttgaggtttttgtatttttctttattcatgagctttgtagattagaatggtaatgatgctcatcattttgaatgttgaaatgtgtttgtgactttagctaaatataagtattccatagtactgtgaaatctatgtagttacttaatctcaataaagaaatcattttgggataatttaaaa

SEQ ID NO: 156131 - DNA, 383 bp, Homo sapiens
gtgggctcctgggggtttacaatccagattgacttttaagcaaggtcactgattagatacccattctctctcttgtttaacacaatgtccactgttaggtaccatgtggtgaagtaggcagtgtcatacactgctggtggaaatggggataatttaatatgaccttcctagaaagtaagttggaaatatgaatcaagggccttcaaaacttccagaccccttgacccaacacctctacttctaggaatccagtctaagtaaataataaagggcacaaagatttggacataaggatattaataacagcattatttgtagtaacaaaaaaactgtaataatcttaatgttcaaccatagaagaatatttaaacaaatcccggtgg

SEQ ID NO: 156132 - DNA, 448 bp, Homo sapiens
  misc_feature (1)...(448): n = a,t,c or g
gatggggacctgaaccatgangacgagacccacgctggacgaggggccgggctgccctgggtgtggctgcagcccttccctccccatgggacccccgaggggacgtgggccacccacgagcatgagtcttctctgcaggtggccgggggtgcctctcgggtctcctcctggctgcccgccccgggccagagtcaagttgttcccacacccagggcccgatgttagcacatcacctccgtgggctggccatggtgcacaccaggacccttgaggtcctgtttctgggagtgagagcccgcgcctgcaggacactgggcccctccagcctcaacttcttcacccaagatacaggctggcttatgaccagagaggcatgcggacagcacagcctccctctgtggctgtggggtcaccccagggctccttcaggcacaaggagggttggggg

SEQ ID NO: 156133 - DNA, 472 bp, Homo sapiens
ggctcactgtaatccccttctcccaggttcaagcgattctcatgcctcagcctcctgagtagctgggattataagcatgtgccaccacacctggctaatttttgtattttttagtagagactgggtttcaccatgttggctgggctggtctcgaacgcctgacctccacctttcttggcctcccaaagtgctgggattaccgtcatgagccactgcacctagcctttcatagagaggtttttgccatcaggccacactggcccgattccctctgtttcccagcttctcatgtttttccatatgggcacttttagcttttcttttcttgttgaggccagcgggggtaagcacggacctgctctgtaagctcccccaaaaccttagagtgaggggagagcagtcatggctttcagctctttactcttaatttagagaggatcaaagggaggaggggccggaaaaaggccaaatt

SEQ ID NO: 156134 - DNA, 408 bp, Homo sapiens
gttggttgaaatgacacgtgattccaggtaagcttttccagataaattgccctggaacttcagactttgtcaggtgaatcgatgtggaatttcagaatgggctggaatgtctgagatgggcatgtccgatattcagctcagtgtggggaaactggtggccagggctggttgcaagctgagttgtaggggtgacagttcaccaagcaggagcgggcccctccctcacgcggagccgctggcacggacagccccgggaaggtcaggctgagcgtcctttcctctgtgcacccccggagggtgctcccattggctttctcagatagcaccatctcagggtccagctggccatggcctggattaagtttaaaatgctgggccagtccccacttccctatatatgacttttta

SEQ ID NO: 156135 - DNA, 415 bp, Homo sapiens
ccagatcctcccggtcacactgctggaggaactccttgagcctggctttgcttggcgacgccctctgctcccctgccgcagcagggccaccaggtagctgagcagctcttctctgctggaggacagctgtgcgggactctgcaagggtctctgagcatgcgcgtcttctaggtccttggtatctctctgatcgcaaaagagctccattttctggttcagatggcaatgtctcttcaacgtctacagactgaccattctgcaggccaccgcgtgctgactctgtcaccaagcaggagcgggcccctccctcacatggatccgctggcatggacagccccagggaggtcaggctgagcgtcctttcctccgtgcacccccggagggtgcttccactggctttctcagacagcaccat

SEQ ID NO: 156136 - DNA, 446 bp, Homo sapiens
tttttttttgtatttgtttttgtttttgtttttgagatggagtcttgctcagtcatccaggctggagtgcagtggcacgataatctgttccctgcaacctctgcctcctgggttcaagtgattctcagactgctccactgtactccagcctgggcgacagagtgagactggtctcaagtatttctttataacagtgtgagaatggccgaaaacgacacccagatgcaaacattacccaggccaccgcgtgctgactctctcaccaagcaggagcgggcccctccctcacgcggacgcgctggcacggacagccccgggaaggtcaggctgagcgtcctttcctctgtgcacccacggagggtgctgcccattgggctttctcagatagcacattctcagggtccagctggccatggcctggattaagtttaaaatgctgggccttc

SEQ ID NO: 156137 - DNA, 1706 bp, Homo sapiens
atgagggagaaggagatgaaggaggaggaggaaaaggaggaggaggaggagaaaaagaaaaaattggagggagaaggaggagaaagagaaggaacaataggaggagaaggaggaggaggaatagaaagaggaggagaaaaagaaagaaaagttggagggaggaggagaaagaggagagaggaagaaggagctggaggaggaggggaggaggaggaaggaagggctaaaatcacactcgatgtttttatgggatcatttgatctggacattgtcaaagaaaaaattgcaccagacaagttaaaccttcaaggaaggactcagtcaggactactgcaatacggaagagagaaggagcttaactttgttgaaacaaaaggctggagagtttttaagtgccgggactcagggctacatgtgcaggtttctgacctgggtatattgcatgatgctgaggtttgggctcctaatggacctgtcacccaggtagtgagcctagtacctggaaagcaactagaagccatttgtgtcaaggtaacgtctggagaaacaaaaggtcaggaacggccaacgtccctactggccacagtccagccccaatctgcaagacagagccagccgccccgggggaattcccgcctggtgggactccacgtcaccagcccccagctgctcaggtatacagctaaagctgagttcataaaaagggatgatttggccgacggtcatctgccagattctgatgatgattcagaactcagtgtggaagaacatcagagggagaggcaggcgctctttgacttatcaagctgctccctgaggcccaaaagcttcaagtgtcagacttgtaaaaagtcatatatagggaagtggggactggcccagcattttaaacttaatccagggccatggccagctggaccctgagatggtgctatctgagaaagccaatgggagcaccctccgtgggtcaacaggaggaaaggacgctcagcctggaccttcccggggctgtccgtggccagcgcttccgcgtgaggggaggggcccgctcctgcttggctaaaatcacactcgatgtttttatgggatcatttgatctggacattgtcaaagaaaaaattgcaccagacaagttaaaccttcaaggaaggactcagtcaggactactgcaatacggaagagaggagcttaacttcattgaaacaaaaggctggggagtttttaagtgccggggtgagatgctgagaaggaactggagacatcaggaagaggctgcatccgcggaagcccggctccccgagcgctccggcccggcccggcgccccggacctgagtgcgtccccatgaaggcgcccgggctggcccaggcggccgtggcagaggagaccccggactgggcgcccgagctctgccccagccccgagtcgcggtcgccggagccgcctgccaaccgccttcaagacttcgacacgctggtcaccgtgggcctatggtgcatgctgttggtggatctacctttctggggtttggacgacagtagctctcttctcacagctctactaggcagtgccccagtagggactctgtgtgggggctccaaccccacatttcccttctgcactgccctagcagaggttctccatgagggcctcacccctgccacagacttttgcctggacatccaggcatttccatacatcttctga

SEQ ID NO: 156138 - DNA, 1511 bp, Homo sapiens
  misc_feature (1)...(1511): n = a,t,c or g
cctcctccctcctccctcttcttcctccttcctccctcctnctccccnctttttaaaaaagggggtctctctctggttgccccaggcctagagtgcaatggccaaaaccctagctcaactgcaaccctcaaaactcccgggcctcaaatgaaccttcccagcctcagcctgctgaagtaaactgggacccacacatgtgcaccactgtgccctaatttttttgtttttttaacttatttaatagaaatgaggtctcactatgttgcccaggctggtctcatacttctggcctcaagtgttcctcctctttggcctcccaaagcactgggattacaggtgtgagccaccatgctttggcatggtggagtatgcagtaggagagcaggggtcggtggtagtgtctccatatgtactctcactaaaactggtgtgggcagatactggatgcctacttatttaggggcatctaaattcctgtgctaaattacgaaaatagaggcagctcttgaaaggagtgatggcatgaaggagagatgcttggaccaaccaccacacaacccttataaataattgataaccttgggttttgatgccacgtcctcttccgacagttgttggttgaaatgacacatgattccaggtgagcttttccagataaattgccctgggaacttcagactttgtcaggtgaatcgatgtggaatttcagaatgggctggaatgtctgagatgggcatgtccgatattccccacactgagctgaatatcggacatgcccatctcagtgtggggaaactggtggccagggctggttgcaagctgagttgtaggggtggacagttcaccaacagtgtataagcaaggcgttcccttctttgcattctcgccaagaggtcaacgtttttctgcaggccactgcgtgctgactcttttaccaagcaggagcgggcccctccctcacgcggagccgctggcacggacagccccgggaaggtcaggctgagcgtcctttcctcttgtgcacccccggagggtgctcccattggctttctcagatagcaccatctcagggtccagctggccatggcctggattaagtttaaaatgctgggccagtccccacttccgtatatatgactttttacaagtttgacacttgaagcttttgggcctcagggagcagcttgataagtcaaagagcgcctgcctctccctgtgatcgtcttccgccctgacttctgaatcatcatcagaatctggcagatgaccgtcggccaaatcatccctttttatgaactcagctttagctttatacttggcaggtagagatacctgtctcagcgtgtcttcacttttaacgatggttttagtttctcagtatgttttgtatgcaagttggaaataaatgaacgtcgtgatctggatgaaacatgccccagtcggcggactggaggcaaagaaggggtaaacatggtgtcctgtccatgtgcggccgcgtgggtcgaccccaa

SEQ ID NO: 156139 - DNA, 720 bp, Homo sapiens
aacactgaccctgccccccaaataccataaattcccactaggcctaagactcccctgtcaccccacttgtgccccagcctgtgcctaggtaaagttgggggtccctgaaaagtccctcagacccccagtctgggagaaacagagctggaacagaagaaacccccagtccccatggcatcaggctggactggaggaagaaacggtggctgggaaaagtccctgaggggaaaggaaaggagggttttctcccaagaggggtttccgtgatgggttttgaaggacgaataggagttctctgggggaaagaaaagagggtggaaattgcaaaaacagttctagcctgggagtcaggaaaactcattcaacaaatattccctgaagaagcttgtttccttcacatgcctgggccattgctggggaaccctaaacacacacactcacacacggaggtcttgaacagaaagactcctaaggaatcttttgggaaataacttggctctctcaggcagctcgacttccccatttctttccagccatccaaaaatcttccagatcaccctcaccccaggtcacagatcacttcccctttgggctctatgggttacaaccctgaatcatccatccacccgacccctaccctcagccatgtcatggttcgaaattcacatgtgctccacagtccatataacaatcacataagcttatccctggctacaaccc

SEQ ID NO: 156140 - DNA, 1350 bp, Homo sapiens
ccgggcaggtatgtttgtatgtgtgtgcggtttttgaaaaaacaaaacctggaagcatctcaagtgcctaccagcaggaggatggctacactgccatacgttttcacaatggactatgcataacaatacttccccacagccacacatggcaacgtcaagaagtctctgctgagtggaaaagcaagtctcaaaagattgcacagagtatgctgctcctgtttgttttatatagtacaaaaacaaccaaaactaaacaaaacattgtttaggcagtcatatatatgtgatcaaactactttcagaaagagcaaagggataataaacataaaattcattttttttttttttgagatggagtctcgctctgtcgcccaggctggaatgcagtggcgcaatctcggctcgctgcaactccgcctcccgggttcatgccattatcctgcctcagcctcctgagtagctgggactataagcgcccaccaccatgcccggcgaatttttttgtatttttagtagagacaggtttcaccgtgttagccaggatggtctcgatctcctgaccttgtgatctgcctgcctcgacctcccaaagtgctgggattacagatgtgagccaccacgcctggcacataaaattcaaaccagaggttacctggagggagagaggcagggaggagcacgtggatagacatatattcagattattagatatcaggtttacagatactcattttattaagaaggaattaatgaggtccgacacattatagaattgagggtcacgcatctaccaaatatgacatgaagggttttgattacctaacaatggacagtccagaaagcacagggtcaaaagatgtagatgggccatcagttaaaaagacaggcactcaggtccagctctaggaagagaaataaactaacagatacctatgcaggcattggcaaagcaaagagactttcctttcctttgttgagctgaaggcgagggtggtgaattcctgtttgtttttggatccctgccttgccttcacaccagggacccagtgtgtggtcccacgttccttagatacgtatgcctggtcagggtactagtctcaattaaaagcaactgcaacatcagtcccaatccatagtgcccacggccaacatagaggctgagggtgaagctaagaagaaaaagaggcgcgagctaaccctaaagagcacagtggcactcctccgtggcctctgctccaacccaggtgtgctccgcgaggccacaggtgagactccctcagaggcccgttcctaatggggtctacaaagaatgcacaagggaggctcagagacatttacagttaggctcaa

SEQ ID NO: 156141 - DNA, 344 bp, Homo sapiens
  misc_feature (1)...(344): n = a,t,c or g
ctgtctcagcctcctgagtagctgatattacagncgcatgtcaccacgcccggctaatttttgtatttttagtagagacagggtttcatcatattggtgaggctggtctcgaactcctgaccttaggtgatccacccgcctcggcctcacaaggtgctgggattacaggagtaagccagcgtggccagtctctgtttgcctttttaatgtcatctacttcattttgtaagtagggtatcaaggaaataattatcaaggtatagtttgggaaaaggtgagcaaatccttaacacagctggcccaaggttttatttggtaggtctaaatcttgaccttatggctat

SEQ ID NO: 156142 - DNA, 983 bp, Homo sapiens
caggctggagtgcaatggcatgatcttggctcactgcaacctccacttccagggctcaagcaattctcctgcctcagcctcccaagtagctgggattacaggcgtgtgccaccccgcctggctaatttttgtattttttagtagagacagagtttcatcatgttggccaggctgatcttgaactccggacctcaggcaatctgcccacctcggcctcccaaagtgctgggattacaggtgtgagccaccatgcctagcsaaaaagacgactcttgaaacacatttttccaatttgcagctatactttttcacacctttggatttcactttgtctgaagcagtgcatttagagagagattgcaaacccagtccattagattctattgttcttttctcctatgctgcttaatagtctacatccaggtttatcccctctcactcagaaggcaaaatattaagcctttaaattagagtttccaaaagtatgaacatacatcctttcatttggtcctcacaacagccctgtgaggcaggcaggcaggcatcatggttccagaatgcagaggacagagtcctaagttggttaagctggaaaccaaatccatgtcctctgtctcctggtttagtgctcctcccactccatgagatgaacagcactcactgtaatgaacaaaacagcctttctgcttagaatagatgaaatgtcctttgggcttgcacacaggtgattttaagtagaaaccttgctagaaagcttggaagaaaaacacacctgagctcagttcagcatcagaatcagcatcagagggatgaacaggaaagaacatggacatctttgacaagggtttctgcttatgttcttgattctcacccagatcatggttgagtgctgtaactttaaagcagcaaagtccagtaggagggaaggcatttaaaggactttctcctcgtgccgaattcctgcagcgcgcatctatttctat

SEQ ID NO: 156143 - DNA, 1297 bp, Homo sapiens
  misc_feature (1)...(1297): n = a,t,c or g
gaacggctccggtatttccgggtcgagcacctggatcagcggctgaaagctgcagagaacaagttttcttatgtgcctcatgacctggctcaaatgcggcttctggtgcctggagaagttcatcaaattccttaataggaatgcctacatcatgattgccatctacggcaccaatttctgcacctcggccaggaatgccttcttcctgctcatgagaaacatcatcagagtggctgtcctggataaagttactgacttcctcttcctgttgggcaaacttctgatcgttggtagtgtggggatcctggctttcttcttcttcacccaccgtatcaggatcgtgcaggatacagcaccacccctcaattattactgggttcctatactgacggtgatcgttggctcctacttgattgcacacggtttcttcagcgtctatggcatgtgtgtggacacgctgttcctctgcttcttggaggacctggagaggaatgacggctcggccgagaggccttacttcatgtcttccaccctcaagaaactcttgaacaagaccaacaagaaggcagcggagtcctgaaggccccgtgctccccacctcttcaaggagtctcatgccgcagggtgcttcagtagctgggtctgttccccccagccccttgggttccacctgaaagtcctattcacttgccgctttggacccttccccatggaggccagattcccaccagttttttgggacgttggagagttttgggggcatctccttcttatgcccaagggggcgcttgggagttttcaatggctgcccctaccagactgcgaagaaacaagtaaaagacccattggggccctcttgatgtctggggatggcacgtgggcccgaccctcccacaagctcccctcatgcttccctgtcccccgcttacacgacaacgggccagacccacgggaaggacggtgtttgtgtcttagggaacctgctggccacagttgaacacccacggtttattccatgccctgcttccggccagggacttgaacccctttcttccacacctggaacagttgggttcaaggggccaccaggaaggcattttcttttatttatttatttatttttttaaacctggggacatggcatttaaagggtctattagctttctttccgtctgtctcaacagctgagatggggccgccaaggagtgcctttccttttgctccctcctanctgggactgacgggtgggagtgtgtgtgcccaggtggaggtgtctcctggctgggaaggagggaat

SEQ ID NO: 156144 - DNA, 1776 bp, Homo sapiens
ccgactgaggcacgagcgggtgacgctgggcctgcagcgcggagcagaaagcagaacccgcagagtcctccctgctgctgtgtggacgacacgtgggcacaggcagaagtgggccctgtgaccagctgcactggtttcgtggaaggaagctccaggactggcgggatgggctcagcctgtatcaaagtcaccaaatactttctcttcctcttcaacttgatcttctttatcctgggcgcagtgatcctgggcttcggggtgtggatcctggccgacaagagcagtttcatctctgtcctgcaaacctcctccagctcgcttaggatgggggcctatgtcttcatcggcgtgggggcagtcactatgctcatgggcttcctgggctgcatcggcgccgtcaacgaggtccgctgcctgctggggctgtactttgctttcctgctcctgatcctcattgcccaggtgacggccggggccctcttctacttcaacatgggcaagctgaagcaggagatgggcggcatcgtgactgagctcattcgagactacaacagcagtcgcgaggacagcctgcaggatgcctgggactacgtgcaggctcaggtgaagtgctgcggctgggtcagcttctacaactggacagacaacgctgagctcatgaatcgccctgaggtcacctacccctgttcctgcgaagtcaagggggaagaggacaacagcctttctgtgaggaagggcttctgcgaggcccccggcaacaggacccagagtggcaaccaccctgaggactggcctgtgtaccaggagggctgcatggagaaggtgcaggcgtggctgcaggagaacctgggcatcatcctcggcgtgggcgtgggtgtggccatcatcgagctcctggggatggtcctgtccatctgcttgtgccggcacgtccattccgaagactacagcaaggtccccaagtactgaggcagctgctatccccatctccctgcctggcccccaacctcagggctcccaggggtctccctggctccctcctccaggcctgcctcccacttcactgcgaagaccctcttgcccaccctgactgaaagtagggggctttctggggcctagcgatctctcctggcctatccgctgccagccttgagccctggctgttctgtggttcctctgctcaccgcccatcagggttctcttatcaactcagagaaaaatgctccccacagcgtccctggcgcaggtgggctggacttctacctgccctcaagggtgtgtatattgtataggggcaactgtatgaaaaattggggaggagggggccgggcgcggtgctcacgcctgtaatcccagcactttgggaggccgaggcgggtggatcacgaggtcaggagatcgagaccatcctggctaacatggtgaaaccccgtctctactaaaaatacaaaaaaaatttagccgggcgcggtggcgggcacctgtagtcccagctacttgggaggctgaggcaggagaatggtgtgaacccgggagcggaggttgcagtgagctgagatcgtgctactgcactccagcctgggggacagaaagagactccgtctcaattccttgatagctggctggcctccgttttgctagattttcatacactttaatggtttctgttttattgtctttgagaatatgatgtcagacattttcggatgggctgtttagatgttatataatccacaaaaggttcattgagctaaaaaagtggagacttgttttttt

SEQ ID NO: 156145 - DNA, 524 bp, Homo sapiens
tttttttttaaaggtggctcaaaattttacctttttttttttttttttgagacggagtctcgtctctgtcgcccaggccggactgcggactgcagtggcgcaatctcggctcactgcaagctccgcttcccgggttcacgccgttctcctgcctcagcctcccgagtagctgggacgcctcccgagtagctgggactacaggcgcccgcactgcgcccggctaatttttttttttttgtatttttagtagagacggggtttcaccttgttagccaggatggtctcgatctcctgacctcatgatccacctgcctcggcctcccaaagtgctgggattacaggcgtgacgaccgcgcccggccaaaattttaccttttaagttttgtttcaaataaaattgagtctgttcacttaagagtgagtctaaaccagtttctctaaagagtaactgggtgcagatttaaatgtgctttaaataaagattttaaaatgctttatccaaaagagaaaactatagttaggaa

SEQ ID NO: 156146 - DNA, 2059 bp, Homo sapiens
aaaaaaacaagtctccacttttttagctcaatgaaccttttgtggattatataacatctaaacagcccatccgaaaatgtctgacatcatattctcaaagacaataaaacagaaaccattaaagtgtatgaaaatctagcaaaacggaggccagccagctatcaaggaagcaaagcacttacttacctacatgcttctttggctctaaaaaaggtctcttaatgatgaatgaaatccctgctttgttctccaaaatccatttcagggttgcaagatcatagttctcggggtgtttaaaggcaacaccttccgtaagcccctgcactaccacagccgactggtctcgcagcatcttctcatatggtacaggtaccactgtggatttgcctaaagctttcccatagcaaaagcagaaatagtcctcaactgtttttctgagtgtttcaatttctgagacggagtctctttctgtcccccaggctggagtgcagtagcacgatctcagctcactgcaacctccgctcccgggttcacaccattctcctgcctcagcctcccaagtagctgggactacaggtgcccgccaccgcgcccggctaaattttttttgtatttttagtagagacggggtttcaccatgttagccaggatggtctcgatctcctgacctcgtgatccacccgcctcggcctcccaaagtgctgggattacaggcgtgagccaccgcgcccggccccctcctccccaatttttcatacagttgcccctatacaatatacacacccttgagggcaggtagaagtccagcccacctgcgccagggacgctgtggggagcatttttctctgagttgctaagagaaccctgatgggcggtgagcagaggaaccacagaacagccagggctcaaggctggcagcggataggccaggagagatcgctaggccccagaaagccccctactttcagtcagggtgggcaagagggtcttcgcagtgaagtgggaggcaggcctggaggagggagccagggagacccctgggagccctgaggttgggggccaggcagggagatggggatagcagctgcctcagtacttggggaccttgctgtagtcttcggaatgcacgtgccggcacaagcagatggacaggaccatccccaggagctcgaccatggccacacccacgcccacgccgaggatgatgcccaggttctcctgcagccacgcctgcaccttctccatgcagccctcctggtacacaggccagtcctcagggtggttgccactctgggtcctgttgccgggggcctcgcagaagcccttcctcacagaaaggctgttgtcctcttcccccttgacttcgcaggaacaggggtaggtgacctcagggcgattcatgagctcagcgttgtctgtccagttgtagaagctgacccagccgcagcacttcacctgagcctgcacgtagtcccaggcatcctgcaggctgtcctcgcgactgctgttgtagtctcgaatgagctcagtcacgatgccacccatctcctgcttcagcttgcccatgttgaagtagaagagggccccggccgtcacctgggcaatgaggatcaggagcaggaaagcaaagtacagccccagcaggcagcggacctcgttgacggcgccgatgcagcccaggaagcccatgagcatagtgactgcccccacgccgatgaagacataggcccccatcctaagcgagctggaggaggtttgcaggacagagatgaaactgctcttgtcggccaggatccacaccccgaagcccaggatcactgcgcccaggataaagaagatcaagttgaagaggaagagaaagtatttggtgactttgatacaggctgagcccatcccgccagtcctggagcttccttccacgaaaccagtgcagctggtcacagggcccacttctgcctgtgcccacgtgtcgtccacacagcagcagggaggactctgcgggttctgctttctgctccgcgctgcaggcccagcgtcacccgctcgtgcctcagtcggc

SEQ ID NO: 156147 - DNA, 1293 bp, Homo sapiens
atggcatcctcaatctgacgtccaggctgaagtgcagtggcgtgatcttggcttactgcaaagctccgcctccccgggttcacgctattctcctgcctcagcctcctcagtagctgggactacaggcgcccgccaccacgccctgggtaatttttgtatttttagtagagacggggtttcaccgtgttagccaggatggtctcgatctcctgactccatgatccacccgccttggcctcccaaagtgctgggattacaggcgtgagccaccgcacccggccaggggctgacctttaaccgagggtccagaagcctcgcgcaagcctcgggggctgaaatcacatgtgcaacatgaagtcacttcccacggggcagaccaggcttaacaagggcaggcggctgggtcacttcccagatcactggaggtggaaggagacacccggcctctagtgtttccatgggaacttctgtggggctttaaaagcagggagggcccacctggatggacaggggagaagatgaggccatgagctggcaagggcctggtgccgaccacgggagatcacggcacctgagcagcaatgcgggttcgaccaatttttaaatttataagcatctgtgttgtagcttaatgactttaacagttttttcctcaatcatatcagaatgtagtttgatgattatctgggtgaagagttttggtggtcaacgtatggctaagaaagttatatattaaagatgaagggttttggccgggtgcggtggctcacgcctgtaatcccagcactttgggaggccaaggcgggcggatcacgaggtcaggagatcgagaccatcctggctaacacggtgaaaccctgtctctactaaagatacaacaaaaattagccgaaattagccgggcgcggtggcgggcgcctgtagtcccagctactcgggaggctgaggcaggagaatggcgtgaacccgggaagcagagcttgcagtgagccgagattgtgccactgcagtccgcagtccagcctgggcgacagagcgagactctgtctcaaaaaaaaaaaaaaaaagaagaagaagaagaagaagaagaagaagaggaggaggaggaggaggaggaggaggaggaggaggaggaagaagaagaagaagaagaagaagaagaagaagaagaagaagaagaagaagaagaagaagaagaagaagaagaagaaggagaagaagaagaaggagaagaggaagaagatcaactagacacaatgttatgggactcatcaacaaacctcaccaacacag

SEQ ID NO: 156148 - DNA, 666 bp, Homo sapiens
atgatcagccccttcatcaatgagaacaccaggcggaagttcctcatctacagtggcagcaactaccagggacccggaggccttgtggactatctggatagagaagtgatccctgacttccttgggggagagagtgtgctcggactgaattacctgcgctcttttcggctggcgggctggcgggcggtgctggtgatgttaactttttatctccaggtatggggggacacagataggggccaggccagccccttttcatccacagtcaaactttctgggcttggactaagccccttttttgacccctgttcctttagcccgcccacgggaaggtgtcctggttgcgacaataaactgtatggtcagttggccaatgtaaagaaagtgagaacaggatataagtatattgggatgggaagaaaggcaagaaataacgtagaagaaagtcaagaaataacgaccgcctggctagccctcaccctggcgctggccttcctcctgctgatcagcactgcagcaaacctgtccttgctcctgtccagagcagagaggaaccggcgcctgcatggggactatgcataccacccgctgcaggagatgaacggggagcctctggccgcagagaaggagcagccagggggcgcccacaaccccttcaaggactga

SEQ ID NO: 156149 - DNA, 2216 bp, Homo sapiens
  misc_feature (1)...(2216): n = a,t,c or g
atggcgacctccacgggtcgctggcttctcctccggcttgcactattcggcttcctctgggaagcgtccggcggcctcgactcgggggcctcccgcgacgacgacttgctactgccctatccacgcgcgcgcgcgcgcctcccccgggactgcacacgggtgcgcgccggcaaccgcgagcacgagagttggcctccgcctcccgcgactcccggcgccggcggtctggccgtgcgcaccttcgtgtcgcacttcagggaccgcgcggtggccggccacctgacgcgggccgttgagcccctgcgcaccttctcggtgctggagcccggtggacccggcggctgcgcggcgagacgacgcgccaccgtggaggagacggcgcgggcggccgactgccgtgtcgcccagaacggcggcttcttccgcatgaactcgggcgagtgcctggggaacgtggtgagcgacgagcggcgggtgagcagctccggggggctgcagaacgcgcagttcgggatccgccgcgacgggaccctggtcaccgggtacctgtctgaggaggaggtgctggacactgagaacccatttgtgcagctgctgagtggggtcgtgtggctgattcgtaatggaagcatctacatcaacgagagccaagccacagagtgtgacgagacacaggagacaggttcctttagcaaatttgtgaatgtgatatcagccaggacggccattggccacgaccggaaagggcagctggtgctctttcatgcagacggccatacggagcagcgtggcatcaacctgtgggaaatggcggagttcctgctgaaacaggacgtggtcaacgccatcaacctggatgggggtggctctgccacctttgtgctcaacgggaccattggccagttacccgtcagatcactgccaggacaacatgtggcgctgtccccgccaagtgtccaccgtggtgtgtgtgcacgaaccccgctgccagccgcctgactgccacggccacgggacctgcgtgggacgggcactgccaatgcaccgggcacttctgggcggggtcccggctgtgatgagctggactgtggcccctcttaacttgcagcccagcacggactgtgcaacgggagtaccgggctgtccgctgttgattgccggatgggaccgggtccaactgcagtgaagagtgtccccttggctggcatgggccgggctgccagaggccttgtaagtgtgagcaccattgtccctgtgaccccaagactggcaactgcagcgtctccagagtaaagcagtgtctccagccacctgaagccaccctgagggcgggagaactctcctttttcaccaggaccgcctggctagccctcaccctggcgctggccttcctcctgctgatcagcattgcagcaaacctgtccttgctcctgtccagagcagagaggaaccggcgcctgcatggggactatgcataccacccgctgcaggagatgaacggggagcctctggccgcagagaaggagcagccagggggcgcccacaaccccttcaaggactgaagcctcaagctgcccggggtggcacgtcgcgaaagcttgtttccccacggtctggcttctgcaggggaaatttcaaggccactggcgtggaccatctgggtgtcctcagcccctgtggggcagccaagttcctgatagcacttgtgcctcagcccctcacctggccacctgccagggcacctgcaaccctagcaataccatgctcgctggagaggctcagctgcctgcttttcgccctgcctgtgtctgctgcccgaaaaagcccgttgcccccggggaaggntgccggcactgcccaaagagtctcccctccctccctggggaaggggctgcccaacgaaccagactcagtgaccacgtcatgacagaacagcacatccctggccagcacccctgggctggagtgggttaaagggacgaagtcctgccttccctggctgtgaacacgggacccctttttctacagacctcatcactggatttgccaactagaattcgatttcctgtcatagtgattgcttcttgtaagaagggatggggggatgagatcattgtttacagacctgttttgtcatcctgctgccaagaagttttttaatcacttgaataaattgatataataaaaggagccaccaggtgggtgtgtggattctg

SEQ ID NO: 156150 - DNA, 2677 bp, Homo sapiens
aagcgctaccccagaaggcggtgaatggaccctccctctccgttctttcctccatggttcctgtgctggagcaggtgggtgggaacactgcccctctcctctgggcaggtctgccttctccttcccacaggaggccaagctggggttgtggggaatgggcacagccaggtttggtgctgaaccccattcacccctaggaatgccatgggaggaaaaagatcccacaggctagggcccctggaagacaggaaacagcatgtgcatgtgggctgggcaggggtcagggatgtgatgagggaaaaaagtgctgccagccagtgcccatccctggaagagggggtgtgggctcctttggagataagtcccaaccctgaggctcccaggcagaccctggcctgcatcccccagcagtcaaaggtgctgggaatgtgtgcgagtgtgtgcctctgtccatgtgggggtgaaatgcaatggggatggactgtggcatccacacctgcccggatggttggcattttggcaaattcaggcagagagggagagggtttgagggccaagtttccctagctaaatgcaaatccagatgacttgcactggaaactcaggacacacacatggtggacgctacagggcacctttctgccctctgcggtagcatcaggaggggagagtggaattgggggccagtgtttctgttctgctagaaagaatcttgccagctgcagcgaggaggtgaggcctgggcaggagcggacagcccttgcccggatggggctgggcctccaagcccttggctatgacagaaatggggaaacgatggctgcctaagcccttctttgttcctaacctatagatggttaaactgaggcgagaggcagtcggagatacgccggcagtcatatcagcactcaggccggaactcactcttgggccacaagggaacgtttggggaagaatccctctggttgggattcttcctatctatgcagggcctgggattgacggtggtgcatcccagtctgacgcgtggccccctccatgccccatgatcccgtgaacatccagctctaagaatcttgcaggaagaaaactgattgatgaaaaccacaggcccctgagccttgcacccacctgctcagggtgagcttttttgtgattattttaaagatccaagctggtcagaagggccacagtcacctcccctgaccaggctggcgcctcatccccaaacccagtgcacagagctctcaggagggagaaggggcagtgcagtccttgaagagtgtgtccccacgcctgcctctgctcaccttgcagcttcacctgcagaggctggaacagcaggagtgtggaggtgacggcatcatttccaagcacaggactgctgggcccacgttagctctcgatgagcttgctgatgagttaatgcaaagcagggaggtgtccccctggtgaggactgcccgaggccactacccggctgctcattgagccctctggagaggaaactctgtttttcctcagcctgaggcccggcttctttcctgggagggttgacagcaaaggcttcaggctgctccctaagcctgaggcctccagccacatacaaggtcatggtctctgggaaaagctttaggtgcccgctcggcgtgcagggggtggggtgtgctttaaaagtgctctcccacctccaatctctctgataaaagccctccagcaaagccagcaagagggagggataacagtaaactctgccttcagccactattggagaacttccatttaaatgacacgcccccaagcatttatgcaatgctcagggctttctttgcaaaattcactaacaccataagaaacagccaatgcaattaaagcctaaggtgggcctgggagcctagaagggaccctgaggaggcctggctctccaccctcaagcctaggggttggatctggcaaaactgaagtgaattctcagaattgcaggcatctgggcagggaaggggttagctaaagaacatgtttcagggtttttggctttgtgggtgttttgtattttaaagagccacgctggtgcagaaagaccagggccctatcagcttcccctcctcctcaagaacctcgggccttcggaaggcctttgacccggtcctggggtttcagacccactttgtgctgccttacacttggtgttgggatctgtgcctggcttttctttttgagagccggacccctttgccctccaggggaaaagttaaccatgtggctttttttctttctgcagttcctttctgtagcatcctccttactgcttccgagccctgggcatcctgcatgaggcggagttcatctcacacctctgagatgcctgtgccagcatggctggagcccctggctggcagagcgggcaacttggtcctgcacattaggatggggaagctcctaattccagctgtctttctgccgccatcccccaacaccctcaggaaggggcacctttctgggcctgcctaaaggagggagcatgggtgtgagggctgcccaggcaggtgggagtacggagccttgtggggcagggtggaggcgtccaggcccttcctaggagcttccgcccaactccccgtaagtgatggcaggtctcaggaggggcccgcctcctcatatgggagggagaagccccc

SEQ ID NO: 156151 - DNA, 1308 bp, Homo sapiens
tttttttttttttttttttgagacagagtcttactcagtcatctaggctggagtgcaggcaacctctgcctcctgagttcaagcgattgtcctgcctcagcctccccagtagctgggactacaggtgtgcgccagcacactcggctaatttttgtatttttagtaaagacagggtttcaccatgttgaccaggctggtctcaaactcctggcagcaagcgaactgcccaccttggcctcccaaagtgggattacaggcgtgagccaccacacccagcctatttatcattattatttttgtagagacagagtttcaccatgttgcccaggctggcgtcaaactcctagcctcaagtgatcctcccgcctcagcctcccaaagcagtggaattacagccatgagccactatacccagctctttttaacgagacttttttctttaagtaaataaccgaagtgacacacatgtgtcatcaaaaacaacaggaaggtggttccagaatgaagtcaggaaatgatagtggaaataaaactagatttgaggtcagagaactgcagttggttcttcttaactgagagtcgcgtcctcatctgtaaaacagagagaactctcccgacctgacagaatttttgcaagagcaaaagtaaggtatgcaagatagccacacgcagggccataaatgcctaggttattatcacgtacactatagggaaaggatgttttcttcattatggcccagcatgctgaggaccttccaggcccctgtggcaaagaagagctcattaaaggcctcacttacgcccacgactggggagtgcttgccctcgagagcctggtgggatgggcatgagatcacccgtgagtagaacagagttcacgccacaggcctgaagctgctctccttaggaattctggctggcatctgggaaccccagatttcagaagggtccccaccatcccctacttgatgagagtagttcactgggccgaaattatttgtacaaacaatatggttcttgctcagcacctgctttccttcccagagcctagaattttggtacctgccaggcagaggtgcccacatgactggcccctagcaaaacaccatgggcactgaatttttaatgagcttccctgctagacaacatctcctacatgttgtcacaactcattgctaaagacattaagtgcatcctgtaggaaccccctggaagaggactctggaagctccagcctggcctcccccgacttcaaaacaaggtgctttttccctttgctaattttgctttgaattccctcgtgccaag

SEQ ID NO: 156152 - DNA, 6741 bp, Homo sapiens; identical to SEQ ID NO: 119941
  misc_feature (1)...(6741): n = a,t,c or g

SEQ ID NO: 156153 - DNA, 511 bp, Homo sapiens
  misc_feature (1)...(511): n = a,t,c or g
tttcgtgcgcattgaccgcctagccctgctgaatgagattcaggcggccagcccactggagcccaaggagcttgaggagctgcgtgacaagaatgagagccttaccatgcggctgcatgaaaccctgaagcagtgccaggacctgaagacagagaagagccagatggatcgcaaaatcaaccagctttcggaggagaatggagacctttcctttaagctgcgggagtttgccagtcatctgcagcagctacaggatgccctcaatgagctgacggaggagcacagcaaggccactcaggagtggctagagaagcaggcccagctggagaaggagctcagcgcagccctgcaggacaagaaatgccttgaagagaagaacgaaatccttcagggaaaactttcacagctggaagaacacttgtcccagctgcaggataacccaccccaggagaagggcgaggcgctgggtgatgtcttgncgctggaaaccttgaagccagaggcagccacc

SEQ ID NO: 156154 - DNA, 577 bp, Homo sapiens
gatttggggctagtcactttatttctttgcacttcatctccaaaatgggccgataaacactctgcattccctacctcaaagcattatgaatagactccatgaaaaaaatgcgtagaagagtcttgacaacatcagcaccaccttgtgagggcttctgtcgacaaggcccatttcttgcagacatacactttaaggacctttgcaaagcagttgggaatacatggatgtgccgtgggatctgagggcttcggaagggaatgggaagcttctgtacagtgccagggactgtacactgcaacagattcactctgtcttccagaagctagatgtggaagagccagacagcgccaactcatcgttctacagcacgcggtctgctcctgcttcccaggctagcctgcgagccacctcctctactcagtctctagctcgcctgggttctcccgattatggcaactcagccctgctcagcttgcctggctaccgccccacccactcgcagttctgctcgtcgttcccaggccggggtgtccagtggggcccctccaggtgaggggactacagggacttactatac

SEQ ID NO: 156155 - DNA, 515 bp, Homo sapiens
  misc_feature (1)...(515): n = a,t,c or g
ggagaaagccaaaacacattatgatgcccagaagcagcagaaccaagagctgcaggagcagctgcggagcctggagcagctgcatgaaggaaaacaaagagctgcgagctgaagctgaacggctgggccatgagctacagcaggctgggctgaagaccaaggaggctgaacagacctgccgccaccttactgcccaggtgcgcagcctcggaggcacaggtaagaatttggctggcagactcacctcactcctattccactggacccctgtgccctctcctcctaggccactgctgccttaggcttttcttcactctccccctggccctctccttctcaaggttgcccatgcaagaccaagcagcttccgagacctgggcaaattccaggtggcaacttgatgcttttaaagagccgggagccccagtctaagccccagctggacttgagtattgacagcctggatctgaagctgcgaggaggggaccccantcagtatcancaggttaggaggg

SEQ ID NO: 156156 - DNA, 727 bp, Homo sapiens
  misc_feature (1)...(727): n = a,t,c or g
tcgaagaacagacaagtnnnctcagatggggacgtgtttgctgtgaagcagccttgttcatctggtggggatgggacatctggggctgggcattgccactatgaggagctattaggagaagccaggggagtggactgaaaggaaggcccaggtcaagtgctttccttggtacctctgaaaaatcagagagatgggctgcttgacctcatctgcttgtagtaaggatgggaaatggtctctttcaaaaagggctggacaaaatgccttctagcgtgaaggactgtacctcagcaggtttcctttccatagcaagctgcctcgtacccagccagacggcaccagcgtccctggagaaccagcctcacctatctcccagcgcctgccccccaaggtagaatccctggagagtctctacttcactcccatccctgctcggagtcaggcccccctggagagcagcctggactccctgggagacgtcttcctggactcgggtcgtaagacccgctccgctcgtcggcgcaccacgcagatcatcaacatcaccatgaccaaggtcaggctgctgggacaggggctgcagggcagcaattcccacttcctctcaagggcatctttgcactgggcactcagtcaggagcagggagggatgagcagccagtccatgttacagtgggaaagctgagaggtcttaaaaagggcagtgacttggttaagggcacttctg

SEQ ID NO: 156157 - DNA, 697 bp, Homo sapiens
caagagctgcaggagcagctgcggagcctggagcagctgcagaaggaaaacaaagagctgcgagctgaagctgaacggctgggccatgagctacagcaggctgggctgaagaccaaggaggctgaacagacctgccgccaccttactgcccaggtgcgcagcctggaggcacaggttgcccatgcagaccagcagcttcgagacctgggcaaattccaggtggcaactgatgctttaaagagccgtgagccccaggctaagccccagctggacttgagtattgacagcctggatctgagctgcgaggaggggaccccactcagtatcaccaggtcaggaggcagccttcctccctatgtctgtttatggagtgcctgctgtttatcaggctgtatcctagtgagataaataagatgtgatctaaatttattcttagagaagaataaagaaaaaccgggtattataccagatatctattttagggcacagtttggaattaaaaagccaattggtcaagaaaggcttccgttggaagctatcgctccctgctgagtcttgaaagcatccataggtgtgtgtgccaggttgacgagaagagcagtgttgaacagaggctgtgaaagagcctgactaagctgagatgttgaggccaggaaggccccattgggagaccgggctattaagactttgattccct

SEQ ID NO: 156158 - DNA, 6123 bp, Homo sapiens
  misc_feature (1)...(6123): n = a,t,c or g
ccgagtaaactcagcagccttggggaagtagtaagcaggttacattatgactttattgtgccttagaactaggtctagagaatcaggtccctcatgctcccagttccatggtttctgcttttttctaggccagggcaaaaggagatcttggtaacaagatgaatgggcccccatgtttgctgaatgtttaatgaagggcttgtgtggtaaatctggtgcctgttccccctctctgttcacatgggtctcatttactcccagaaatgccttgaagagaagaacgaaatccttcagggaaaactttcacagctggaagaacacttgtcccagctgcaggataacccaccccaggagaagggcgaggtgctgggtgatgtcttgcagctggaaaccttgaagcaagaggcagccactcttgctgcaaacaacacacagctccaagccagggtagagatgctggagactgagcgaggccagcaggaagccaagctgcttgctgagcggggccacttcgaagaagaaaagcagcagctgtctagcctgatcactgacctgcagagctccatctccaacctcagccaggccaaggaagagctggagcaggcctcccaggctcatggggcccggttgactgcccaggtggcctctctgacctctgagctcaccacactcaatgccaccatccagcaacaggatcaagaactggctggcctgaagcagcaggccaaagagaagcaggcccagctagcacagaccctccaacagcaagaacaggcctcccagngcctccgccaccaggtggagcagctaagcagtagcctgaagcagaaggagcagcagttgaaggaggtagcggagaagcaggaggcaactaggcaggaccatgcccagcaactggccactgctgcagaggagcgagaggcctccttaagggagcgggatgcggctctcaagcagctggaggcactggagaaggagaaggctgccaagctggagattctgcagcagcaacttcaggtggctaatgaagcccgggacagtgcccagacctcagtgacacaggcccagcgggagaaggcagagctgagccggaaggtggaggaactccaggcctgtgttgagacagcccgccaggaacagcatgaggcccaggcccaggttgcagagctagagttgcagctgcggtctgagcagcaaaaagcaactgagaaagaaagggtggcccaggagaaggaccagctccaggagcagctccaggccctcaaagagtccttgaaggtcaccaagggcagccttgaagaggagaagcgcagggctgcagatgccctggaagagcagcagcgttgtatctctgagctgaaggcagagacccgaagcctggtggagcagcataagcgggaacgaaaggagctggaagaagagagggctgggcgcaaggggctggaggctcgattacagcagcttggggaggcccatcaggctgagactgaagtcctgcggcgggagctggcagaggccatggctgcccagcacacagctgagagtgagtgtgagcagctcgtcaaagaagtagctgcctggcgtgagcggtatgaggatagccagcaagaggaggcacagtatggcgccatgttccaggaacagctgatgactttgaaggaggaatgtgagaaggcccgccaggagctgcaggaggcaaaggagaaggtggcaggcatagaatcccacagcgagctccagataagccggcagcagaacgaactagctgagctccatgccaacctggccagagcactccagcaggtccaagagaaggaagtcagggcccagaagcttgcagatgacctctccactctgcaggaaaagatggctgccaccagcaaagaggtggcccgcttggagaccttggtgcgcaaggcaggtgagcagcaggaaacagcctcccgggagttagtcaaggagcctgcgagggcaggagacagacagcccgagtggctggaagagcaacagggacgccagttctgcagcacacaggcagcgctgcaggctatggagcgggaggcagagcagatgggcaatgagctggaacggctgcgggccgcgctgatggagagccaggggcagcagcaggaggagcgtgggcagcaggaaagggaggtggcgcggctgacccaggagcggggccgtgcccaggctgaccttgccctggagaaggcggccagagcagagcttgagatgcggctgcagaacgccctcaacgagcagcgtgtggagttcgctaccctgcaagaggcactggctcatgccctgacggaaaaggaaggcaaggaccaggagttggccaagcttcgtggtctggaggcagcccagataaaagagctggaggaacttcggcaaaccgtgaagcaactgaaggaacagctggctaagaaagaaaaggagcacgcatctggctcaggagcccaatctgaggctgctggcaggacagagccaacaggccccaagctggaggcactgcgggcagaggtgagcaagctggaacagcaatgccagaagcagcaggagcaggctgacagcctggaacgcagcctcgaggctgagcgggcctcccgggctgagcgggacagtgctctggagactctgcagggccagttagaggagaaggcccaggagctagggcacagtcagagtgccttagcctcggcccaacgggagttggctgccttccgcaccaaggtacaagaccacagcaaggctgaagatgagtggaaggcccaggtggcccggggccggcaagaggctgagaggaaaaatagcctcatcagcagcttggaggaggaggtgtccatcctgaatcgccaggtcctggagaaggagggggagagcaaggagttgaagcggctggtgatggccgagtcagagaagagccagaagctggaggagaggctgcgcctgcttgcaggcagagacagccagcaacagtgccagagctgcagaacgcagctctgctctgcgggaggagctcgagcacaccagcacacaggccctggtgagtgagctgctgtcagctatagcacctctgccagcagctgcaggccgagcaggccgctgccgagaaacgccaccgtgaggagctggagcacagcaagcaggccgctgggggactgcgggcagagctgctgcgggcccagcgggagcttggggagctgattcctctgcggcagaaggtggcagagcaggagcgaacagctcagcagctgcgggcagagaaggccagctatgcagagcagctgagcatgctgaagaaggcgcatggcctgctggcagaggagaaccggtggctgggtgagcgggccaaccttggccggcagtttctggaagtggagttggaccaggcccgggagaagtatgtccaagagttggcagccgtacgtgctgatgctgatacccgtctggctgaggtgcagcgagaagcacagagcactgcccgggagctggaggtgatgactgccaagtatgagggtgccaaggtcaaggtcctggaggagaggcagcggttccaggaagagaggcagaaactcactgcccaggtggagcagctagaggtatttcagagagagcaaactaagcaggtggaagaactgagtaagaaactggctgactctgaccaagccagcaaggtgcagtagcagaagctgaaggctgtccaggctcagggaggcgagagccagcaggaggcccagcgcctccaggcccagctgaatgaactgcaagcccagttgagccagaaggagcaggcagctgagcactataagctgcagatggagaaagccaaaacacattatgatgccaagaagcagcagaaccaatagctgcaggagcagctgcggagcctggagcagctgcagaaggaaaacaaagagctgcgagctgaagctgaacggctgggccatgagctacagcaggctgggctgaagaccaaggaaggctgaacaagacctgccgccacctttacttgcccaggttgcgcagcttggaaggcacaaggttgcccatgcaagaccaagcagctttcgagacctgggcaaattccaggtggcaacttgatgctttaaagagccgtgagccccaggctaagccccagctggacttgagtattgacagcctggatctgagctgcgaggaggggaccccactcagtatcaccagcaagctgcctcgtacccagccagacggcaccagcgtccctggagaaccagcctcacctatctcccagcgcctgccccccaaggtagaatccctggagagtctctacttcactcccatccctgctcggagtcaggccccccctggagagcagcctggactccctgggagacgtcttccttggactcgggtcgtaagacccgctccgctcgtcggcgcaccacgcagatcattaacattcaccatgaccaagaaagctagatgtgggaagagccagacaggcgccaaacttatcgttctacagcaacgcggtctgctcctgcttcccaggctagcctgcgagccaccctcctctacttagtctctaactcgcctgggtttctcccgattatggcaactcagccctgctcagcttgcctggctaccgccccaccactcgcagttctgctcgtcgttcccaggccggggtgtccagtggggcccctccaggaaggaacagcttctacatgggcacttgccaggatgagcctgagcagctggatgactggaaccgcattgcagagctggcagcagcgcaattcggagttgtggcccccaaatctgaagaactggctatccccctgggagtccaggcctttccctgagcctgggcaccatcacagatgaggagatgaaaactggagacccccaagagaccctgcgccgagccaggcatgcagccaatccagatagccgagggcacgtggcatcaccacccggcagcagcgcaaaacgggtctcccttaggagccccaccagggccctgggaattccttgagtcttaaagaaggccaccagcatgtttcccacgccccatgactccccgaggaccgacttgaaggggcgcaaacagagcacttacttgaggcccagaagaaagcagctccagctttcttacttaaacaggcttgaccggcgccagtcgatggcctttcagcatccttcaaccacacccaagaagcttaggggaacagccttctgcggcggggagcctcaaagaaggccctgtccaaggcttcccccaacactcgcagtggaacccgccgttctccgcgcattgccaccaccacagccagcgccgccactgctgccgccattggtgccacccctcgagccaagggaacggcaaatcacctaaagggccaagtaccagtgagtggccccaccttgtgtccccgatgcttgccgtcacctggtcctccgcctactgtccctctcagtgccttctctcagcttcccaggccaaacagtagcctaacctcctagagacagtgatgtcttgcccccacccttgcctggttccttgttcttcacttgccgccttttccgaagtctccagggggccttgagcatggacagtgtgggcgctctcccctaccttgccctcccttttttccttaaaaagcaaaagtcactttctccatcacaaccaagatttgaaggcttggttttgatggctggggtcccttgggctctgtctatttcttcctcttagccttctggatctagcaagggacccataagaggagtaggcccctggttcctgctgtccctggtggctggggcccagccaggggccctcactttttaagttccaggactgggtttgacctggtgggagcccctgccagaaggatgctcttttcccaggacggatgggccctgtgttctcaggagtggggttgggggacagccttcagcagcagctcacaccctaccttccccagacttgcactggggtgggatttggagtgatgggaaggtttttaagggccggggatggatcttttctaaatgttattacttgtaaataaagtctatttttctcccgtgagtactgagttgacttgatcggtgtgggaaaaagaggaatatagg

SEQ ID NO: 156159 - DNA, 565 bp, Homo sapiens
  misc_feature (1)...(565): n = a,t,c or g
taattttggaccctnaagtaagcttaagtctaatttncaagctgtacgtaaatnaagatttgggtgcctaagaaanaatgtaactaacatataactttaactcaccatnaaatttgctaagaaccatgattttttggtttggttttgaagacagagtctggctgtgttgcccagtgctcactgcaacctcagtgctcactgcaacctccacttcccagggttcaagcaattctcatgcctcagcctcctgagttcctgggactacaggtgcataccaccacacccaggtaatctttggtatttttagtagagacagggtttcaccatgttggccaggctggactccaactccgggcctcaagcgatccacccgcctcagcctcccaaagtgctgggattgcacgtgtgaaccaccgcacccagccagatccatgatattttgaattcaacttagtctcaggcttccatatccccaaaatatccatctttacattggtacaagttctcttctgggataatgttcttcaacaaaaaacaactctctttggagcaaaacctcctctcc

SEQ ID NO: 156160 - DNA, 613 bp, Homo sapiens; identical to SEQ ID NO: 148326

SEQ ID NO: 156161 - DNA, 555 bp, Homo sapiens; identical to SEQ ID NO: 148327
  misc_feature (1)...(555): n = a,t,c or g

SEQ ID NO: 156162 - DNA, 776 bp, Homo sapiens; identical to SEQ ID NO: 148328
  misc_feature (1)...(776): n = a,t,c or g

SEQ ID NO: 156163 - DNA, 457 bp, Homo sapiens; identical to SEQ ID NO: 148329

SEQ ID NO: 156164 - DNA, 2035 bp, Homo sapiens; identical to SEQ ID NO: 148330

SEQ ID NO: 156165 - DNA, 471 bp, Homo sapiens
  misc_feature (1)...(471): n = a,t,c or g
agcgcccnnnattggaatcgagaccactagtcagagtggtggaattcggcgagcggagaggcccgcggggctcgcgggagtccaggggcagacgggatgggtctccgtgctgaaacccccggcgctccggcaacactgtgaagcatcctgtgtgtgtgtgaagcacccgccgtcagtcaagtatgcccggtgctttctctcagaactcatcaaaaagccctcgggaggctcggtcacaatctccgagagcacagccatcatctctcacggtaccacaggcctggtcacatgggacgccaccctctaccttgcagaatgggccatcgagaacccagcagccttcactaacagacgtgctgtattgcccagaagccatcgtgtcgctggtcggggtcctgcggaggctggctgcctgccaggagcacaagcgggctcctgaggtctacgtggcctttaccgtccgcaacccaa

SEQ ID NO: 156166 - DNA, 402 bp, Homo sapiens; identical to SEQ ID NO: 123677

SEQ ID NO: 156167 - DNA, 3159 bp, Homo sapiens
ctcctgctgtgggactgggtcatctgccagctctccaaggagctggcggaaaaccgctgcaatcagagcgaacccaggtcccggtcagcctgtgtggagattgctgcattcacctttaatatggctaaaatgttttccttcaatgacagtaatgctgccagaatccatcaagacacccaggaactgatgtgctttggcagatggtgctggaaagatgggattcccggcagcctttgcatcccttgctcacagcccatgagcatctccactgtccagcaggggaagaaagcagcatcatcccactattccaggggaggtgctaaatacgagggtgaggctgtcaagcggtccctggtggagtcctacactcacccaaacagcaacgagacagagcggagggagaacatcgataccgtcatgaactgcttcagcacagaagactttgactttgtgactctgtactacagagagccagataacgtgggacatcgattcgggccagaggcagagaagaggaagttgatgattcagcaaatcggcaggaccatcgtgtatctggtgggagccactgagaagcacagcctgcagagcacctcagcaccatggggtgaccaccgtgaagaagagacccaacgtcaacaagatcccttgaccaactacatcaagttcagggtctgggtcaagtttgatattgcgggctacggtggctttgggctgcccctacccaaattggggcaagaggaagccctttaccaggcactgaagaatgcgcaccctcacctccaggtctacaagaaggaggagtttccagaacacttccatctcgctaaacatgaccgggttctgccaatcgtgatttttcagagaattataatgtgtttcaacaaaggcagccatggctttgataatgtcctcatggacatgaacatcatattcagagctttcgggccagatttcaagaggaatcgcctggccgagccttttaacagcatccacatctacccattcgtgtctcctgggagtcacccccaaacccacaacggctccctggcagtcacccaggaaatgctcatgaactcttatgaccagcagccaggcagagagctgatcaaaacagcaaaagcaaagcagtgccccggcccagttctaaagccaaccttccttaatcacccagacccatcccagtccaggctcggcttccgcccggtctcccggcaacgctgcggccccgcccccgtcttggtgcccgaggagaacgcggggaccgaactcttgctgcagagtttcgagcgccgcttcctggcggcgcgcgcactgcgttccttcccctggcagactgtgaagcatcctgtgtgtgtgaagcaccggctgtcagtcaagtatgcccggtgctttctctcagaactcaccaaaaagcacgaggctgtccacacagagcttttggacaagctgtacgaggacctggcagagaccctgatggccaaggagtccacccagggccacccgagctatttgctgaattccgttgtctcaggaatgttcgatgaatggaatcctgtgtggcctgagatgagtgtctttcatgccacgactgtcctagagcttggcagtggcgccagcctcacaggcctggccatctgcaagatgtgccgcctccaggcatacatcttcagcgactgtcacagccaggtcctcgagaagctccgagggaatgtccttctcaatggcctctcattagaggcagacatctctgccaacttagacagccccagggtgacagtggcccagctggactgggacgtcgcgacggtccatcagctctctgccatccagccagatgttgtcattgcagcaggcaatgcccagccccgggcactctgtgcaggcgacgtgctgtattgcccagaatccatcgtgtcgctggtcgcggtcctgcggaggctggctgcctaccgggagcaccagcgggctcctcaagtctacgtggcccttatcgtccgcaacccagagacgtgccagctgttcaccaccgagctatcctttgccccagatcaccctgagcacagcccctcctggcagccatgtgcacagatgcacgcgcagcagcctctgcctgcacacagagacgtgggtccaatgcctgtccacgtggggcagcgcgttaactacagagccaacaaacaagccagcacacgaaggcatactgggttccacgacaaacattttctttgtgcaaataaaaacgtgtgtatcaagtatgatgttccccccaacgtggacacactcggttcctcacaaagccaagcccgctgcagctgccacatctgtggacacactcggttcctcacaaagccaagcccgctgcagctgccacatcggtggacacactcggttcctcacaaagccaagcccgctgcagctgccacatccctggacacactcggttcctcacaaagccaagcccactgcagctgccacatccctggacacactcggttcctcacaaagccaagcccgctgcagctgccacatcggtggacacactcggttcttcacaaagccaagcccgctgcagctgccacatcggtggacacactcgattcctcacaaagccaagcccactgcagctgccacatccctggacacactcggttcttcacaaagccaagcccgctgcagctgccacatccctggacacactcggttcttcacaaagccaagcccgctgcagctgccacatccctggacacactcggttcctcacaaagccaagcccgctgcagctgccacatccctggacacactcggttcctcacaaagccaagcccgctgcagctgccacatcggtggacacactcggttcttcacaaagccaagcccgctgcagctgtcacatcggtggacacactcggttcttcacaaagccaagcccgctgcagctgccacatcggtggacacactcgattcctcacaaagccaagcccactgcagctgccacatccctggacacactcggttcttcacaaagccaagcccgctgcagctgccacatccctggacacactcggttcttcacaaagccaagcccgctgcagctgccacatccctgggcttatggtgcagcaggtgcttttttcaagacaggaatcaaaatgttag

SEQ ID NO: 156168 - DNA, 1473 bp, Homo sapiens; identical to SEQ ID NO: 127239

SEQ ID NO: 156169 - DNA, 413 bp, Homo sapiens
accatggggtgaccaccgtgaagaagagacccaacgtcaacaagatcccttgaccaactacatcaagttcagggtctgggtcaagtttgatattgcgggctacggtggctttgggctgcccctacccaaattggggcaagaggaagccctttaccaggcactgaagaatgcgcaccctcacctccaggtctacaagaaggaggagtttccagaacacttccatctcgctaaacatgaccgggttctgccaatcgtgatttttcagagaattataatgtgtttcaacaaaggcagccatggctttgataatgtcctcatggacatgaacatcatattcagagctttcgggccagatttcaagaggaatcgcctggccgagccttttaacagcatccacatctacccattcgtgt

SEQ ID NO: 156170 - DNA, 231 bp, Homo sapiens
tccaggctcggcttccgcccggtctcccggcaacgctgcggccccgcccccgtcttggtgcccgaggagaacgcggggaccgaactcttgctgcagagtttcgagcgccgcttcctggcggcgcgcgcactgcgttccttcccctggcagactgtgaagcatcctgtgtgtgtgaagcaccggctgtcagtcaagtatgcccggtgctttctctcagaactcaccaaaaag

SEQ ID NO: 156171 - DNA, 1506 bp, Homo sapiens; identical to SEQ ID NO: 123679

SEQ ID NO: 156172 - DNA, 781 bp, Homo sapiens
atggcgcctgaggagaacgcgggtaccaaactcttgctgcagagtttcgagcgccgcttcctagcggcgcgcacactgcgctccttcccctggcaggtgggcggcggggcgagcggagaggcctgcggggcttgcggaagtccaggggcagacgggatgggtctccctgctgaaacccccggcgctcctgccacggagggatcacatagcgctttgccaacacattctattgcgtgttttaatgttcctgtgaatgcgcccttgagatttctctctctcccgtccacacggagcttagaagcaaaattaagagactcatcagattctgagctgctgcgggatattttgcacaagactgtgaagcatcctgtgtgtgtgaagcacccgccgtccgtcaaatatgcccggtgctttctctcagaactcatcaaaaagcacgaggctgtccacacagagcctttggacgagctgtatgaagcgctggcggagaccctgatggccaaggagtccacccagggccaccggagctatttgctgccctcgggaggctcggtcacactctccgagagcacggccatcatctcctacggtaccacaggcctggtcacatgggacgccgccctctaccttgcagaatgggccatcgagaacccggcagtcttcactaacaggactgtcctagagcttggcagtggtgctggcctcacaggcctggccatctgcaagatgtgccgcccccgggcatacatcttcagcgactgtcacagccgggtccttgagc

SEQ ID NO: 156173 - DNA, 613 bp, Homo sapiens; identical to SEQ ID NO: 147374

SEQ ID NO: 156174 - DNA, 1845 bp, Homo sapiens
  misc_feature (1)...(1845): n = a,t,c or g
ctctaatacagcacacagacacagggttatctgtgtcgttatcaactacacccaacgtgacgccgccatctcttcgcggagacgcatcaacacttcagcactcaaacacaacgtgcgtgtcaacaggctcttctctcctcccctctccgtcatatatttataagaacgggggacctacatttgccagatcaccacctctctgtaccgagctcagcagatcatccagctcaacatccaagcttcccctaaagtacgactgagcttggcaaacgaagctctgctgcccaccctcatctgcgacattgctggctattaccctctggatgtggtggtgatgtggacccgagaggagctgggtggatccccaagcccaagtctctggtgcctccttctccaagcctcaggcaaaagcgttggcaggcacctacagcatctcctcctctctcaccgcagaacctgggctctgcaggtgccactttacacctgccaggtcacacacatctctctggaggagccccttggggccagcaccccaggttgtcccaccagagcggagaacagccttgggagtcatctttgccagcagtctcttccttcttgcactgatgttccctggggcttcagagacggccaagcacctaacaggacttgggctgcttcagggnctgaacgctgggagacccacttccctgtgctgacacacagagctccccatctccatgaagaccgcacagcgcgtgtaagcccagcccagctgaccctaaagcgacatgagactactagaaagaagcgacacctcttccccaagcccccacaggctactccaacccaaacaacaaccaagccagtttaatggtaggaatttgtatctctttccctttgttcagaaatacatgacatgtggtaaatatgccacatgcctttggtggaagtacaactgttgttattactctatacaagtatgagatcagggttaggaaaaaaagacaaagaggtgatcgacagacacgacagtgggaaaccccacatcgtctcatgggcaaaccgaaggaacggggatgtggggaagctcaacttttatttggactgcaaagtcccaggggttttgtttgcacatttgctcatgcacatggggtgggtggggagggaaagggggataggcagnaggacacacaggaaggaggggtacagggtggggtgaggaaaggaaagtagaagggcttaattacccccaaaggaacaagggccaactacacctggtgagccttcaggaggggacagaaaccccagggaatgattcctgtgatagggctgggagagccaagaggaccggattcgctccaagccttgggacacatcgaggacagtggtggttcttctccagcggtgaccccctgcattaggcaaggaggagcccagaggagagtggagaccttcgaggggggccgttgggagggtactgactgctttcttccagctcttcagtcccgcccttgggcaggacgaagggaatgtgggaaacaagggcgaaaggaaaggaaggatggttttggagcaatgaaatgctgctgcatggaaagtgggcatccagaccctgcccagcatggcctcagcctcttcctgttcgtggaccgagggaagaaggaataaagggccatgggcattctccgctctgttcccagcctgccctcctccccttgcacctgggcttatcccacattaatagcccatcctgaagctcagcaattgccccgaagataggctgagcagatcccatcctcaggttccactgtctatacacacaaaccatgcaaagaggaggaagagaaaggaggcaaagtagaa

SEQ ID NO: 156175 - DNA, 801 bp, Homo sapiens; identical to SEQ ID NO: 123909

SEQ ID NO: 156176 - DNA, 1352 bp, Homo sapiens; identical to SEQ ID NO: 123910

SEQ ID NO: 156177 - DNA, 482 bp, Homo sapiens
  misc_feature (1)...(482): n = a,t,c or g
taatgacaactncttgaatggagcaatctccgaccggcacgaggaaacaccggngctgacccgctcttccggccaaactttcgcgggtggcgctatagccaccaccagtacgtcctccacggtcaccgtcacggccccgggccccgccgccacaggaagcccagtgaaaaagcacaggccgcttttaccgaaggagactgccccggccgtgcagcgggtcgtgtggaactcatcaagtaagttttaaacgtcctcccaaaagtggtacatgcagaannnnnnnnnnnnnnnnnnnnnnnnnnnnnngcaaaaccagcagcagcagcctcagtcttcccaggggacgagatatcacaccagacaggctgtgaaagctgtccagcagaaggagatcacacagagcccatccacgtccaccatcaccctggtgaccagcacacagtcatcgcccctggtcaccagctcggggtccatgagcaccc

SEQ ID NO: 156178 - DNA, 786 bp, Homo sapiens
atggcggagatgcggcagagcctggagcaggagcgggaccggctcatcgccgaggtgaagaagcagctggagttggagaagcagcaggcggtggatgagaccaagaagaagcagtggtgcgccaactgcaagaaggaggccatcttttactgctgttggaacaccagctactgtgactacccctgccagcaagcccactggcctgagcacatgaagtcctgcacccagtcagctactgctcctcagcaggaagcggatgctgaggtgaacacagaaacactaaataagtcctcccaggggagctcctcgagcacacaatcagcaccttcagaaacggccagcgcctccaaagagaaggagacgtcagctgagaaaagcaaggagagtggctcggattccatcgtccatgatggctatttctcaagttctctgctctgttttggacctccctgcatctctccctgcgtcaccatccctgggcgctcagggctgctcctctgccctctgcagggcctccgtgttagcaaaaggtgtgacaagcaacctgcctatgccccaaccaccacagaccaccagccgcaccccaactaccccgcccagaagtgtaagtatgaacctgtcttacgaaagctgccggggcttcttcctgaccattcccggagtaataaatccagttggagcagcagtgatgagaagaggggatcgacacgttccgatcacaacaccagtaccagcacgaagagcctcctcccgaaagagtctcggctggacaccttctgggactag

SEQ ID NO: 156179 - DNA, 1629 bp, Homo sapiens
atggatttgaaggagctgagcgagtcggtccagcaacagtccacccctgttcctctcatctctcccaagcgccagattcgtagcaggttccagctgaatcttgacaagaccatagagagttgcaaagcacaattaggcataaatgaaatctcggaagatgtctatacggccgtagagcacagcgattcggaggattctgagaagtcagatagtagcgatagtgagtatatcagtgatgatgagcagaagtctaagaacgagccagaagacacagaggacaaagaaggttgtcagatggacaaagagccatctgctgttaaaaaaaagcccaagcctacaaacccagtggagattaaagaggagctgaaaagcacgtcaccagccagcgagaaggcagaccctggagcagtcaaggacaaggccagccctgagcctgagaaggacttttccgaaaaggcaaaaccttcacctcaccccataaaggataaactgaagggaaaagatgagacggattccccaacagtccatttgggcctggactctgattcagagagcgaacttgtcatagatttaggagaagaccattctgggcgggagggtcgaaaaaataagaaggaacccaaagaaccatctcccaaacaggatggtaaaactccaccatccacgacggtgggcagccattctcccccggaaacaccggtgctcacccgctcttccgcccaaacttccgcggctggcgccacagccaccaccagcacgtcctccacggtcaccgtcacggccccggcccccgccgccacaggaagcccagtgaaaaagcagaggccgcttttaccgaaggagactgccccggccgtgcagcgggtcgtgtggaactcatcaagtaagtttcaaacgtcctcccaaaagtggcacatgcagaagatgcagcgtcagcagcagcagcagcagcagcaaaaccagcagcagcagcctcagtcttcccaggggacgagatatcagaccagacaggctgtgaaagctgtccagcagaaggagatcacacagagcccatccacgtccaccatcaccctggtgaccagcacacagtcatcgcccctggtcaccagctcggggtccatgagcacccttgtgtcctcagtcaacgctgacctgcccatcgccactgcctcagctgatgtcgccgctgatattgccaagtacactagcaaaatgcctttcttccgagtgtaccttctaaaacacttggaatcgtggggatctgtggtgatccctgggctggaagccacggccatgcacctggctagttctgtgatgcaggaacagctgggttggggaaggagaccggcatgccgctggctgtgggctcctcactggctgacgccttgggtgctctcccctcagctatgggaatggagggagggggccctagaagtttttggggccaatgtgtatattgcagacactattagccacctactcaaaccctgcccttatgggccagtggttggttccaggcactgtggcaaccaggaagactcccagatgtctcctgaggagggcgcagtaccacccctagttaaaaacctctgttctagagaactccagaattctctagactacggctga

SEQ ID NO: 156180 - DNA, 849 bp, Homo sapiens
tgcggttggaacacaggctactgtgactaccctgccagcaagcccactggcctgagcacataaagtcctgcacccagtcaagctactgctcttcagcagggagcggatgttgaggtgaacacagaaccactaaataagtcctcccaggggagctcctcgagcacacaatcagcaccttcagaaacggcccagcgcctccaaagagaaggagacgtcagctgagaaaagcaaggagagtggctcgacccttgacctttctggctccagagagacgccctcctccattctcttaggctccaaccaaggctctgttagcaaaaggtgtgacaaagcaaccttgctatgccccaaccaccacagaccaccagccgcaccccaactaccccgcccagaagtaccatttccggagttataaaattccaggttgagcccgcccgtttttaaaaagaaggggatccgacgggttccgatccccaacaccagtaccagcacgaagagcctcctcccgaaagagtctcggctggacaccttcttgggactaacaggggatccgggacccaaacaacccaccccattgggagaaaaacccagacgccagggaaaagaagaaacaacaaaggcaggagaacagccactttcagacttgaaaatgacaaaaccctcagttgagcctgagcccccggcgcgggggctgctacactacaggacacccagcatcggctttgactgcagactgttcacccacacgagccctgtgcttttggtgtaaataatgtacaatttgtggatgtcattgaatctagaggactttcccctttttatatttgtattaactttaacttattaaaa

SEQ ID NO: 156181 - DNA, 3629 bp, Homo sapiens
acatttgttggcttggctgaagaggaaataaaaacagaacaggaggtggtagagggcatggatatctctactcgctccaaagatcctggctctgcagagagaacagcccagaaaagaaagttccccagccctccacattcttccaatggccactcgccgcaggacacatcaacaagccccattaaaaagaaaaagaaacctggcttactgaacagtaacaataaggagcagtcagaactaagacatggtccgttttactatatgaagcagccactcaccacagaccctgttgatgttgtaccgcaggatggacggaatgatttctactgctgggtttgtcaccgggaaggccaagtcctttgctgtgagctctgtccccgggtttatcacgctaagtgtctgagactgacatcggaaccagagggggactggttttgtcctgaatgtgagaaaattacagtagcagaatgcatcgagacccagagtaaagccatgacaatgctcaccattgaacagttatcctacctgctcaagtttgccattcagaaaatgaaacagccagggacagatgcattccagaagcccgttccattggaacagcaccctgactatgcggaatacatcttccatccaatggacctttgtacattggaaaagaatgcgaaaaagaaaatgtatggctgcacagaagccttcctggctgatgcaaagtggattttgcacaactgcatcatttataatgggggaaatcacaaattgacgcaaatagcgaaagtagtcatcaaaatctgtgaacatgagatgaatgaaatcgaagtatgtccagaatgttatctagctgcttgccaaaaacgagataactggttttgtgagccttgtagcaatccacatcctttggtctgggccaaactgaaggggtttccattctggcctgcaaaagctctaagggataaagacgggcaggtcgatgcccgattctttggacaacatgacagggcctgggttccaataaataattgctacctcatgtctaaagaaattcctttttctgtgaaaaagactaagagcatcttcaacagtgccatgcaagagatggaggtttacgtggagaacatccgcaggaagtttggggtttttaattactctccatttaggacaccctacacacccaacagccagtatcaaatgctgctcgatcccaccaaccccagcgccggcactgccaagatagacaagcaggagaaggtcaagctcaactttgacatgacggcatcccccaagatcctgatgagcaagcctgtgctgagtgggggcacaggccgccggatttccttgtcggatatgccgcgctcccccatgagcacaaactcttctgtgcacacgggctccgacgtggagcaggatgctgagaagaaggccacgtcgagccacttcagtgcgagcgaggagtccatggacttcctggataagagcacagcttcaccagcctccaccaagacgggacaagcagggagtttatccggcagcccaaagcccttctctcctcaactgtcagctcctatcacgacgaaaacggacaaaacctccaccaccggcagcatcctgaatcttaacctggatcgaagcaaagctgagatggatttgaaggagctgagcgagtcggtccagcaacagtccacccctgttcctctcatctctcccaagcgccagattcgtagcaggttccagctgaatcttgacaagaccataggagagttccaaagcacaattaggcataaatggaaatctcggaagatgtctatacggccgtagggcacagcgattcggaggattctgagaagtcagatagtagcgatagtgagtttatcagtgatgatgagcagaagtctaaggacgagccagaagacacagaggacaaagaaggttgtcagatggacaaagagccatctgctgttaaaaaaaagcccaagcctacaaacccagtggagattaaagaggagctgaaaagcacgtcaccagccagcgagaaggcagaccctggagcagtcaaggacaaggccagccctgagcctgagaaggacttttccggaaaggcaaaaccttcacctcaccccattaaggataaactgaagggaaaagatgagacggattcccccacagttcatttgggcctggactctgattcagaggaacgaacttgtcatagatttaggagaagaccattctgggcgggagggtcgaaaaaataagaaggaacccaaagaaccatctcccaaacaggatgttgtaggtaaaactccaccatccacgacggtgggcagccattctcccccggaaacaccggtgctcacccgctcttccgcccaaacttccgcggctggcgccacagccaccaccagcacgtcctccacggtcaccgtcacggccccggcccccgccgccacaggaagcccagtgaaaaagcagaggaagcttaattccgaaggaggactgccccggcccgtgcagcgggtccgtgtggaactcatcaagtaaagtttcaaacgtcctcccaaaagtggcacatgcagaagatgcagcgtcagcagcagcagcagcagcagcaaaaccagcagcagcagccatcagtcttcccaggggacgagatatcagaccagacaggctgtgaaagctgtccaacagaaggagatcacacagagcccatccacgtccaccatcaccctggtgaccagcacacagtcatcgcccctggtcaccagctcggggtccatgagcacccttgtgtcctcagtcaacgctgacctgcccatcgccactgcctcagctgatgtcgccgctgatattgccaagtacactagcaaattggatggatgcaataaaaggtacaatggacagaaatatacaacgatctttctaaaaacactactggaagcacaatagctgagattcgcaggctgaggatcgagatagagaagctccagtggctgcaccagcaagagctctccgaaatgaaacacaacttagagctgaccatggcggagatgcggcagagctgggagcaggagcgggaccggctcatcgccgaggtgaagaagcagctggagttggagaagcagcaggcggtggatgagaccaagaagaagcagtggtgcgccaactgcaagaaggaggccatcttttactgctgttggaacaccagctactgtgactacccctgccagcaagcccactggcctgagcacatgaagtcctgcacccagtcagctactgctcctcagcaggaagcggatgctgaggtgaacacagaaacactaaataagtcctcccaggggagctcctcgagcacacaatcagcaccttcagaaacggccagcgcctccaaagagaaggagacgtcagctgagaaaagcaaggagagtggctcgacccttgacctttctggctccagagagacgccctcctccattctcttaggctccaaccaaggctctgaccattcccggagtaataaatccagttggagcagcagtgatgagaagaggggatcgacacgttccgatcacaacaccagtaccagcacgaagagcctcctcccgaaagagtctcggctggacaccttctgggactag

SEQ ID NO: 156182 - DNA, 2175 bp, Homo sapiens
gcgttcggaggattctgagaagtcagatagtagcgatagtgagtatatcagtgatgatgagcagaagtctaagaacgagccagaagacacagaggacaaagaaggttgtcagatggacaaagagccatctgctgttaaaaaaaagcccaagcctacaaacccagtggagattaaagaggagctgaaaagcacgtcaccagccagcgagaaggcagaccctggagcagtcaaggacaaggccagccctgagcctgagaaggacttttccgaaaaggcaaaaccttcacctcaccccataaaggataaactgaagggaaaagatgagacggattccccaacagtccatttgggcctggactctgattcagagagcgaacttgtcatagatttaggagaagaccattctgggcgggagggtcgaaaaaataagaaggaacccaaagaaccatctcccaaacaggatgttgtaggtaaaacaccaccatccacgacggtgggcagccattctcccccggaaacaccggtgctcacccgctcttccgcccaaacttccgcggctggcgccacagccaccaccagcacgtcctccacggtcaccgtcacggccccggcccccgccgccacaggaagcccagtgaaaaagcagaggccgcttttaccgaaggagactgccccggccgtgcagcgggtcgtgtggaacttcatcaactgtccagcagaaggagatcacacagagcccatccacgtccaccatcaccctggtgaccagcacacagtcatcgcccctggtcaccagctcggggtccatgagcacccttgtgtcctcagtcaacgctgacctgcccatcgccactgcctcagctgatgtcgccgctgatattgccaagtacactagcaaaatgatggatgcaataaaaggaacaatgacagaaatatacaacgatctttctaaaaaccactacttggaaagcacaattagctgaagattcgcaaggcttgaggatcgagatagaaaagctccagtggctgcaccagcaagagcttctccgaaatgaaacacaacttagagctgaccatggcggagatgcggcagagcctggagcaggagcgggaccggctcatcgccgaggtgaagaagcagctggagttggagaagcagcaggcggtggatgagaccaagaagaagcagtggtgcgccaacttcaagaaggaggccatcttttactgctgttggaacaccagctactgtgactacccctgccaagcaagcccactggcctgagcacattgaagtcctgcacccagtcagcttactgctcctcaagcaggaaagcggatgctgaaggtgaacacagaaacacttaaattaagtccttcccaggggagctccttcgagcacacaatcagcacctttcagaaaacggccagcgccttccaaagagaagggagacgttcagcttgagaaaagccaaggagagtggctcgacccttgacctttctggctccagagagacgccctcctccattctcttaggctccaaccaaggctctgaccattcccgggagtaataaatccagttggagcagcagtgatgagaagaggggatcgaacacgttccgatcacaaccacccagtacccagcacggaaggagcctccttcccggaaaggagtctcgggctgggacaccctttctggggactagcaagtgaatccgggccacaaacccaccccaccccattgtggagaaaaaacccagacggccaggaaaagaagaaacaacaaaggcaaggagaacagcccacttttcagactttgaaaatgaccaaaaccctcagttgagcctaaagcccccggcgcgggggctgctacactacagggacacccagcatcggctttgactgcagactgttcacccacacgagccctgtgcttttggtgtaaataatgtacaatttgtggatgtcattgaatctagaggactttcccctttttatatttgtattaactaaaaacttattaaaaaaaaaaaaagaaaaagaaaaacgcatttaaaaaaaaaaaaaaaaagcaaccaaccccaacaacaaaaaagaatgttttggtattggagaagggatggtcagttagcctgtctgtcacacgacggaatggatactgggcccggggaccattt

SEQ ID NO: 156183 - DNA, 600 bp, Homo sapiens; identical to SEQ ID NO: 133875
  misc_feature (1)...(600): n = a,t,c or g

SEQ ID NO: 156184 - DNA, 1981 bp, Homo sapiens; identical to SEQ ID NO: 148441

SEQ ID NO: 156185 - DNA, 1013 bp, Homo sapiens; identical to SEQ ID NO: 148442
  misc_feature (1)...(1013): n = a,t,c or g

SEQ ID NO: 156186 - DNA, 2299 bp, Homo sapiens
atgggcagagactggaacagtttggagagcttagaagaagacaggaagatgagagaaagtttggaacatgctagagacttgttaaattgttgtgaccaaaatgctgatcatcatatggacagtgaagtccaggctgaggtggtctcagaaggagatgaagaacttattgggaaatggagtaaagcatactgccataggtgtgagcaaaaagatgatctgaaatgggaacttatatttaaaagggaagcagagcataaaagtttggaaattttgcagcctgaccatgtggtagaaaagaaaaacccgggaggaggcaggaaccagagcacgagcagtagctgggtgggcactgtggctgagatcaccaccatcgaggcagtgaagtgcaagatccaggttctgcagcagcaggcagatgatgcagaggagcgagcttgagcgctcccagcgagagtttagggaagaaaggcgggcccgggaaccaggctgaggctgaggtggcctccttgaaccgtaggatccagcgtggttgaagaagagctggaccgtgctcaggagcgcctggccactgccctgcaaaagctggaagaagctgaaaaaagcttgctgatgagagtgagagaaggtattgaaggttatttgaaaacccgggccttaaaaagattgaaggaaaagattggaacttccagggaaatccaactcaaaagaagctaagcacattgcagaagaaggcagattaggaagtatgaagaggtgggctcgtaagtttggtgatcattgaaggagacttggaacgcacagagggaacgagctggagctggcagagtcccgttgccgagagatggatgagcagattagactgatggaccagaacctgaagtgtctgagtgctgctgaagaaaagtactctcaaaaagaagataaatatgaggaagaaatcaagattcttactgataaactcaaggaggcagagacccgtgctgagtttgctgagagatcggtagccaagctggaaaagacaattgatgacctggaagacactaacagcacatctggagacccggtggagaagaaggacgaaacaccttttggggtctcggtggctgtgggcctggccgtctttgcctgcctcttcctttctacgctgctccttgtgctcaacaaatgtggacggagaaacaagtttgggatcaaccgcccggctgtgctggctccagaggatgggctggccatgtccctgcatttcatgacattgggtggcagctccctgtcccccaccgagggcaaaggctctgggctccaaggccacatcatcgagaacccacaatacttcagtgatgcctgtgttcaccacatcaagcgccgggacatcgtgctcaagtgggagctgggggagggcgcctttgggaaggtcttccttgctgagtgccacaacctcctgcctgagcaggacaagatgctggtggctgtcaaggcactgaaggaggcgtccgagagtgctcggcaggacttccaacgtgaggctgagctgctcaccatgctgcagcaccagcacatcgtgcgcttcttcggcgtctgcaccgagggccgccccctgctcatggtcttcgagtatatgcggcacggggacctcaaccgcttcctccgatcccatggacccgatgccaagctgctggctggtggggaggatgtggctccaggccccctgggtctggggcagctgctggccgtggctagccaggtcgctgcggggatggtgtacctggcgggtctgcattttgtgcaccgggacctggccacacgcaactgtctagtgggccagggactggtggtcaagattggtgattttggcatgagcagggatatctacagcaccgactattaccgtgtgggaggccgcaccatgctgcccattcgctggatgccgcccgagagcatcctgtaccgtaagttcaccaccgagagcgacgtgtggagcttcggcgtggtgctctgggagatcttcacctacggcaagcagccctggtaccagctctccaacacggaggcaatcgactgcatcacgcagggacgtgagttggagcggccacgtgcctgcccaccagaggtctacgccatcatgcggggctgctggcagcgggagcccagcaacgccacagcatcaaggatgtgcacgcccggctgcaagccctggcctaggcacctcctgtctacctggatgtcctgggctagggggccggcccaggggctgggagtggttagccggaatactggggcctgccctcagcatcccccatag

SEQ ID NO: 156187 - DNA, 2158 bp, Homo sapiens
ggtgggcctggaaccaggctgaggctgaagtggcctccgtgaacggtaggatccagctggttgaagaggagctggactgtgctcaggagcgcctggccactgccctgcaaaagctggaagaagcgggaaaagctgctgatgagagtgagagaggtatgaaggttattgaaaaccgggccttaaaagatgaagaaaagatggaactccaggaaatccaactcaaagaagctaagcacattgcagaagaggcagataggaagtatgaagaggtggctcgtaagttggtgatcattgaaggagacttggaacgcacagaaggaacgagctgagctggcagagtcccgttgccgagagatggatgagcagattagactgatggaccagaacctgaagtgtctgagtgctgctgaagaaaagtactctcaaaaagaagataaatatgagaaagaaatcaagattccttactaataaactcagggaggcagagaccccgtgctgagtttgctgagagatcggtagccaagctggaaaagacaattgatgacctggaagataaactgaaatgcaccaaagaggagcacctctgtacacaaaggatgctggaccagaccctgcttgacctgaatgagatgtagaacgccccagtcccaccctgctgctgctcctccctctgacccagactccgcctgaggccagcctgcgggaagctgacctttaactgagggctgatctttaactgggaaggctgctttctccctttcaccaccccctcctttccctgtgtcttttttcgcccaaactgtctcttgccttcttcccgggagaaatccagctgggctagaggctggagcacctttgggaaacaacattttaaggggaatgtgagcacaatggcattaatgtttttaaaaaggcatgttgttgatgtacacattttgtaattacctttttttgttggttttgtagcaaccatttgtaaaacattcccaaataattccacagtcctgaagcagcaatcgaaatcccctttcctcacttttgggaagggtgacttttcacccttaaatgcatattcccccctctcccatagaggagaggaaaaggtgtagggcctgccttacccgagagccaaacagagcccccagggagactcagctgtgggaaacctcattgttctgtacaaagtactagctaaacccagaaaggtgattcccaggaggagttagccaaacaacaacaaagacaaaatatgtgctgttcaagttttcagctttaagaaatctttggataatgttatttctatttttttatttttttcattagaagttaccaaattaagatgggtaagacctctggagaccaaaattttgtcccatctctaccccctcacaactggcttacagaatggatcatggtcccccttatggttgaggtgaccacttaaatggctttcctggcctccttgaaaagaaaagaaaagaaagaagactgtggtttttggccactggatttaagccatgtgaaactccatctccatcaccccttttctggggtttgaaagctgctgtctctaagaagtggccatctcaaattggtgctttggtatcagtcagtgctgggagaaaatcttgaataggcttatggtacaaaactttttaaaattttatattattttggaaactttgcttctttgggtttgtgggcaccctggccaccccaatctggcttgtgacagcctctgcaggtccgtgggcctggcagtttactgattttttaaagtttccttccctaacccagcccccattttctggtaaggtttctaggaggtctgttaggtgtacatcctgcagcttattggcttaaaatgtactctccttttatgtggtctctttggggccgattgggagaaagagaaatcaatagtgcaactggttttgatactgaatattgacaagtgtctttttgaaataaagaaccagtccctcccaaaaagaaaaaaagagaaaaaaaaaagtttgcccaaagtgggcggatacaattgtgaccggcggaaattagtatataatcgacgggaatcggaccggcctgaagggccagtttcctaaggggccgataaagctgggaacagggaagcgttcggaggaatgtaccgcgcatt

SEQ ID NO: 156188 - DNA, 721 bp, Homo sapiens; identical to SEQ ID NO: 123507
  misc_feature (1)...(721): n = a,t,c or g

SEQ ID NO: 156189 - DNA, 1857 bp, Homo sapiens
ttgccgatccgccgcccgtccacacccgccgccagctcaccatggatgatgatatcgccgcgctcgtcgtcgacaacggctccggcatgtgcaaggccggcttcgcgggcgacgatgccccccgggccgtcttcccctccatcgtggggcgccccaggcaccagggcgtgatggtgggcatgggtcagaaggattcctatgtgggcgacgaggcccagagcaagagaggcatcctcaccctgaagtaccccatcgagcacggcatcgtcaccaactgggacgacatggagaaaatctggcaccacaccttctacaatgagctgcgtgtggctcccgaggagcaccccgtgctgctgaccgaggcccccctgaaccccaaggccaaccgcgagaagatgacccagatcatgtttgagaccttcaacaccccagccatgtacgttgctatccaggctgtgctatccctgtacgcctctggccgtaccactggcatcgtgatggactccggtgacggggtcacccacactgtgcccatctacgaggggtatgccctcccccatgccatcctgcgtctggacctggctggccgggacctgactgactacctcatgaagatcctcaccgagcgcggctacagcttcaccaccacggccgagcgggaaatcgtgcgtgacattaaggagaagctgtgctacgtcgccctggacttcgagcaagagatggccacggctgcttccagctcctccctggagaagagctacgagctgcctgacggccaggtcatcaccattggcaatgagcggttccgctgccctgaggcactcttccagccttccttcctgggcactggagtcctgtggcatccacgaaactaccttcaactccatcatgaagtgtgacgtggacatccgcaaagacctgtacgccaacacagtgctttccggcggcacccaccaattccccttgccttgccgaccaggatgctgaaagaaaatcactgccctggaacccgtccacaatgaagattcagaatcattgcttcctcctgaggcgcaaagtactccgttatggaatcgcggggctccaatcctgggcctcgctggtccaccttccagccaagatgtgggatcagaaaagcagggagtatgacgagtccgggcccctcccattcgtccaccgcaaaatgctttctagggcggactatgacttagttgcggttacacccctttcttgacaaaaacctaaacttgcgccagaaaaccaagatgagaattggcatggcctttatttgttttttttgttttggtttggttttttttttttttttttggcttgactcaggattttaaaaactgggaacggtgaaaggtgaacagccagtcgggttggaagcgagccatccccccaaagtttcacaatgtggccgagggactttgaattgcacattgttgttttttttaatagtcatttccaaaatatgagatgcgttgttacaggaagtcccttgccatcctaaaagcccaccccacttcttctctaaggagaatggcccagttcttctcccaaagtccacacaagggggggggaacaacatttgctttggtgtaaattatgtaatgcaaaattttttttaatctttcgccttaatacttttttattttgttttattgtgaatgatgagccttcgtgccccccccttcccccttttttgtccccccaacttgagatgtatgaaggcttttggttctccctggggagtgggtgggagggcagccaggggcttaccttgtacacttgacttgagaccagttgcatgctaagtgcacaaccttaaaaatgaaaaaaaaaaaaaaaaaa

SEQ ID NO: 156190 - DNA, 324 bp, Homo sapiens; identical to SEQ ID NO: 148480

SEQ ID NO: 156191 - DNA, 383 bp, Homo sapiens; identical to SEQ ID NO: 148481

SEQ ID NO: 156192 - DNA, 758 bp, Homo sapiens; identical to SEQ ID NO: 148482

SEQ ID NO: 156193 - DNA, 1035 bp, Homo sapiens; identical to SEQ ID NO: 148486
  misc_feature (1)...(1035): n = a,t,c or g

SEQ ID NO: 156194 - DNA, 2985 bp, Homo sapiens
ggcaaacacaagctgctaagcactggccccacagagccatggtccatccgagagaagctatgtttagcatcttctgtcatgagaagtggcgatcaaaattgggtatcagttagcagagcaatcaagccctttgcagaacctggccgccctccagactggttctctcaaaaacattgtgcttcccagtactcggagcttttagagaccactgagacaccaaaacggaaacgaggtgaaaagggagaagtggtggaaactgttgaagatgttattgttcggaaattgactgctgagcgagttgaagaactaaagaaagtgataaaggaaacccaggagagatatagacggctaaagagagatgcagaactaattcaagctggacacatggacagcagactggatgagctttgcaatgacattgaaaaagaaattggaagaagaggaggctgaagtaaagaggaaggctacagatgctgcataccaggctcgtcaagcagtaaaaacacccccccggaggttacccactgtgatggttcgctctcctatagattctgcctccccaggaggtgattatccacttggggacttgactccaaccactatggaagaggctacctctggggtaacccccgggactttgccgagtaccccagtcacctcgtttcctgggattcctgacacccttcctccaggctctgcacccttagaagcccccatgaccccagtaacagatgattcaccccagaaaaagatgcttggacagaaagcaactccacccccctcccctctgctgtcagagctcttgaagaagggcagcctcctgcctactagccccagactggtcaatgagagtgaaatggctgtggcttctggccacctgaacagtacaggtgtcctcctggaggtaggcggggtccttcccatgatacatggtggggagatacagcaaacacccaatactgttgcagcctcccctgctgcatcagagtctgtgtcccaagctaccattgtcatgatgcctgcgctgccagcaccatcctctgctccggctgtctccactactgaaagtgtagctccagtgagtcaacccgacaactgtgttcccatggaggctgtgggggatccacatactgtgactgtttccatggacagcagtgaaatatccatgatcatcaattctatcaaagaagagtgttttcgatcaggggtagcagaggctcctgttggatcaaaggctcccagcatagatgggaaggaagaattagatctggctgagaagatggatattgctgtgtcttacacaggtgaagagctggattttgagactgttggagacatcattgccatcattgaggacaaggtagatgatcatcctgaagtgctggatgtggcagcagtggaagcagcactgtcattttgtgaagaaaatgatgatcctcagtccctgcctggcccctgggagcatcctatccagcaggagcgggacaagccagtacctctccctgcaccagaaatgacggtcaagcaagagagactggactttgaggaaacggaaaacaagggaatacatgaactggtggacatcagggagcccagtgcagagatcaaggtggaacctgcagaaccagagccagtcatttcaggagccgaaatagtagctggagttgttccagccacaagtatggagccaccagaactcaggagtcaggacttagatgaggaactgggaagtactgcagctggagagattcttgaagcagatgttgccattgggaaaggcgatgagactccacttacaaatgtgaagacagaggcatcccctgaaagcatgttgtctccatcacatggctcaaatcccattgaagatcctttagaggcagagactcagcacaagtttgaaatgtcagactcattgaaagaagaatcagggactatttttggaagccagataaaggatgccccaggtgaggatgaggaggaagatggtgtcagtgaagcggccagcctagaggagcctaaggaagaggatcaaggagaaggctacttgtcagaaatggataatgaacctcctgtgagcgagagtgatgatggcttcagcatacacaatgctacactgcagtcacacacactggcagactccatccccagcagccctgcttcttcacagttctctgtctgtagtgaggatcaggaagctattcaggcacagaaaatttggaagaaagccatcatgcttgtatggagagctgcagctaatcataggtatgccaatgtcttcctgcagcctgttacagatgacatagcacctggctaccacagcattgtgcagaggcctatggatttgtcaactattaagaaaaacatagaaaatggactgatccgaagcacagctgaatttcagcgtgacattatgctgatgtttcagaatgctgtaatgtacaatagctcagaccatgatgtctatcacatggcagtggagatgcagcgagatgtcttggaacagatccagcaattcttggccacgcagttgattatgcaaacatccgagtctgggatcagtgctaaaagtcttcgagggagagattctacccgcaaacaggatgcttcagagaaggatggaggaaccaggggacgccgctgtgccattgaagcagatatgaagatgaaaaagtgaagcctcagagttaccctctttgagccgaacctaaaataaaagtaaacaagatagagcttgggcttgcgggcccagttccagaggtggaagttacagaagaggaggtacctgggccacacgacatgagctggaaaatctctcttagagagttggagtagcacaattgcctgttttagggcagaaaccatgggctatgttaatgtcctaatgtgtagctagcagatcgtagctagtttgtattgtcttgtcaattgtacagactttttaaaaaaaacaaccaccagtgaaatgtgtgtgtatacaataaactg

SEQ ID NO: 156195 - DNA, 755 bp, Homo sapiens
tatgccaatgtcttcctgcagcctggtacaagatgacatagcgccctggctcccccagcattgggcaaagggcctatggatttgtcaactataagaaaaacatataaaatggctgatccgaagccccagctgattttcagcgttgacatatgctgatgtttcagaatctgttaatgtaccatagctcagaccattatttctatcacattgccattggagatgcagccgagatgtcttggaacagatccagcaattcttggccacgcagttgattatgcaaaccatccgagtctgggatccagtgctaaaaggtcttcgagggagagattctacccggccaacaggatgcttcagagatggatggaggaaccaggggacgcccgctgtgccattgaagcagatatgaagatgaaaaagtgaagcctcagagttacccttcttgagccgaaccttaaaataaaagtaaacaagatagagcttgggcttgcgggcccagttccagaggtggaagttacagaagaggaggtacctgggccacacgacatgagctggaaaatctctcttaaagagttggagtagcacaattgcctgttttagggcagaaaccatgggctatgttaatgtcctaatgtgtagctagcagatcgtagctagtttgtattgtcttgtcaattgtacagactttttaaaaaaaacaaccaccagtgaaatgtgtgtgtatacaataaactgaaaaaaaaaactaaaaaaaaaaa

SEQ ID NO: 156196 - DNA, 1165 bp, Homo sapiens
gatcagtgctaaaagtgcatcgagggagagattctacccgcaaacaggatgcttcagagaaggacagtgtcccaatgggctctcctgccttccttctctctctcttttgactctggatcccccaagcaaagcatttggctggctattgcaaggctggttaataggatcttttatctattgaagacagcaaaatattgcacaagaggaaggagctgggctgcagggagagagcagcagatggaaagaagccttctaattgtcctgatctcatggaaaaccactgtcaggaggtgctagggaactagtgccagggtcagtctgcaggaaaggcctttcttatagggaccaacagttggacaggtatgttagtcaagaaacctcactacccattgcccattctgactctcctacctttcttttactctcctgctcctttgcacatgatttgggcctgggtgggatgactaatagttattctgtgggaccctaggtgaattccaaggacctctgtagtgggcatgagcaagatattccatcctacatttcctctcacaaactaccagggtgttctttaggccactctgtggggaaggacaggaaatatggcccctcatccctctgggatttttctggctggattctcttccctctcccccaaggaaaccaaatccccaactttttctgttggcaccgtctcttgtcttcctggaccaactcatgctccctgttctttctctgcctgtcatctagggatgggagggaaccaggggggacggccgctgttgccattgaaggcagatatgaagatgaaaaagtgaagcctcagagttaccctctttgaggccgaacctaaaaataaaagtaaacaagataggagcttggggcttgcggggcccagtttccagaggtgggaagttacagaaggagggaggtaccgggggccacacgacatggagctgggaaaatctctttttaggagagttgggagtaggcacaatttgcctgttttttagggcagaaacccatgggctatgttaatgtcctaatgtgtagctagcagatcgtagctagtttgtattgtcttgtcaattgtacagactttttaaaaaaaacaaccaccagtgaaatgtgtgtgtatacaataaactgaaaaaaaaaactaaaa

SEQ ID NO: 156197 - DNA, 3201 bp, Homo sapiens
cgggcaaacacaagctgctaagcactggccccacagagccatggtccatccgagagaagctatgtttagcatcttctgtcatgagaagtggcgatcaaaattgggtatcagttagcagagcaatcaagccctttgcagaacctggccgccctccagactggttctctcaaaaacattgtgcttcccagtactcggagcttttagagaccactgagacaccaaaacggaaacgaggtgaaaagggagaagtggtggaaactgttgaagatgttattgttcggaaattgactgctgagcgagttgaagaactaaagaaagtgataaaggaaacccaggagagatatagacggctaaagagagatgcagaactaattcaagctggacacatggacagcagactggatgagctttgcaatgacattgcaacgaaaaagaaattggaagaagaggaggctgaagtaaagaggaaggctacagatgctgcataccaggctcgtcaagcagtaaaaacacccccccggaggttacccactgtgatggttcgctctcctatagattctgcctccccaggaggtgattatccacttggggacttgactccaaccactatggaagaggctacctctggggtaacccccgggactttgccgagtaccccagtcacctcgtttcctgggattcctgacacccttcctccaggctctgcacccttagaagcccccatgaccccagtaacagatgattcaccccagaaaaagatgcttggacagaaagcaactccacccccctcccctctgctgtcagagctcttgaagaagggcagcctcctgcctactagccccagactggtcaatgagagtgaaatggctgtggcttctggccacctgaacagtacaggtgtcctcctggaggtaggcggggtccttcccatgatacatggtggggagatacagcaaacacccaatactgttgcagcctcccctgctgcatcaggtgctcccactctttcccggcttttagaagctggtcctacacagttcaccacacctcttgcttccttcactactgttgccagtgagcctccagttaaacttgtgccaccccctgtagagtctgtgtcccacgctaccattgtcatgatgcctgcgctgccagcaccatcctctgctccggctgtctccactactgaaagtgtagctccagtgagtcaacccgacaactgtgttcccatggaggctgtgggggatccacatactgtgactgtttccatggacagcagtgaaatatccatgatcatcaattctatcaaagaagagtgttttcgatcaggggtagcagaggctcctgttggatcaaaggctcccagcatagatgggaaggaagaattagatctggctgagaagatggatattgctgtgtcttacacaggtgaagagctggattttgagactgttggagacatcattgccatcattgaggacaaggtagatgatcatcctgaagtgctggatgtggcagcagtggaagcagcactgtcattttgtgaagaaaatgatgatcctcagtccctgcctggcccctgggagcatcctatccagcaggagcgggacaagccagtacctctccctgcaccagaaatgacggtcaagcaagagagactggactttgaggaaacggaaaacaagggaatacatgaactggtggacatcagggagcccagtgcagagatcaaggtggaacctgcagaaccagagccagtcatttcaggagccgaaatagtagctggagttgttccagccacaagtatggagccaccagaactcaggagtcaggacttagatgaggaactgggaagtactgcagctggagagattgttgaagcagatgttgccattgggaaaggcgatgagactccacttacaaatgtgaagacagaggcatcccctgaaagcatgttgtctccatcacatggctcaaatcccattgaagatcctttagaggcagagactcagcacaagtttgaaatgtcagactcattgaaagaagaatcagggactatttttggaagccagataaaggatgccccaggtgaggatgaggaggaagatggtgtcagtgaagcggccagcctagaggagcctaaggaagaggatcaaggagaaggctacttgtcagaaatggataatgaacctcctgtgagcgagagtgatgatggcttcagcatacacaatgctacactgcagtcacacacactggcagactccatccccagcagccctgcttcttcacagttctctgtctgtagtgaggatcaggaagctattcaggcacagaaaatttggaagaaagccatcatgcttgtatggagagctgcagctaatcataggtatgccaatgtcttcctgccagcctgttacagatgacatagcacctggctaccacagcattgtgcagaggcctatggatttgtcaactattaagaaaaacatagaaaatggactgatccgaagcacagctgaatttcagcgtgacattatgctgaggtttcagaatgctgtaatgtacaatagctcagaccatgatgtctatcacatgggcagtggagatgcagcgagatgtcttggaacagatccagcaatttcttggccacgcagttgttaatgcaaacatcacgagtctgggatcagtgctaaaagtcttcgagggagagattcttacccgcaaacaggatgcttcagagaaggacagtgtccccaatgggctctcctgcctttccttctctctctctttgatggaggaacccaggggacgcccgctgtgcccattgaagccagatatgaaagatgaaaaaagtgaaagcccctcagagttaccccctctttgagcccgaaccctaaaataaaagtaaacaagatagagcttgggcttgcgggccccagttcccagaggtggaagttacagaagaggaggtacctgggccacacgacatgagctggaaaatctctcttagagagttggagtagcacaattgcctgttttagggcagaaaccatgggctatgttaatgtcctaatgtgtagctagcagatcgtagctagtttgtattgtcttgtcaattgtacagactttttaaaaaaaaacaaccaccagtgaaatgtgtgtgtatacaataaactgaaaaaaaaaactaaaaaaaaaaaa

SEQ ID NO: 156198 - DNA, 802 bp, Homo sapiens
aaccccgcggggagaatcgttttaaagcccagccagaatggagaaaaaccccttgccaaatgatgttaagccaatctacttttaggaagaccctatatagggaaaatatttaccacaatcttggcgctccacatatgttggcagaggaactgaatatgatcatcatgcttccggacgagtaccactgacctgagcaccgttggagaaagactctactcacgcgaagttcgtagaatggacgagcctggacatgatggctgaagaggaggtgaagctgtccatcccgcggtttaaactagaggaaagctacgagcatggagagtgtcctgcgcaacctgggcatgactgatgccttcgaagctggggcaagggcaaacttctctggaatgtccccagacagacctgtctcttgtccaaaggtcgtgcacaaagtctatttgtgggaggtcaaatgagggaaggccacgggaggctgcaagcccgccaaaggttgccatccatgatgatgcggtgtgcccagattctgtcccccgcctcccgcgccggaccaccccttcctttttcttcatccagcacaggcaagaccaacggggattctattctgcggccgcttttcctctccgtgaggacagggcagtcttggtgtgcagcccctctcgtctgtgtcccctgacagtgcgcagtgtgcctgcaacccaagtggccttagtccgtgcagtggtgggcagttcagaaattaaagggcccatttgtggggattgccgcattcaaaaaaaaaaaaaaaaaaaaaaacctcgtgccg

SEQ ID NO: 156199 - DNA, 3262 bp, Homo sapiens
ggtataatctggtgaccttcagatggcagtgctttcatttgaaaaagatgatgatcataatggacacatagatttcatcacagctgcatcaaatcttcgtgccaaaatgtacagcattgaaccagctgaccgtttcaaaacaaagcgcatagctgtaaaaattatccttgtaaaaccaacaaccactggtacagtttctgggcttgtttgctttgaagatgatcaaagtaactgggggctatccatttgcagcttacaaaaattgttttcttaacttaagccattccaatttgtagtatttacagagacaactgaagtaaggaaaactaaaatcagaaatggaatatcatttacaatttgggatcgatggaccgtacatggaaaagaagatttcaccctcttggatttcataaatgcagtcaaagagaagtatggaattgagccaacaatggtggtacagggagtcaaaatgctttatgttcctgtaatgcctggtcatgcaaaaagattgaagttaacaatgcataaacttgtaaaacctactactgaaaagaaatatgtggatcttactgtgtcatttgctccagacattgatggagatgaagatttgccggggacctccaagtaagatactacttcaggtccattggacactgattaatacaagttgtcttaacgttactccaggaccacttgattttgaaaaagagtgcacttaattcagaagctaaagaaaatcagttcataatactatggatttctctttcattaagccttaattttaagggaaacatcagtaagaaactgcactgaagaattataaaacattttggggcatagcatacacttgtctaacggttcacacgtggctatgatcacaagcaactttgaactggaatgctatttacaaaagttttgtgccattaccctgtgtattaatctctctggataaaaagaaggaaaaaatatgtatgaccagaatagatatggatgaagaaattgaaagcaacgaatgcaactattcaaaaagtttaattttatgaatttcttttttgtttagtcttgaagactgattttctatgcaaatagtgtttggcatcctgcacctctgatatgatttggctttgagaatttaataccactgggaagaagtatggtagtggtggatgaagggtggatattttaaattgtgcagttacagtttactgtcctattacctctgctcgtttaaccagtttgttatatcactgtgtccccaaaatcaggatttttgttgatagcatcagtgttgtaggagcaataggtcagatgagacatattaacttagactaaacgtgaacagtattatatggactctcacaacgctcttagagaatccgtgaatgtgaacagacaaatgtggctaaccatttgagatcttcagtatgccttctaatgtggctataatatttatgtggagactctaaacctgattgtcctaatataaaaaactaaaagattttgtaaagggagtgtctttagaaatagatgaaatgtagaatgttaaaaattattgctagggtagtcttttttttttccagaaacctaattaggggtattaaattttgtgttttttttgttttttttttttaaacagaagcatgttatttcattcacattcccagaaagggagttaatgaagataaaaatttattttttaaggtctttattgagagaaactttgttttactgatatgaactattgcagatgtttttataaatactttcattaaaatgatgtaaacagtagtacccaacactgtaaactcagtgaaaatagtaaatgattcttttattactaagactgtcatgcattctgaagcagttggcttttttttaaccataggaagtaatttccctctagctcctttccttctactctcctgcttcagaccattagtaggtactttgttaaataaaaaactagattaacatcaatattactccaatttggtatcttttacactatgtattatacctactttctttttatttcatttacaaatagtttaaattactttatcaaccagctgtattgtttccctcttgtaaaaagtacccatcaagtggggaaaatgtatgtggaagtggagagtgaatttgtatgactaaaggataatctcgtacatgggggaagtggggcaaaagtggataggatgaatttaaagaaaatgactacctttggaaaaaagaaattaaattttgttcacatatcctaccctttcccgattgtgcatatcccaagtgtcatatttaaaactaaggttacttaaaacagaatccaggaatatcaaggctctgtggcttggaattttagaggataggactaataaaaggacttttgcaaagaaggctttttcccacgttcacttggtttggtgttccttggaaagtaactgatacttttcgggtagttaattcagcagtcccataaatatgatccagtaacttgctgtatatttttattgaagtcctcggacaagcctcttcaggaagtaaatttagaaccgatgctgtcagttcatatttatagatattagtgttttagcagataaaacaaaatcaacaaaaattaagttcattttggtgattaaacctggccaaccatttttccattactttttttctatagttaatggttattgccatgatttcttctgtttggttctactaagctagaaagccagggtgaagttaatgataattcccattattttatttctgtaccatgagattgctgttgatgactgaaataccaggtgcaaaaattaatgatttgatttttgtaccagtttcaatgagtattttttacttattaaaaataaattaagaaatgtaaagaatatctttgtaaaatccatgtttcataagttgactcccagagattctgattttgctgtttattttgtgagtaatgttgctttggtgtttcctgattttcaagtttgcaatcatggagatacagcagttattaggtgtggaaggacattacctcaaatgtcctcagatggctccaggaaattcttttaaaacagttggagagaaatagtcgtgaccatgtaaaacctagaggatctggtaaatcccatactactggttagggatttgtaaagtccatttctttttagagttcaaagcagttctgttacttgtccataagttcctcataaattgtcccaaaggtaggacatggaaataaatgtatatctttattttttaatct

SEQ ID NO: 156200 - DNA, 478 bp, Homo sapiens; identical to SEQ ID NO: 127116
  misc_feature (1)...(478): n = a,t,c or g

SEQ ID NO: 156201 - DNA, 1454 bp, Homo sapiens
ggaaattccccaccttctgagctcaagtggaaggcaaagtctgaagaccttagacaccgaggcctgaaggcacaggcggagattaagggctcaacccagcagatcggcttcaccaccgaccctcggatggcccgctcctccccctaccccactgacgtggcccgagtggtgaatgcccccattttccacgtgaactcagatgaccccgaggctgtcatgtacgtgtgcaaagtggcggccgagtggaggagcaccttccacaaggacgtggttgtcgatttggtgtgttaccggcgcaacggccacaacgagatggatgagcccatgttcacgcagccgctcatgtacaagcagatccgcaagcagaagcctgtgttacagaagtacgctgagctgctggtgtcgcagggtgtggtcaaccagcctgagtatgagtgtgtctctatgcatggagtaagaaacaaaccatcctacaatagcaccaaatccagcatggatggactcatcctccaccctgctactggacttgtctttgtactctcaaagcagtgtgaggagattcatcaaccggtggtgtggacatgtgaacagcgtgaggcagagaacgccaccgccgaggaaaaccgtgtactattagccatggtcaaccccaccgtgttcttcgacattgccgtcgacggcgagcccttgggccgcgtctcctttgaggtcgggcgggcggcggcgtgcgggaatggggcccagaaagtgggccggggtcgggaaaattttccgtgcctctgagccactggagagaaaaggattttggttataaggggttccctgctttcacagattatttcccagggttttatgtgttcagggtggtgaacttcaacaacgccattaatggccactggtgggcaagccccattctatggggaagaaaatttgaaagattgaagaacttccatccctaaagcataccgggtcccctggcatcttgtccccatggcaaaatgctggaccccaaaccacaaatgggttccccagtttttccatctgcactgcccaagactgcagtggttggaatggccaagccatgtggtgttttggcacaagtgaaaggaaggccatgaatattgtggaggcccattggagccgctttggggtccaggaaatggcaagacccagcaaagaagatccccatttgctgactgtggacaactcttaataagtttgacttgtgtttttatcttaaccaccaagatcatttctttttgtaggctcaggagagcaccccttcaaccccatttgctcgcagtatcctagaatctttgtgctctcgctgcagttccctttggtttccatgttttccttggttcccttcccatgcctagctggattgcagcagttaaagtttatgattatgaaataaaaactaaataacaataaaaaaaaaaaaaaagggggcc

SEQ ID NO: 156202 - DNA, 400 bp, Homo sapiens
aagggagctgagcacataacgacttacacgttcaatactcacaaagcccagcataccttctgtaagagatgtggcgttcagagcttctatactccacgatcaaaccccggaggcttcggaattgccccccactgcctggatgagggcactgtgcggagtatggtcactgaggaattcaatggcagcgattgggagaaggcctgaatgtggctgacctgggctgctggttccgtggactagggtcatcttgatctctgcagtttgctccagctaccagtttctttaggcagctctttgtcctccctctgcccagattttgatgtagtctaattgacatccttctcttcccgacttttgtgtgatcttttaggaaaaaaaataaatatttttaacattaaaa

SEQ ID NO: 156203 - DNA, 1137 bp, Homo sapiens; identical to SEQ ID NO: 123797

SEQ ID NO: 156204 - DNA, 1940 bp, Homo sapiens
attctcctgccttagcctcctgaaaagctgggattacagggccctgccaccaagcccagctaattgtatttttagtagagacaggatttcaccatgttggccaggccagtctcaaactcctgacctcaggtgatccacctgcctcagcctcccagactgttgggattacaggcatgagccaccacgcctggccagtttcttcattttacatatggtcacattgggcgcctaggaacagttaggtcgctcgtcacatagggcagttaagtgggagaaccaggttttcaaaatcaggtaaggaaaaccatcattcatttaacttgaggcaccagctgtgcttaaggccttgccacgggcgttattccttggcaggccttcacaacagtgggaggtctgtatcctgaatgtcctcattttacagatgaggacattgaggagaagagacttacccagggctcacacagcagctcagcctgttccaggggcctggtcagtgcgtgttctttgccacccagccttgtcactccagtggccagcttccagaaacggaggctgttgcttttatccctaaactgcatccacagagaagccccaagaaggaggttggggccagctcataaaaagcctgaatgccaagccaaggagtggatgcctccagtcatatttagaacaaagtcaagtataaatttacagagaaaaaattctaagacagttggatgttgtcctgttggtgaggaagggaaaggtttttcttgtagggaactggaaccagcccactactgcacgcttgtgagctgtcatggaaacctgatccccaacagcttttgaggttgtttgtttgactgtttgtttacctgacttggactctaggaggttttggcaaaaggtacttcaaacaggggagggcctggactgagggggaccaggtcttcttgctgacctcgtctacaaaggcaaaggaaggcaaaggaagctgtctcgggtgtttctgaacaacgtgactcatgaggggctttggctacctcttgcgttccccctagaagatgtccagggccttacatttaaatcggcttttctcttgcggtggggtagagaatgggagctcccgccttgcgggcagtgctaaaggtggagctgggggattttcctgggaatgatttgagggctcttgaaagcccatgtgttccaaagcgtctttaactctgggatagcattggaagccgctgtcatgacaggacatggcactggatggctggcagagaagccctggctgggagttaagggagccctgggttggaatccagccccacctcttttatgccacaggttttggtcaagtttctctcccgctcagggtaagggctgtgaactccctcttacagctaagaaccatgcaggcttagtgaggacaagacccttctaagaagctttacccctaatccccccccaaggaagcccccgaggcccggcattattcctccccaattacagggggatgagccctcaaattccagagagccttaaagcaaccctgcctcagggtccacgtcctcccaacagggcagttagagtcaaggtataaaaccaaggtctgtttttgtacccagagtcccagactaactgttggtaggaatcttgtaaccagtcatgtattcttccttgttttggccgctgggaagctcaaaggtcaaattcgagaccctttttttttccaattgtgctgagtctcctactagactcgcttcattctagctttctgcttttacctttaccctaatctttttatttttatgctattgtactttatttttgtaagttgctgagatatcatgttttgcaacaagatgggctatatcctaaactaaagacatgatcaaaggaaaaaaaaaaaaaaaaaaaaaaaaaaaaaaaaaaaaaaaaaaaaacctcgggggggggcc

SEQ ID NO: 156205 - DNA, 872 bp, Homo sapiens
  misc_feature (1)...(872): n = a,t,c or g
accttgaggaccttagtccgngtggtggaattcccggtgctcaccatggcggccaccagtggcattttgtcagcacttgggaacttcctggcccagatgattgagaagaagcggaaaaaagaaaactctagaagtctggatgtcggtgggcctctgagatatgccgtttacgggttcttcttcacagggccgctgaagtcacttcttctacttcttcatggaacattggatccctcctgaggtccccctggcaagggctcaggaggcttctcctggaccgcctttatctttgcaccgggccttcctcatgttgttcttcctcatcatgaactttctggaggggaaagacgcctccagccttcgccgccaagatgaggggggggcttctggccggccgctgaggatgaaacttgccgggtgtggacgcccactacagttcatcaacatccaactacgtcccttttgaaagttccgggtgcttcttcggccaacctggccagctcttgttctggtatgcctacctggccctccttggggaagtgacgacccgctgggagaacatcaggtgcacatgtggacgtgggtctgggggtcttcacccgcccaagcgagagcagaaaccaatccagtcaggatgtcactgactctaaatcaggtgattcaagatgcccaaaaatgattggatagagaaaccagaaatctctgaaatgtcagaaccctgtcttttaaaaaggcagtcgctgccttcatggtggtgctgccccagaaacttaaaatttagtcgaggcagtttcaattgttactgtggaccgaattaggatcacaataaacgataatgcaggttcttcaatggtgaaaaaaaaaaaaaaaaa

SEQ ID NO: 156206 - DNA, 1206 bp, Homo sapiens
tgttagattttttttgttttgagagctggagtctcgctctgtcacacaggctggagtgcagtggtgcgatcttggctcacgtgcaacctccacctttgtgttcaagcaattctccttcctcagcctcctgagtagctgggattacaggcatgtgccaccatgcccggctaatgtttgtattttagtagagatggggttggttggccaggctggtcttgaactcctgatctcaagtgatacgcccatctcggtctcccaaagtgctgggattataagcgtgagccatggcacccagcctcacataggaaacttcttagagcaacttaaagttgttcaactatgttatacgtctttcttatgttttactaagtctagtacagtaaaacatatacaattaattattattaaaatcaccttaagaaatactaaaaacaaggccagaatataagaaataaaatattgagagcctattaacaaactcagcttgtgagtgatttcagggaatggaaagttgagtcaaaaaaaaataggaaagattttaacagctttctgtggattttattatagattttatgtggagtaatccacagaatatgtaagactagtaggtactaggcactcaaaaaatgtttatcatacatatacttctgaatagttgtcaagaaaaaagcaattttaaacatggcttacgttacgcagaaattgcctggtttaagggccatcatgtgacttgagaagttttgacagtttgatgtatacagattatgaatgttaaactcttgtaccacagtataatcctttgtctattagtaatagatattcaagtcctcaaacatgccttaccctaggcgtgcaccttttgaatgttctcattaagccaaggaaagtcttggaacctccgtaagattattagtgtgccttgtcaagctcaaggtatgtaacaatacatatctatagtgcagataaaacaagaatatactagaatgtgtctgctctgaaaaagcatcccagctcaaataagtttagaaaacaataaatcaaagctaaacaactcttgtaatgaaaggacttctcagagcccctaatttgctgatccatactaagggtattggtatttaaaattatttacctgtaaagaacttttttccaagacacactaagcagagaaaagcaataacctctacacatattggttccaatttcttg

SEQ ID NO: 156207 - DNA, 598 bp, Homo sapiens; identical to SEQ ID NO: 148335

SEQ ID NO: 156208 - DNA, 1573 bp, Homo sapiens; identical to SEQ ID NO: 148336

SEQ ID NO: 156209 - DNA, 3859 bp, Homo sapiens
atggtgggagaactccgctacagggaattcagggtgcccctggggcccggcttacatgcctatcctgatgagctgatccgccagcgcgtgggccatgatgggcatcctgagtaccagatccgttggctcatcctgcggcgtggcgatgagggggacgggggctctggccaagtggactgcaaggctgagcacatcctgctgtggatgtccaaggatgagatctatgccaactgccacaagatgctgggcgaggatggccaggtcatcgggccctcccaggagtctgcaggggaggttggggccctggacaaatctgtgctggaggagatggaaaccgacgtgaagtccctcattcagagagcccttcggcagctggaggagtgtgtgggcactatccctcctgctcctctacttcacactgtccacgtgctcagcgcctatgccagcattgagcccctcactggagtattcaaggacccaagggtcctggacttgctcatgcacatgttgagtagtcctgattatcagattcgctggagtgcaggccggatgatacaagccctgtcctcccatgacgctgggacccggactcagatccttctgtcactgagccaacaagaagccattgagaaacacctggattttgacagccgctgtgctctgctagcactgtttgcacaggccacgctctctgaacaccccatgtctttcgagggcattcagctaccacaggtcccaggaagggtgctcttctccctggtgaagcggtatttgcatgtcacctcgctcctggatcagctgaacgacagtgctgcggagccaggagcccagaacacctctgctcctgaggagttgagtggggagaggggtcaactggagctggagttcagtatggccatgggcaccctgatctcggagctggtgcaagccatgcgctgggaccaggcctcagacagaccaaggagctcagcacggtcccccggttccatcttccagcctcagctggcagatgtgagcccagggctccccgctgcccaggctcagccctccttcaggaggtcaagacgttttcgccctcgttctgagttcgcaagtggcaatacctatgctttgtatgtgcgggacacactgcagccggggatgcgagtgcggatgctggatgattatgaggagatcagtgccggggatgagggcgagtttcggcagagcaacaacggtgtgcctcctgtgcaggtattttgggagtcaacaggccgcacctattgggtgcactggcacatgctggagatcttgggctttgaggaagacattgaggacatggttgaggctgatgagtaccaaggggcagtggccagtagagtcctgggtagagccctgcctgcctggcgctggaggcccatgacagaactctatgctgtgccttatgtgctgcctgaggatgaggacactgaggagtgtgaacacctgaccctggctgagtggtgggaactcctcttcttcatcaagaagctggatggacctgaccatcaggaggttctccagatcctccaggagaacctagatggggagattctggatgatgagatcctagctgaactggccgtgcccatagaattggcccaggacttgttgctgactctgccacagcgactcaatgacagtgccctcagggacctgatcaactgccatgtctacaagaagtatgggcctgaagccctagcagggaaccaagcctacccatcccttctagaagcccaagaagatgtcctcctgctagacgcgcaggcccaggctaaggactcagaagatgcagccaaagtggaagcaaaagaacccccatctcagagtcccaacactcccctgcagcgtctggtggagggttatggtccagctgggaaaatcctcctggatctagagcaagccctcagctcagaggggacccaggagaacaaggtcaagccactcctgctgcagctgcagcggcagccgcagcccttcctggcactgatgcagagcctggacactccggagactaacaggaccctgcacctgactgtgctgagaatcctgaagcagctggtggacttccccgaggcactgctgctcccctggcacgaggccgtggatgcctgcatggcctgcctgcggtccccaaacactgatcgagagcacccagtacacagagtacacagtggtacctgctactgcagtgcccctgtggccttcgccctgtttcattcatctcctcccttatgtccccacccaggtgctccaggaactgatttcttcctgcaccgcctgacctcagtgagcagggactatgccgtggtgctgaatcagctgggagcaagagacgctatctccaaggccctggaaaagcacctgggaaagctggagctggctcaggagctgcgggacatggtgttcaagtgtgagaagcatgcccacctctaccgcaaactcatcaccaacatcctgggaggctgcatccagatggtgctgggccagatcgaagaccacagacgaacccaccaacccatcaacatccctttctttgatgtgttcctcagatacctgtgccagggctccagtgtggaagtgaaggaggacaagtgctgggagaaggtggaggtgtcctccaacccgcaccgggccagcaagctgacggaccacaaccccaagacctattgggagtccaacggcagcgccggctcccactacatcaccctgcacatgcgccggggcatcctcatcaggcaactgactctgcttgtggctagtgaggactcgagttacatgccggcccgagtggtggtgtgcgggggtgatagcactagctctcttcacacggaactcaactcggtgaatgtgatgccctctgccagccgggtgatcctcctggagaacctgacccgcttctggcccatcatccagatccgcataaagcgctgccagcagggtggcattgatacgcgcattcgggggttagagatcctaggccccaagcccacgttctggccagtgttccgggagcagctctgtcgtcacacacgcctcttctacatggttcgggcacaggcctggagccaggacatggcagaggaccgcaggagcctcctgcacctgagttctagactcaacggtgctctgcgccaggagcagaattttgctgaccgcttcctccctgatgacgaggctgcccaagctctgggcaagacctgctgggaggccctggtcagccccgtggtgcagaacatcacctcccctgatgaggatggcattagccccctgggttggctgctggaccagtacctggagtgtcaggaagctgtcttcaacccccagagccgcggcccagctttcttctcgcgggtgcgccgtctcactcacctgctggtgcatgtcgagccctgtgaggcaccccctcctgtggtggccactcctcggcccaaaggcagaaacagaagccacgactggagctccttggctacccggggccttccaagcagcatcatgagaaacctgacgcgctgttggcgggccgtggtggagaagcaggtgaacaattttctgacctcatcctggcgggatgatgactttgtgccacgctactgtgagcactttaatattctgcagaactcaagctctgaactgtttgggcctcgggcagccttcttgctggcgctgcaaaatggctgtgcgggagccttgctgaagctcccttttctcaaagctgcccacgagcagcaagaaatggcacagcaggaacgaaagcaacagcaggagctgcacctggccctgaagcaagaacgtcgggctcaggcccagcagggccatcggccatacttcctgaaaaaat

SEQ ID NO: 156210 - DNA, 3138 bp, Homo sapiens; identical to SEQ ID NO: 145008

SEQ ID NO: 156211 - DNA, 1094 bp, Homo sapiens
ggcgggggcctggagcccgcggccgtggcccgcgacctattgaggggcacatctaacatgggatttgaggagctgttggaattgcagagccatgtggggactattacgtacaaacaattggtagctggaaacagtcctaagaaacaaggttctagaccacctatccaaaatgcatgtgttgcagataagcacaggcctctggaaatgtcagccaagatccgagtaccatttttacgtcaggttgttcccattagtaaaaaggtagcccgggaccctcgctttgatgatctgtcaggggaatataatcctgaggtgtttgacaaaacataccaattcttgaatgacatccgagcgaaagagaaagagcttgtgaaaaaacagttgaagaagcacctttcaggagaggagcatgagaaactgcagcaactgcttcagcgaatggagcagcaagaaatggcacagcaggaacgaaaagcacagcaggagctggcacctgccccttgagccaaaacgtcgggctcaggcccagcagggccatcggccatacttcctgaaaaaatctgagcagcgccagttggcactagctgagaagttcaaggagctgaaacgcagcaagaaattggagaacttcttgagtcgaaagaggcgacgaaatgcaggcaaggacaggagacatctccctttgagcaaagagtaataaggaactatcctctgctctgccactgccccagggagacatggaatcttgtgaggacagatttggccacggctggtttcccgttcaagggcaaggatcacagctgcccttgaatctcattgccttcagagaagactagagggctcttggactatccctagggctacacaagaatagttcagccttttgcccatgccacaaagcctcagcttgaatctggttaattgcgtcctcgtgttctactaatcatcattgccttaaaccagggattctgatacccgagaagaaggggccaatgaaaaccatggagtctgttcgtgactcccagggctgggacattatgtaggagccacttcataaacattctctttactcatctttttaaaaaaaaaaaaaa

SEQ ID NO: 156212 - DNA, 348 bp, Homo sapiens
ctaatcaagctgaacactagttgctaggttccacggttctcttccgtgacccacggcttctaatagagctataacactcaccgcatggcccaagatttcattccttggaatctctttcacttctttttctgttgataaacccgtttggcttccagcttctccagcacctgtgtaaacaattcctgtacccaaattgaatttcttctcttgtaaatacttaaagtggtttctgatttctttgctagatcctggaagaacactttccactttcaaattcttcataagggccttagtcttcaccacgggctggaagacgcgtatgatgtggccagtcgcggatccttccat

SEQ ID NO: 156213 - DNA, 645 bp, Homo sapiens; identical to SEQ ID NO: 126042

SEQ ID NO: 156214 - DNA, 2055 bp, Homo sapiens; identical to SEQ ID NO: 117491

SEQ ID NO: 156215 - DNA, 510 bp, Homo sapiens
atggtggtaagcctcgtgttctctgacctggggttcttggcctcacggattccaaggaatggaatcttcggccatgcagaacccaggccagctctaggactcacccctgagcacaaaggcaatgatggggatgctggtagaggaccactagaatccagcagctcggacccctttctttgtggtcaagaaaggcgggaaaacagggtcaccgtcgacagcgacacacttgcattggatgcagcccggttaacgtgccggcacggcttgggtaaccaggtattttgtccacataacggtgcgcaaaatgttgtggataagcagtacacagcagcaatccacagcaggcatacaaccgcacacggaggttactccgttctacagacacctgcatattctggtctgaatgactttagttcatccaacaaatcagacttccgcataggcatgcctttggaagtactgtattatatcatctgtgtggaaagcccactttcctggctgtccatctga

SEQ ID NO: 156216 - DNA, 408 bp, Homo sapiens
ctaatcaagctgaacactagtcgctgggttccatggttttcttccgtgacccacagcttctaatagagctataacactcaccgcatggcccaagattccattcttggaatctggaggcagatcctgtattttgggaatataaaagcactccctgaagtgcctcagcttatcttcctcatctaggtggagagccaccctctcatccgttgggtggcatttgagttcagccgcaatgcgctgcactgtgtcagccggcagctcaagagatgaaggctccattacaagttgttctctaaaacctggccccagcacacactcgcctgcatgctccccctcccacaagcagctgagtaagtgaagcacacccaggtcgcaaatcctctgaaggggtccagggagctctcccat

SEQ ID NO: 156217 - DNA, 496 bp, Homo sapiens
ttttttttataaatatatgtatatattttatttacattatatacatggcatatctatacagttacatttacacttgacttagagtcaaagtcatatacacacacacaggacttggactcaaagcttttaatgacaagcatgcaaaatttcttagtatagaccctaagagtacccttaatataagtatgtttatttaaaaattctatgtatctactactgttaccagggggtccttgctcccagagctcccaagatggtggcaggccacttccaaaatggtggcaagcctcatgttctctgacctgggggttcttggcctcacggattccaaggaatggaatcttgggccatgcggtgagtgttatagctctattagaagccatgggtcatggaagagaaccgtggaacccagtgactaatgttcagcttgattaggatgaacccaggcacttagccgtgcaggaacaatggcaagcctttagcccgatcgggagcg

SEQ ID NO: 156218 - DNA, 726 bp, Homo sapiens; identical to SEQ ID NO: 122059

SEQ ID NO: 156219 - DNA, 792 bp, Homo sapiens
ctaatcgagctgaacactagtcactgggttccacggttctcttctgtgacacacggcttctaatagagctataacattcaccgcatggcccaagattccattccttggaatccatgaggacaagaaccccaggtcagagaacacgaggcttgccaccatcttggaagtggctggtggccattctgggagctctgggagcaaggaccccccggtaacagtaccacagcaagtagggtggtcctgctgttttgatggttctcccacccccaggctatgggcctccccaagttccatgagcccaacagcagaggagcagaagagcggcacggcagaggagagaagagaaggagcatctgaacatggagaggagtttggctggggacggttggagagatcggccgtggaatggctgaactctaggggaagatcatcttcccactccatcccctttccagctccccgtccatcctgctgagagccacctccatctggcgataaaattcccccacatttaccataattcaatttgtccatgtgacctgattcttcctggatgccagacaaggacccggataccaagagggcactgagctggttaactcttaagctgtctgcagatggcagagccacaatcaccagtttctgcaagagagcaatgaacacaatgggcctggtaggtatttttcttggtctcttggtgcttctgggggttgcaagaggctctactttgggttccacttctaatgccattagctgtgtgactctatcagccacacagcttctgtaagtcat

SEQ ID NO: 156220 - DNA, 4172 bp, Homo sapiens
ttttttttttttttttttaaaaaatttggctccatttaataaaaaataattttaaaatagtataaaccatgaaagtatacgtactgccaggaaagtataaatataaccggggaagtataagtataaccaatgaaagtataagtactgccagtgttaccaggggtccttgctccgagagctcccaagatggtggtgggccacttccaaaatggcggcgggccgcttccaaaatgggatggtggcaagcctcttgttctctgacctggggattcttggcctcacggattcgaaggaatggaatcttgggccgtgcggtgagtgttatagctctattagaagtcgtgggtcacggaagagaaccgtggaacccagtgactagtgttcagcttgattaggacgaacccgggcacttagccatgcaggaacaatggcgagcctttagcccgattgggagcggcaatgggcgccttgctatatcagaaacgcagcggacaccctgccatatctggaggggtggaagtcagcgatgggtctgcaacggtggcaaacagcagtggtggacgatatgtgaaagaggccaaagaagcaactaagaatggagacctggaagaagcatttaaacttttcaatttggcaaaggacatttttcccaatgaaaaagtgctgagcagaatccaaaaaatacaggaagccttggaggagttggcagaacagggagatgatgaatttacagatgtgtgcaactctggcttgctactttatcgagaactgcacaaccaactctttgagcaccagaaggaaggcatagctttcctctatagcctgtatagggatggaagaaaaggtggtatattggctgatgatatgggattagggaagactgttcaaatcattgctttcctttccggtatgtttgatgcatcacttgtgaatcatgtgctgctgatcatgccaaccaatcttattaacacatgggtaaaagaattcatcaagtggactccaggaatgagagtcaaaacctttcatggtcctagcaaggatgaacggaccagaaacctcaatcggattcagcaaaggaatggtgttattatcactacataccaaatgttaatcaataactggcagcaactttcaagctttaggggccaagagtttgtgtgggactatgtcatcctcgatgaagcacataaaataaaaacctcatctactaagtcagcaatatgtgctcgtgctattcctgcaagtaatcgcctcctcctcacaggaaccccaatccagaataatttacaagaactatggtccctatttgattttgcttgtcaagggtccctgctgggaacattaaaaacttttaagatggagtatgaaaatcctattactagagcaagagagaaggatgctaccccaggagaaaaagccttgggatttaaaatatctgaaaacttaatggcaatcataaaaccctattttctcaggaggactaaagaagacgtacagaagaaaaagtcaagcaacccagaggccagacttaatgaaaagaatccagatgttgatgccatttgtgaaatgccttccctttccaggaaaaatgatttaattatttggatacgacttgtgcctttacaagaagaaatatacaggaaatttgtgtctttagatcatatcaaggagttgctaatggagacgcgctcacctttggctgagctaggtgtcttaaagaagctgtgtgatcatcctaggctgctgtctgcacgggcttgttgtttgctaaatcttgggacattctctgctcaagatggaaatgagggggaagattccccagatgtggaccatattgatcaagtaactgatgacacattgatggaagaatctggaaaaatgatattcctaatggacctacttaagaggctgcgagatgagggacatcaaactctggtgttttctcaatcgaggcaaattctaaacatcattgaacgcctcttaaagaataggcactttaagacattgcgaatcgatgggacagttactcatcttttggaacgagaaaaaagaattaacttattccagcaaaataaagattactctgtttttctgcttaccactcaagtaggtggtgtcggtttaacattaactgcagcaactagagtggtcatttttgaccctagctggaatcctgcaactgatgctcaagctgtggatagagtttaccgaattggacaaaaagagaatgttgtggtttataggctaatcacttgtgggactgtagaggaaaaaatatacagaagacaggttttcaaggactcattaataagacaaactactggtgaaaaaaagaaccctttccgatattttagtaaacaagaattaagagagctctttacaatcgaggatcttcagaactctgtaacccagctgcagcttcagtctttgcatgctgctcagaggaaatctgatataaaactagatgaacatattgcctacctgcagtctttggggatagctggaatctcagaccatgatttgatgtacacatgtgatctgtctgttaaagaagagcttgatgtggtagaagaatctcactatattcaacaaagggttcagaaagctcaattcctcgttgaattcgagtctcaaaataaagagttcctgatggaacaacaaagaactagaaatgagggggcctggctaagagaacctgtatttccttcttcaacaaagaagaaatgccctaaattgaataaaccacagcctcagccttcacctcttctaagtactcatcatactcaggaagaagatatcagttccaaaatggcaagtgtagtcattgatgatctgcccaaagagggtgagaaacaagatctctcgcagtataagaggtgaagtgttaccaccttgcaagatggtaaaggtacaggtagtgctgactctatagctactttaccaaaggggtttggaagtgtagaagaactttgtactaactcttcattgggaatggaaaaaagctttgcaactaaaaatgaagctgtacaaaaagagacattacaagaggggcctaagcaagaggcactgcaagaggatcctctggaaagttttaattatgtacttagcaaatcaaccaaagctgatattgggccaaatttagatcaactaaagggatgatgagattttacgtcattgcaatccttggcccattatttccataacaaatgaaagtcaaaatgcagaatcaaatgtatccattattgaaatagctgatgacctttcagcatcccatagtgcactgcaggatgctcaagcaagtgaggccaagttggaagaggaaccttcagcatcttcaccacagtatgcatgtgatttcaatcttttcttggaagactcagcagacaacagacaaaatttttccagtcagtctttagagcatgttgagaaagaaaatagcttgtgtggctctgcacctaattccagagcagggtttgtgcatagcaaaacatgtctcagttgggagttttctgagaaagacgatgaaccagaagaagtagtagttaaagcaaaaatcagaagtaaagctagaaggattgtttcagatggcgaagatgaagatgattcttttaaagatacctcaagcataaatccattcaacacatctctctttcaattctcatctgtgaaacaatttgatgcttcaactcccaaaaatgacatcagtccaccaggaaggttcttttcatctcaaatacccagtagtgtaaataagtctatgaactctagaagatctctggcttctaggaggtctcttattaatatggttttatatccacgtggaggacatggaggaaagacttgacgacagcagtgaagcaaagggtcctgaatattatccagaagaaggggtggaggaaagcagtggcgaaacctccaagtatacagaagaggatccttccggagaaacactgtcttcagaaaacaagtccagctggttaatgacgtctaagcctagtgctctagctcaagagacctctcttggtgcccctgagcctttgtctggtgaacagttggttggttctccccaggataaggcggcagaggctacaaatgactatgagactcttgtaaagcgtggaaaagaactaaaagagtgtggaaaaatccaggaggccctaaactgcttagtt

SEQ ID NO: 156221 - DNA, 309 bp, Homo sapiens
cggaaggaatagtagatttttgctagtacagcaccaaagagatcttgggcccgtctggggcccccccagattcttgtcagcgtggcgacaaaagcctcttttggggcgcccacaatcccatcccgtgcctggaccccagagcgtgtttgccaacagtgacctcttcccagccccgcctcagatcccatctcggccagttcggatccccccagggattcccccaggagtgcccagaagaccccctgctgcgcccagccggcccaccattatccgcccagccgagccatccctgctcgactaggcctcgag

SEQ ID NO: 156222 - DNA, 403 bp, Homo sapiens
  misc_feature (1)...(403): n = a,t,c or g
taaaactttgtattagtgtaacatactccccacagtctacttttacaaacgcctgtaaagactggcatcttcacaggatgtcagtgtttannnnnnnnnnnnnnnnnnnnnnnnnnnnnnnnnnnnnnnnnnnnnnnnnnnngaatgaggaaacaaaccaccctctgggggtagtttacagactgagtgacagtactcagtatatctgagataaactctataatgttttggataaaaataacattccaatcactattgtatatatgggcatgtattttttaaattaaagatgtctagttgctttttataagaccaagaaggagaaaatccgacaacctggaaagatttttgttttcactgcttgtatgatngttcccattcatacacctataatctctaacag

SEQ ID NO: 156223 - DNA, 491 bp, Homo sapiens
  misc_feature (1)...(491): n = a,t,c or g
cccacgcgtccgggaatgggctgagagtggtgtttgctttctccaccagaagggcacactttcatctaatttggggtatcactgagctgaagacaaagagaagggggagaaaacctagcagaccaccatgtgctatgggaagtgtgcacgatgcatcggacattctctggtggggctcgccctcctgtgcatctctaacaagaggccctttgaactgccttgtgttctgtgagaaacaaatatttacttagagtggaaggactgattgagaatgttccaatccaaatgaatgcatcacaacttacaatgctgctcattgttgtgagtactatgagattcaaatttttctaacatatggaaagccttttgtcctccaaagatgagtactagggatcatgtgtttaaaaaaagaaaggctacgatgactgggcaagaagaaagatgggaaactgaatanagccagtgatcagcatcattggaacatgggggac

SEQ ID NO: 156224 - DNA, 1307 bp, Homo sapiens
aagcaaagtacctcatcccctcagtgactaagaatcgcagtgtttaagaggtagcaggaatgggctgagagtggtgtttgctttctccaccagaagggcacacctttcatctaatttggggtatcactgagctgaagacaaagagaagggggagaaaacctagcagaccaccaatgtgctatgggaagtgtgcacgatgcatcggacattctcctggtggggctcgccatcctgtgcatcgcggctaatattttgcttttatttccccaagggggaaacaaagaatgcctcccgaaaaccacctcagccgctttcgtgtggttcttttctggcatcgtagggaggttggcctgctgatgcttcctgcccagcattttgttcttcattggggcttggaacaggatgactgcttgtggcttgctgtggccatgaaaacctgtggcaaacgatgtgcgatgctttcttctgtaattggctggctctcaattggaatttgcaggatctgggctactgtggtccattgtgggcagccccttggcttagccagaaaggacccattatgtcttgattcccctcgggccagtggaaactacaacctttgccaagcaccgaggggccagtaaccttctggataacctcaacatggtccggagtgcactgaacccaagcacatttgtgaaatggaatgtatctctgttttctatcctcttggctccttggtggacctgaactcatcttgtgtcttattcaagtaataaatgggagtgcttgggaggcatatgtgggcttttgctgctctcaccaacagcaatatggacttgctaaaagaaccaacccagggacagagccacaatctttcctctattttcattgtaatttatcatatttgcacttgtattcaatttgttaaaactttgtattaggtgtaaacattactccccacagtctacttttacaaacgcctgtaaagactggcatctttcacaggatgtcagtgtttaaatttagtaaacttcttttttgtttgtttatttgtgtaacatactccccacagtctacttttacaaacgcctgtaaagactggcatcttcacaggatgtcagtgtttaaatttagtaaacttcttttttgtttgtttatttgtttttgtttttttttaaggaatgaggaaacaaaccaccctctgggggtagtttacagactgagtgacagtactcagtatatctgagataaactctataatgttttggataaaaataacattccatggcacatatatacaatagtgattggctttagagcacaat

SEQ ID NO: 156225 - DNA, 1118 bp, Homo sapiens
cgagggcccgtccttctggatacctcaactgggcccggtgcaatgaacccaagccaattgggaatggaatgataccttgttttccaacctctggcttctggtgggattgaattcatcttgtgtcttattcaagtaataaatggagtgcttggaggcatatgtggcttttgctgctctcaccaacagcaatatgactgctaaaagaaccaacccaggacagagccacaatcttcctctatttcattgtaatttatatatttcacttgtattcatttgtaaaactttgtattagtgtaacatactccccaccagtcacttttacaaacgctgtaaaagactggcatcctcacaggaatgtcagtgtttaaatttagtaaacttcttttttgtttgtttatttgtttttgtttttttttaagggaatgagggaaacaaaccaccctctggggggtaggtttacaggactgaggtgacagtactcaggtatatctgaggataaactctattaatgttttggggataaaaataacattcccaatcactattgtatatatggtggcatggtatttttttaaattaaggatgtctaagttgctttttagtaagaccaagaaggagaaaatccgaccaacctggaaaagattttttgtttttcactgcttggtatgatgtttcccccattcataccccctataaatcttctaacaaggaggccctttgaacctgccttgtgttcctgtgagaaaccaaatatttacttaggagtgggaaggactgattgaggaatgttccaatccaaatggaatgcatcacaacttacaatgctgctccatttgttgtggagtactatgaggattcaaagtttttctaacatatggggaaagccttttgtcctcccaaaggtgaggtactagggggatccatgtgttttaaaaaaaggaaagggctacggatgactgggcaagaagaaaagatggggaaactgaataaagcagttgatcagcatcattggaacatggggacgagtgacggcaggaggaccacgaggaaataccctcaaaactaacttgtttacaacaaaataaagtattcactaccaaaaaacccacgcgtccgcc

SEQ ID NO: 156226 - DNA, 1205 bp, Homo sapiens
gagattgagtctcactcttgttgcccaggctgcagtgcaatggcacaatctcggctcactgcaacctccgcctcctgggttcaagcgattctcctgcctcagcctcccgagcagccaagaccacaggcacacaccaccatgcccagctaatcttttgtatttttagtagagacgaggcttcaccatgccggccaggctggtctcaaactcccgacctcaggtgaaccccctcctcggcctcccaaagtgctaggatcacaggcgtgagccaccgtgcccggtgctgggattctaattcaacaatttttcttggtagtcttgccaacagtaattggagaaacgtgttcctaattgttggtggggagaggattaaaggtaagcacacacattttaatacacattcaatgtctgaatttgaagaataaaaatgcattgctttccccacttaaaaagaggttaaattcggttccggttatttgacacagcaaagacatacaaatgtacatggcaacaggcaagttatataagctggttctttagatcaaactaaaattctagtattttcctgacccaaactaagttccaaaagtacctaaaagaaaatgaaacaggcaaatgatgaaatgtggatctttttcattccaagaatatggaaactcattggactgaaaaacccaaatcttcattataccaaacttctataatgatcttaatggtagttagctttaaaaaaacacaaaataggctgggcgtggtggctcaggcctgtaatcccagcccattgagatacttttttactcagtttttttctaagaatggattttcctctttatgaaaacaaaatattccttttctttataaaactttataggcaaatttatcaagctggtaaattccataacaggctgaaccaaatgaaatacctaagtaaagcaaattacatgattagaaggctaattatggtattactgcataggtttagtattaatgcatatgttctaagtttattgcaactacactatcttcgtaattttagatttgcagttgcatcctcctaactgcgtctaatggcagaagcaccaccttgtggcaaaagtaggagcttttaaattacagaagttagggcctgttacccagaaaggagaaagcaatataatgggcatccaggccgctgcgctatttcttgacctgtagagggattccat

SEQ ID NO: 156227 - DNA, 626 bp, Homo sapiens
ctgccggcggcccgggcgggctggcagctagagtgggtgcgatagccgcctccgcctctgccgcctccgccgtcgcctcctccgcccgggccgttcgctgctgcgcggggagagcgaggcggggccgccggggccgccatggagcccgactcggtgattgaggacaagaccatcgagctcatgaacacttcagttatggaagatcaaaatgaagatgagtccccaaagaaaaatactctttggcagataagtaatggaacatcatctgtgatcgtctccagaaagaggccatcagaaggaaactatcaaaaagaaaaagacttgtgtattaaatattttgaccagtggtctgaatcagatcaagtggaatttgtggaacatcttatttcacgaatgtgtcattatcagcatggacatattaactcttacctgaagcccatgttgcagcgggactttattaccgctttaccagagcaaggcttagatcacatagcagaaaacattctttcgtacctggatgccaggtctctgtgtgcagcagagctggtatgtaaagaatggcagcgagtgatctcagaaggaatgctttggaagaagctgattgaacgaatggtacgcactgatcc

SEQ ID NO: 156228 - DNA, 1080 bp, Homo sapiens
  misc_feature (1)...(1080): n = a,t,c or g
atgtggctgatcttggctgggctcgcctgggctggtctctgggtcagtgatggcctaaaggatgttcttgtcatggcaaaaggcaagagtagaagaggaaaatctgcccccaagcacatcatgagtttaggaccattactgatgattgcctttgcaatatgccactttgcgtctgtcatgggctttcactacttagaggttaatctgaggcttcagcagtgctttaaatatcagctcattgagacagcctttgctgtgctggttcagtctgttctgcgcatatacagctcaaggatatgggataaaaccagcctggaatgtttgaaagtgttaacaggacacacaggctctgtcctctgtctgcagtatgatgagcgtgtcattgtaactggctcttcagattctacggtgagagtgtgggatgtgaacacgggtgaagttcttaacacattgatccaccacaatgaggctgtattgcacttacgcttcagcaatggactgatggtgacctgttccaaggaccgctccattgctgtgtgggacatggcttctgcgaccgacatcactttacgccgtgtcctggttggccaccgggctgccgtcaatgtagtagactttgacgacaagtacatcgtgtctgcctctggtgacaggaccatcaaaaacagagacaaagcagaggtggcttataccaacctggtctggagcacgagcacctgtgaatttgttcgtactctcaatgggcacaagcggggcattgcctgtctccagtacagggatcgcctggttgttagtggatcatcagataataccattaggctctgggatattgaatgtggtgcctgtttaagagtcctagagggacatgaagaattggtccgatgcatccggtttgataacaagaggattgtcagtggggcctatgnatggggttttctagtcttgaactactggctacgtggctaccaaatgcctaagggagttcgttcacagctgagttatgaagctggaattggttctagacgctgggtagatgcaaagcagcctaactcttcaagtaccgacatttctcacctctga

SEQ ID NO: 156229 - DNA, 3087 bp, Homo sapiens
atggcagcgtctgcttggcttcaattatggcagaaggcgaaggggaagcgggcacttcgtgtggccggagcaggaggaagagagagtgctcatttaatcctgtcgccctgctctggcccacggctcctgggctggcctggccccgtggctgcttcctgtcatgcggggctgctgcctggcaccggcagagggtggagggctacagtattacagcgttttacctacccatgttcgaacacttcagttatggaagatcaaaatgaagatgagtccccaaagaaaaatactctttggcagataagtaatggaacatcatctgtgatcgtctccagaaagaggccatcagaaggaaactatcaaaaagaaaaagacttgtgtattaaatattttgaccagtggtctgaatcagatcaagtggaatttgtggaacatcttatttcacgaatgtgtcattatcagcatggacatattaactcttacctgaagcccatgttgcagcgggactttattaccgctttaccagagcaaggcttagatcacatagcagaaaacattctttcgtacctggatgccaggtctctgtgtgcagcagagctggtatgtaaagaatggcagcgagtgatctcagaaggaatgctttggaagaagctgattgaacgaatggtacgcactgatcccctatggaaaggactttcagaaagaagagggtgggatcagtacctgtttaaaaacagacccacagatggccctccaaattcattttataggtcattatacccaaagattatccaggatatagagactatagaatctaactggcggtgtggacgacacaacttgcagaggattcagtgccgctctgaaaatagtaaaggtgtctactgtttacagtacgatgatgaaaaaattatcagtggcctacgagataattctattaagatatgggataaaaccagcctggaatgtttgaaagtgttaacaggacacacaggctctgtcctctgtctgcagtatgatgagcgtgtcattgtaactggctcttcagattctacggtgagagtgtgggatgtgaacacgggtgaagttcttaacacattgatccaccacaatgaggctgtattgcacttacgcttcagcaatggactgatggtgacctgttccaaggaccgctccattgctgtgtgggacatggcttctgcgaccgacatcactttacgccgtgtcctggttggccaccgggctgccgtcaatgtagtagactttgacgacaagtacatcgtgtctgcctctggtgacaggaccatcaaaaacagagacaaagcagaggtggcttataccaacctgagaccaggtctcactttgtcacccaggcttgtgtttagcattttgaggaactgccaaactgttttccaaaggcgctgtaccattttacaatcctgccagtggtatatgagggtttcagcttgctcagaagaacctccttttcataaccagcactggatagcactcttatacctagccccacaaatcacgaagtgtgtagcatcaggctttgcattggatagctgggaagctaaacaactaggatttatatgcggcaacttactcccacagtcacaccaattggtctggagcacgagcacctgtgaatttgttcgtactctcaatgggcacaagcggggcattgcctgtctccagtacagggatcgcctggttgttagtggatcatcagataataccattaggctctgggatattgaatgtggtgcctgtttaagagtcctagagggacatgaagaattggtccgatgcatccggtttgataacaagaggattgtcagtggggcctatgatgggaaaattaaagtttgggacttgcaagctgctcttgaccctcgagccccagcaagcacattgtgtttgcgcacattggtgggttttctagtcttgaactactggctacgtggctaccaaatgcctaagggagttcgttcacagctgagttatgaagctggaattggttctagacgctgggtagatgcaaagcagcctaactcttcaactcagggcctttgcacgcactgcatgcatttccccagctatttgcacggctgcttcctcatcattcaggtctcagcccaatttcattctaaagcaggcttgcttccacatggtatccaggtggctgccagcagccccaagagcatgtcctatcctttgagtgtctctggtggagcaaaatctcttcccagcagccgcaagagcatgtcctatcctttgagcatctgtggagggcactcaggtgtggctgacaccatcactcacagatcaggacccaaactccgccaggaggctctgctcctccccatccaccccagctccttgctaagctttgacaagctgtgccgggttcacacgcctgtccctggagcctggggaggagccaacaccaacggaaccatttggtggggaacaggagaggaatggttctttagaggcaaacggggcagttacttgaagagaggtctcccaaggtcgcctgttgctattttggaaagaggtggacagatactggagggccactcttcaggccactgcccaatcttttcttgtcaatttgatgtcagcttgtgccaatcatccctgaagggccattctgacacagcaaagccccctaacgttttcttcctaatcctcctcaggagaaccatcactcggattatcatgaaacccgagcgtgtgcgcatgaggtgcgaccctttacaaccggcggaccatctcgtttctgcccagttctgtttgtttaaactctttgctggcaggaccccagcgcaggggcagagttccatggcgttcacaggcagatgttctggcctgttgcagggaccaacgttaaaagccggggcaggagagctggtggccggaatccaggccctgggggcggagggcacttcacggaggaaggagagggagttcagggagggagttcagggaggagagggattggggatgaaaacaacagctcactgtccttttgcaaatggaatttacaggccccatttcatgcatgagaacactgaggcttag

SEQ ID NO: 156230 - DNA, 265 bp, Homo sapiens
cctttgcaatatgccactttgcgtctgtcatgggctttcactacttagaggttaatctgaggcttcagcagtgctttaaatatcagctcattgagacagcctttgctgtgctggttcagtctgttctgcgcatatacagctcaaggatatgggataaaaccagcctggaatgtttgaaagtgttaacaggacacacaggctctgtcctctgtctgcagtatgatgagcgtgtcattgtaactggctcttcagattctacggtgag

SEQ ID NO: 156231 - DNA, 401 bp, Homo sapiens
agaccaggtctcactttgtcacccaggcttgtgtttagcattttgaggaactgccaaactgttttccaaaggcgctgtaccattttacaatcctgccagtggtatatgagggtttcagcttgctcagaagaacctccttttcataaccagcactggatagcactcttatacctagccccacaaatcacgaagtgtgtagcatcaggctttgcattggatagctgggaagctaaacaactaggatttatatgcggcaacttactcccacagtcacaccaattggtctggagcacgagcacctgtgaatttgttcgtactctcaatgggcacaagcggggcattgcctgtctccagtacagggatcgcctggttgttagtggatcatcagataataccattag

SEQ ID NO: 156232 - DNA, 385 bp, Homo sapiens
tttcgtgttcgctgctgcgcggggagagcgaggcggtttcgccggggccgtcatggagcccgactcggtgattgaggacaagaccatcgagctcatgttaccgaagtgcatgtttgggattttgttgaagaaagctggatacagtaaacggaaagaatcttggaagatgcttgactgctgtcttttctcagactagtctgaaagggaaaacccccattcattctggattggtggatctgaagtacaaaatattttccagaacacttcagttatggaagatcaaaatgaagatgagtccccaaagaaaaatactctttggcagataagtaatggaacatcatctgtgatcgtctccagaaagaggccatcagaaggaaactatcat

SEQ ID NO: 156233 - DNA, 1251 bp, Homo sapiens
atggcgggctgcaggtcccgagccatgccccgcagggaggcagctaaggccggtgagaaatcgagcccagtgccggtgggcggcactgctctgagtacagggcctccacagccgctggccctggtgctaagcccctcattgcatggggccggcagggcctgccggctgctccgagtgcgggcccgccaagcccacgcacacctggagctccagctggcccggaagtgcccgcacagcccctgttcccgctcatgcctctccctccacacctccttgcaagctgagggagccagctccggccttggccagcccagaaaggggctcccacagtgcagcggtgggctgaagggctcctcaagtgctgccaaagtgggagcccaggcagaggaggtgccgagagcgagtgaggcctctgaggactgccagcatgctgtcacctctcactgggactacagttgctctctgatgttgctttctttcactctaaaggacttcctatggcgtttcttgaaaggcaaaactgttgtcacttccactgacagtgccataggtgtgggcatcacctgctacagcaaatccaggtccccaatccctgggctgcagaccagtaccagtctgtggactgctaggaaccgggccacatggcaggagccatgtggaactaacacttcagttctggaagatcaagatgaagataagtccccaaagaaaaatactccttggcagataagtaatggaacatcatttgtgatcatctccagaaagaggccatcagaaggaaactaccaaaaagaaaaagacttgtatattcaatattttaaccaggggtctgaatcagatcagttggaatttgtggaacatcttatttcacgaatgtgtcattatcaccatggacgtatcaactcttacctgaagcccatgttgcagcaggactttattactgctttacccgagcaaggcttagatcacatagcagaaaacattcttttgtacctggttaccaggtctctgtgtgcagcagagctggatgagcgtgtcattgtaactggctcttcggattctacggtgagagtgtgggaagtgaacacgggtgaagttcttaacacattaatccaccacaatgaggatgtactgcacttacgcttcagcagtggactgatggtgacctgttccaaggaccgctccattgctgtgtgggacatggcttctgcgaccgatatcactttacgtggtgtcctggttgtccactga

SEQ ID NO: 156234 - DNA, 4311 bp, Homo sapiens
  misc_feature (1)...(4311): n = a,t,c or g
gcgaggcggggccgccggggccgccatggagcccgactcggtgattgaggacaagaccatcgagctcatgtgttctgtgccaaggtctttgtggctaggctgcgccaacctggtagagagcatgtgcgcactgagttgcctgcagagcatgcccagtgtcagatgtctccagataagtaatggaacatcatctgtgatcgtctccagaaagaggccatcagaaggaaactatcaaaaagaaaaagacttgtgtattaaatattttgaccagtggtctgaatcagatcaagtggaatttgtggaacatcttatttcacgaatgtgtcattatcagcatggacatattaactcttacctgaagcccatgttgcagcgggactttattaccgctttaccagagcaaggcttagatcacatagcagaaaacattctttcgtacctggatgccaggtctctgtgtgcagcagagctggtatgtaaagaatggcagcgagtgatctcagaaggaatgctttggaagaagctgattgaacgaatggtacgcactgatcccctatggaaaggactttcagaaagaagagggtgggatcagtacctgtttaaaaacagacccacagatggccctccaaattcattttataggtcattatacccaaagattatccaggatatagagactatagaatctaactggcggtgtggacgacacaacttgcagaggattcagtgccgctctgaaaatagtaaaggtgtctactgtttacagtacgatgatgaaaaaattatcagtggcctacgagataattctattaagatatgggataaaaccagcctggaatgtttgaaagtgttaacaggacacacaggctctgtcctctgtctgcagtatgatgagcgtgtcattgtaactggctcttcagattctacggtgagagtgtgggatgtgaacacgggtgaagttcttaacacattgatccaccacaatgaggctgtattgcacttacgcttcagcaatggactgatggtgacctgttccaaggaccgctccattgctgtgtgggacatggcttctgcgaccgacatcactttacgccgtgtcctggttggccaccgggctgccgtcaatgtagtagactttgacgacaagtacatcgtgtctgcctctggtgacaggaccatcaaagtctggagcacgagcacctgtgaatttgttcgtactctcaatgggcacaagcggggcattgcctgtctccagtacagggatcgcctggttgttagtggatcatcagataataccattaggctctgggatattgaatgtggtgcctgtttaagagtcctagagggacatgaagaattggtccgatgcatccggtttgataacaagaggattgtcagtggggcctatgatgggaaaattaaagtttgggacttgcaagctgctcttgaccctcgagccccagcaagcacattgtgtttgcgcacattggtggaacattcatggacgtgtgtttcggctccagtttgatgagtttcagatcatcagcagctcccatgatgacactattttgatttgggatttcttaaatgtgcctcccagtgcccagaatgagacccattccccctccgggaacatacacttacatctctagataacagtctgcactttcactcgtttccgggttttcctagtcttgaactactgggctacgtgggctaccaaatgcctaaggggagtttcgtttcacagcttgagttatgaagctgggattgggtctaggacggtggggtaggatgcaaagcaggcctaaactcttcaagtcccgacattttctcacctctgatttccagctctactttgagaaggagaccttagcttcactgacttgaaagtaggcacaggaggcccttttccttccttcattaggtggaaaaatctaatggtttcaaatgtaaactgatcatagaaaaggaacatagaatctgttttacagaagtaaatcgaccgtcaggagaagacttggcctctaatttatattgctttgcactttggtttgatattaagaaacagcattcttcttcagtgaaattttggggtgccaaacacctacccagaatgtccagggctttcattttcaaaagttagcattctccttttgaccgtccaagtcattatgaattctgacttgttgtattaggaacatgttggacagtggaaaattttctctggattgttttagtaatatttttgggattatacttcctttctgtaccaatttcttttaatttaaagaactataagtcagttatattatctaccaacaggtaatatagctctttcttttattaactgttctctgtcccccaaccatctcctgatatttggtagagtaacacctttatacgtgtgcttgcctcctaatttaaaatactgtattcgcatgtagatataatgtacataacagtttaacctcaaagttgctgggagtcagggccccctgtgcttgagacactaatacagagtgtgttcgcacttagccatgggctggggctcaagaacctgatacctgggttgatgtggattacctagaacccttcctgcagtattcatacagtgtttttattttgttgttgtcattacgtgtgtgtggtttgtgtgtgtttttaatgagaatcttgttttaaaatgtaatttctaaggtttaacaccaaaatgttttatttgttgtgggagtatatattattacaataggaggaggtaccctaaacattttttgttcttattcctttttctcataagtactcctgagtacaagtgggtcacctcccatagtattcatttgggcttcgctgttcaaaaatcattattctgtgccagtcgtgggccccgggaagggggnaaataaggaaggccctgtttgacggggctgtcttggctctggaattcatgcatcctgcgccttgacaaggttctggcagggcctgctggtgtgccggaccctgcagggcaggtcaggctggttcaaaggcccatgctgaggggtgggtgctctgaaacggagtgaagcctcaagcccatgaatgccaccccagtcatctctggtgtcagctgctggtgtgggcccataaggtaatcaaagctcccaagtcctccctacgacacagcccaaatgtgtaaatggcactgttgccctgacagtgcatggaaaggacgttggcatccaattggcactccttctcccttattcaatattaggtttgatttgcccttcgccattgtttccaaagatcaaggaatgtcaataacattttaaaggaccaataaacagcctcctataaagtaaacctcttcccgtggaagcacactctactactaaagggaaggcccctgggctctgatttgtcctttgcattgagaacggtgtggggatcagtgtgtgtgtatgtgatttgtttattgagttggctttgcttttttagtttttcttttaaaaataaaatccttccttcccatgttactaaattaatttatgtttttgagagggtgagtctcaaagtgtaaacaataaacctccattcataaggaggatgttgtaagcttgatggtggttgtgaaagtgatttagctttgaccacttttcatcctacagcttcaatatcaaactggttaggaaagccccagggggaagggagggggcaggggaggaggcaattctgaatgaatgaatggattttttgttgttttttgcatgtttwaatatagaagttcccctcgtttccttkgggrgaatgaatggccytttgaatatgcaagcaaacctttgaaattgtgcctactaaattatragcaggggacctttggcacccaaggagttctgacctttctgggaattataatagtaaattccccagcccataactctgggactttattttgctaacccataactggaggcaaatgtaaattactgctatattaatgttttaaagcactgggatagtctaattctaacttgtaaattaattatgtttgccaattatctgtttgaaataaatttgtgtctgaaacagctattggaactggttaaattgtaccagatattattccatgacagctttgtactgtggaatgtgcttaataaaaaaacaaaaaagtttgacttttgtccagtaaattgctaagtaatgtcaataaatcgagtatgggtattatgcagtgcacctaatctggcttcatgcaattgttacttcagctactgattcaaagccaatactcttaataaagtgttgcaatactctgaaaaaaaaaaa

SEQ ID NO: 156235 - DNA, 328 bp, Homo sapiens
  misc_feature (1)...(328): n = a,t,c or g
aatttcaaaagatttcataaaactattgcaatcggaaacagcatcgtactggcctaaaacagacacatcaaccaaagaaacaagaaagcccagtaataaacccaactacttatggtcaactgattgttgacaaaggtgccaagaacacacaatgggggaaagacaactacttcaacnnnnnnnnnnnnnnnnnnnnnnnnnnnnnnnnnnnnnnnnnnnnnnnnnnnnnnnnnnnnnnnnnnnnnnnnnnnnnnnnnnnnnnnnnnnnnnnnnnnnnnnnnnnnnnnnnnnnnnnntagaacttttagaagaaaacagagagaaaaat

SEQ ID NO: 156236 - DNA, 415 bp, Homo sapiens
  misc_feature (1)...(415): n = a,t,c or g
cgctgggccagtggtatgagcacggagccaggtggctcccgccactccctggggatccaagtgcggggtggctggggtgtaactgggggagaggaggagagcctcactgtccctgtcgctgacacctggcaggcggggagctttaaggtggccacccaggagaggaacccccagagagtccagatgaggctgcggaggcagaagaagggcaacaccaacaagaggagcaaggaggtccgagttctgcaggaaatgcagctgctccaagtggctgccatgaattacaggcttcggcctcttgagaaatttggcacctatttcacaagaatggagcagctcagtgacaaagagaggtgagggcctagcccatgggctgagggtgggagaaggctcctcattnnttttttttaacaag

SEQ ID NO: 156237 - DNA, 763 bp, Homo sapiens
ctgggccagtggtatgagcacggtgccaggtggctcccgccactccctggggatccaagtgcggggtggctggggtgtaactgggggagaggaggagagcctcactgtccctgtcgctgacacctggcaggcggagaggctttaaggtggccacccaggagaggaacccccagagagcccagatgaggctgccggaggcagaagaagggtgtggtccccttctggggggattttctgactgagttacagaggggctggattcggccatcccgggacgaccctggatggcaacaccaaacaagaggagcaaggaggtccgagttctgcaggaaatgcagctgctccaagtggctgccatgaattacaggcttcggcctcttgagaaatttgtcacctatttcacaagaatggagcagctcagtgacaaagagagctacaagctgtcctgccagctggagcccgaaaaccagtaggctggcaacatcctgcagtggatgggaaacccaccgggatgctggccagaacaccggctctgcgccatccctcacccagaccgtagacaccagggaaccacatctaggaggctggcagctcagctgcatcttgccctggatcctcatcaccaactgctcctgctggccaggatcaggccatgggacttttgtgagtcgggcgggagaccattttatgtaatattttctttagtgtataagtaagggttttttcttaactttcgttaaaataaaattttaaaaaactattc

SEQ ID NO: 156238 - DNA, 450 bp, Homo sapiens
actatggagggaaagaatactgggatacccgtcgcagcatggtgtttgccaggcacctgcgggaggtgggagacgagttcaggagcagacatctcaactccacggacgacgcagacaggatccccttccaggaggactggatgaagatgaaggtcaagctgggctccgcgctagggggcccctacctgggagtccacctgagaagaaaagatttcatctggggtcacagacaggatgtacccagtctggaaggggccgtgaggaagatccgcagcctcatgaagacccaccggctggacaaggtgtttgtggccacagatgccgtcagaaaggaaacagtgcctttttcatcagttgcattttccaggctgagagctgtataaaacattttggactgtgaccatgtaccttcctttttaagaaaaataaactgctttatggaagttaaaa

SEQ ID NO: 156239 - DNA, 472 bp, Homo sapiens
gtcctgcaaagttacgcagaggggtggaaagaagggacctgggaagagaaggtggacgagcggccgtgtattgatcagctcctgtactcccaggacaagcacgagtcctcactgagcagccactttccacatctgctagaggaacagtgacatggacacctgtgacagagagaggacagttaggagggacagacagctcttcctttcggagcctggctagtctaggacatcaccttgctgtgtcttctcaagcttttaaaattgaccctgaacgtgtgacagggtcctatggtgttactcaaagctgtgcagggtaaatgatgacatatttattctttttccatttgttctagaaacagtgcctttttcatcagttgcattttccaggctgagagctgtataaaacattttggactgtgaccatgtaccttcctttttaagaaaaataaactgctttatggaaaaaaaaaaa

SEQ ID NO: 156240 - DNA, 3062 bp, Homo sapiens
cgcccggggccatggcgacactcagcttcgtcttcctgctgctgggggcagtgtcctggcctccggcttctgcctccggccaggagttctggcccggacaatcggcggccgatattctgtcgggggcggcttcccgcagacggtatcttctgtatgacgtcaaccccccggaaggcttcaacctgcgcagggatgtctatatccgaatcgcctctctcctgaagactctgctgaagacggaggagtgggtgcttgtcctgcctccatggggccgcctctatcactggcagagtcctgacatccaccaggtccggattccctggtctgagttttttgatcttccaagtctcaataaaaacatccccgtcatcgagtatgagcagttcatcgcagaatctggtgggccctttattgaccaggtttacgtcctgcaaagttacgcagaggggtggaaagaagggacctgggaagagaaggtggacgagcggccgtgtattgatcagctcctgtactcccaggacaagcacgagtactacagaggatggttttggggttatgaggagaccaggggtctaaacgtctcctgtctgtccgtccagggctcagcctccatcgtggcgcccctgctgctgagaaacacatcagcccggtccgtgatgttagacagagccgagaacctacttcacgaccactatggagggaaagaatactgggatacccgtcgcagcatggtgtttgccaggcacctgcgggaggtgggagacgagttcaggagcagacatctcaactccacggacgacgcagacaggatccccttccaggaggactggatgaagatgaaggtcaagctgggctccgcgctagggggcccctacctgggagtccacctgagaagaaaagatttcatctggggtcacagacaggatgtacccagtctggaaggggccgtgaggaagatccgcagcctcatgaagacccaccggctggacaaggtgtttgtggccacagatgccgtcagaaaggaatatgaagagctaaaaaagctgttacccgagatggtgaggtttgaacccacgtgggaggagctggagctctacaaggacggaggcgttgcgattattgaccagtggatctgcgcacacgccagttcatgaagtgccgctggagagccagagaccagctgcgcaggagccggaggaacgggcaggccgctgacctgaggtctggagaaacccctggagaagggtgtccccaccagcccatacagcgtgtgtgtggagggggccttgacctccgtgatgtctactgtgcctcaggataaggacccgccatgccctggctagacagtgtgtggttttttattggcacctcagtctcaacattttcttttcggattcatgaggaaagagaaatcctggggttggaccccaagacgacgtacaacaggttctgcggagaccaagagaaggcgtgtgagcaacccacccactggaagatcacctactgaggaggatcctccagggccgctccccggacccgacaggcgcgggtggatgcaggttctgtcgccgtggagtcaccgtctactgccagccgggagctgggcggacaggaccgtccctcgcagggtcccaggcccagaagaggccccacgcctctagagctgggctccgtcctcggcgttgccagccgccatggctgatgaagaggctccgctgctctcgggggtggcggttgttttcaggcagcgtctgtgaacccacagctcggttgccagcagtgcccgcgtggtgacccagaagcaggagtgtttgtcaggctcccgctctggcctttccagccacctttcatgtcttcatattttaagtgcattgaggatagatgcaggcgggtgagctgccctccgtcaggtggacccgggctgacatttccctgggagctggtgcaaggagaagcgtcattttaaatgtctgcagagcgaccaggggcctcatgaatctctccgttgccctccgcgcagcaggaggctgcctgtgtgtttcctcctgggatgcgtgcaaggcagacctggtgctgcaaaggaaagggcctgaggcctcagggagccccgtggagggatgacagttcaggccctactgctggcacgtcagagcactgggaagtttttcagtgacgtctctggggcactcagtggattgtctgtaggaaacttgcagctctgctcctcacaccaggcccggctggccacccaccctcgcccccactggccacccctccctcgccccgactgccccgccccaccctcaccccgactgccccgccctcgcccggctggccgtccctgccctcgccccggctggcaggtgcacatggggcctccaggtctgccattcgctattgagaactagaaatgaggaaggacagttacgctaactccaaaaggctgtctaggatgagctgctttatcagggagctccttgtacccattttacagaaatcatttttaggtctttgtgccaccaccacgaggggcatctgcaaagagggcaacgctagacacagaatccgtggaaggtgcagcagtgcctcaggggtcctcagggtcagggagcccccctcaccctcttggcccgttaccctttgtgactttccaccatggtgtcgtgtgaccctcagtcaggttggtgggggctgagtcctcactgagcagccactttccacatctgctagaggaacagtgacatggacacctgtgacagagagaggacagttaggagggacagacagctcttcctttcggagcctggctagtctaggacatcaccttgctgtgtcttctcaagcttttaaaattgaccctgaacgtgtgacagggtcctatggtgttactcaaagctgtgcagggtaaatgatgacatatttattctttttccatttgttctagaaacagtgcctttttcatcagttgcattttccaggctgagagctgtataaaacattttggactgtgaccatgtaccttcctttttaagaaaaataaactgctttatggaaaaaaaaaa

SEQ ID NO: 156241 - DNA, 350 bp, Homo sapiens
ttttttttttttttttttttttttgtagcccagaggtcctttattttttttttttaacacctattatgccatgaattcatagggaataggttccagcagctcagggagaactgagaggagcagctgagtgaaatgagttccacagttacatggaaccaacacggccgtcccccgagcacccaccagccggccgcccacttgctggcacccctcgctcaggtgccctcgacatcggcgccctgaggggctctgcctggtgctgcagccccatccacaccccacagtcagcagccgccacgctcctgtcccaccgcatgtccccctgggagcccgccgctccaacatcagaa

SEQ ID NO: 156242 - DNA, 1971 bp, Homo sapiens
atggcgacactcagcttcgtcttcctgctgctgggggcagtgtcctggcctccggcttctgcctccggccaggagttctggcccggacaatcggcggccgatattctgtcgggggcggcttcccgcagacggtatcttctgtatgacgtcaaccccccggaaggcttcaacctgcgcagggatgtctatatccgaatcgcctctctcctgaagactctgctgaagacggaggagtgggtgcttgtcctgcctccatggggccgcctctatcactggcagagtcctgacatccaccaggtccggattccctggtctgagttttttgatcttccaagtctcaataaaaacatccccgtcatcgagtatgagcagttcatcgcaggagcacagtccctttcccacgctgcagtgagcttcccaaaatgtttctcggaaatggacctgaagtggatgagctttgtgccccctcagttagagccgcccttacaccctaagaaagcggccacccctgggtgttatagtgacaggactcggctccctgtgcgaaaggctgttttacgttcaggaagacgcactgcgtgtggagtatgcttcgtggtgtctcagtgcagcgccagggataaagaacttcacctgcgcgatgctccctcccgctttgttcctgccccagaatttcacctgcgcggtgctccctcccgctttgttcctgccccagaacttcacctgcgcggtgctccctcccgctttattcctgctgcctttgagcagatcttaattgctgacctcttgggcgtcacagtgccaccttcttggtgcgggtcgggccaatctggtgggccctttattgaccaggtttacgtcctgcaaagttacgcagaggggtggaaagaagggacctgggaagagaaggtggacgagcggccgtgtattgatcagctcctgtactcccaggacaagcacgagtactacaggtgcctgctgaggctgctccccctgccgcagggatggaggtcttgtcagtcccaagtgtcgattgccattaaaggctctgacactaccaggcctcctgtggaaaagctgtcagttaacagcctccatgtgtccagtgccagggcagctggctctaaagcatggcagggctcagcctccatcgtggcgcccctgctgctgagaaacacatcagcccgctttgaaaggtgggactattctctgcagcgggtcttttccgttggcgttgatttccgcattgatggggtgactttccatagccacccctggttctgtgacaggcctgctgacgtgttcaccagggcagcagcttgtaaagccggaacctgcctgcaggagacacagtccctgctcacgtgggactttgtgcagacccgtcgcagcatggtgtttgccaggcacctgcgggaggtgggagacgagttcaggagcagacatctcaactccacggacgacgcagacaggatccccttccaggaggactggatgaagatgaaggtcaagctgggctccgcgcttagggggcccctacctgggagtccacctgagaagaaaagatttcatctggggtcacagacaggatgtacccagtctggaaggggccgtgaggaagatccgcagcctcatgaagacccaccggctggacaaggtgtttgtggccacagatgccgtcagaaaggaatatgaagagctaaaaaagctgttacccgagatggtgaggtttgaacccacgtgggaggagctggagctctacaaggacggaaggcgttgcgattattgaccagtggatctgcgcacacgccaggttttttattggcacctcagtctcaacattttctttttcggattcatgagggaaagagaaattcctggggttggaccccaagacggacgtacaacaggttctgcggagaccaagagaaggcgtgtgagcaacccacccactggaagatcacctactga

SEQ ID NO: 156243 - DNA, 4850 bp, Homo sapiens
cgcccggggccatggcgacactcagcttcgtcttcctgctgctgggggcagtgtcctggcctccggcttctgcctccggccaggagttctggcccggacaatcggcggccgatattctgtcgggggcggcttcccgcagacggtatcttctgtatgacgtcaaccccccggaaggcttcaacctgcgcagggatgtctatatccgaatcgcctctctcctgaagactctgctgaagacggaggagtgggtgcttgtcctgcctccatggggccgcctctatcactggcagagtccgtgacatccaccaggtccggattccctggtctgagttttttgatcttccaagtctcaataaaaacatccccgtcatcgagtatgagcagttcatcgcagaatctggtgggccctttattgaccaggtttacgtcctgcaaagttacgcagaggggtggaaagaagggacctgggaagagaaggtggacgagcggccgtgtattgatcagctcctgtactcccaggacaagcacgagtactacagaggatggttttggggttatgaggagaccaggggtctaaacgtctcctgtctgtccgtccagggctcagcctccatcgtggcgcccctgctgctgagaaacacatcagcccggtccgtgatgttagacagagccgagaacctacttcacgaccactatggagggaaagaatactgggatacccgtcgcagcatggtgtttgccaggcacctgcgggaggtgggagacgagttcaggagcagacatctcaactccacggacgacgcagacaggatccccttccaggaggactggatgaagatgaaggtcaagctgggctccgcgctagggggcccctacctgggagtccacctgagaagaaaagatttcatctggggtcacagacaggatgtacccagtctggaaggggccgtgaggaagatccgcagcctcatgaagacccaccggctggacaaggtgtttgtggccacagatgccgtcagaaaggaatatgaagagctaaaaaagctgttacccgagatggtgaggtttgaacccacgtgggaggagctggagctctacaaggacggaggcgttgcgattattgaccagtggatctgcgcacacgccaggtgcctgcccacgtcactgtcggccgagagcgggtcgggtggctttcaaaggttcttctgtcccaagtactcggtgtcagagcagatggtcgcctgtgttcacagtggtcatttccatactgtttgcctcctcgtctgagtctcctgtagcatctggttcagtgtttccctgggctgaagttaattgttcatcttgcccctttagttctcatgcacagaattcctccatagcaggctgttggcatagctggcctcgtctcagaacctcttcttgtgtcgcattttcccatcattcccggtttctgcccctgtctgccccctgccctgagagttgcccgtgccctggacttgggcatgtccttgttgctgtgttgttgagcatccgtgagcgtccccgaggccgggagcgtgggccctcgtgtgatcattctcgtggggctgccatgagcgtccccaaggctgggagcatgggccctcgtgtgatcgttcttgtggggctgccgtgagcgtccccgaggccgggagcgtgggccctcgtgtgatcattctcgtggggctgccgtgagcgtcccagaggccgggagcgtgggccctgcgtgcagtcattcctctggggttgctgtgggaggtacgcctgggcctctgttcctccaaagacctgcctgcccatctgcataggagatgaaggctggggttagggtgaaacggtttgagttaaatggaaaatgaaagtagagggaatgatcttccccgtggttagcactgtgcacacgcgtgcgtctctgtgggttagtctgtctctctcctgcccgaggaatgctgagcgccctgagccggtgcctcttcacacatctgctatttcctgtggtgttctgggcatggtgtgtaagacccacagaggctccgggtgatgctgtctgctgggtgtgggtccctttccctgttaagcagacaggatgcagcgctgacttcttaggtcagggcggaggtgtgcaggagcccagtcacgagctcacccctgcttctcaggtgtggccttgggattttgactgcgaccttggcggtgctgtctccgcagcccaggaagcctgctgtggggaggcttcgcactgagctctcagcctcctgccctcagctgcgcgaagcgctcggcccagctcactgaagctgccctgcctccgggccggcgcggcctgctctggcaggcccctgtgtgtggggtggtgagggtctccccaccagtgctgcaccccgcagcagcatacaggcctgtgtggcctgctggccctgtggctctgtgtacagcgctgtgcatgttacatttgctctggaaacatctctggggtttgcttgttcacgaagttcatgaagtgccgctggagagccagagaccagctgcgcaggagccggaggaacgggcaggccgctgacctgaggtctggagaaacccctggagaagggtgtccccaccagcccatacagcgtgtgtgtggagggggccttgacctccgtgatgtctactgtgcctcaggataaggacccgccatgccctggctagacagtgtgtggttagtaggaatctctcattgttcaccatgtgacccccaggaggtattcgacctgcactggcgtgcctggcctgggatttggtgacggagaggagggctcccagggggacatgcggtgggacaggagcgtggcggctgctgactgtggggtgtggatggggctgcagcaccaggcagagcccctcagggcgccgatgtcgagggcacctgagcgaggggtgccagcaagggggcggccggctggtgggtgctcgggggacggccgtgttggttccatgtaactgtggaactcatttcactcagctgctcctctcagttctccctgactctggaacctctgtgaccccagttctccctgactctggaacctctgtgatcctttgcaggtttttttattggcacctcagtctcaacattttcttttcggattcatgaggaaagagaaatcctggggttggaccccaagacgacgtacaacaggttctgcggagaccaagagaaggcgtgtgagcaacccacccactggaagatcacctactgaggaggatcctccagggccgctccccggacccgacaggcgcgggtggatgcaggttctgtcgccgtggagtcaccgtctactgccagccgggagctgggcggaacaggaccgtccctcgcagggttcccagggcccagaagaggccccacgcctctagagctgggctccgtcctcggcgttgccagccgccatggctgatgaagaggctccgctgctctcgggggtggcggttgttttcaggcagcgtctgtgaacccacagctcggttgccagcagtgcccgcgtggtgacccagaagcaggagtgtttgtcaggctcccgctctggcctttccagccacctttcatgtcttcatattttaagtgcattgaggatagatgcaggcgggtgagctgccctccgtcaggtggacccgggctgacatttccctgggagctggtgcaaggagaagcgtcattttaaatgtctgcagagcgaccaggggcctcatgaatctctccgttgccctccgcgcagcaggaggctgcctgtgtgtttcctcctgggatgcgtgcaaggcagacctggtgctgcaaaggaaagggcctgaggcctcagggagccccgtggagggatgacagttcaggccctactgctggcacgtcagagcactgggaagtttttcagtgacgtctctggggcactcagtggattgtctgtaggaaacttgcagctctgctcctcacaccaggcccggctggccacccaccctcgcccccactggccacccctccctcgccccgactgccccgccccaccctcaccccgactgccccgcccatcgcccggctggccgtccctgccctcgccccggctggcaggtgcacatggggcctccaggtctgccattcgctattgagaactagaaatgaggaaggacagttacgctaactccaaaaggctgtctaggatgagctgctttatcagggagctccttgtacccattttacagaaatcatttttaggtctttgtgccaccaccacgaggggcatctgcaaagagggcaacgctagacacagaatccgtggaaggtgcagcagtgcctcaggggtcctcagggtcagggaacccccctccaccctcttggccccgttacccttggtgactttccaccatggtgtccgtgtgacccctcagtccaggttggtgggggctgagtccttcattgagcagcccactttccacatctgctagaaggaacagttgacattggacaccttgtgacagagagagggacagttagtgaggagggacagacagctccttctttcggagccctgggctagtcctaggacatcaccttgctgtgtcttctcaagcttttaaaaattgaccctgaacgtgtgacagggtcctatggtgttactcaaagctgtgcagggtaaatgatgacatatttattctttttccatttgttctagaaacagtgcctttttcatcagttgccattttccaggctgaggagctgtattaaaacattttgggactgtgaccatgtaccttcctttttaagaaaaataaactgctttatggtaaaaaaaaaaaaaaaaaaa

SEQ ID NO: 156244 - DNA, 393 bp, Homo sapiens
  misc_feature (1)...(393): n = a,t,c or g
tcttattcatctggaaaggggnnnntaaatgtcatcataattctaatttatctttagtaaaaactcaccatttttgtaagtatttgcagcttctaagccctaacacatgtaaaaggtaaacatagccagaaggtgaaatacacagttctttaaaaatttaaggatgcnnnnnnnnnnnnnnnnnnnnnnnnnnnnnnnnnnnnnnnnnnnnnnnnnnnnnnnnnnnnnnnnnnnnnnnnnnnnnnnnnnnnnnnnnnnnnnnnnnnnnnnnnnnnnnnnnnnnnnnnnnnnnnnnnnnnnnnnnnnnnnnnnnnnnnnnnnnnnnnnnnnnnnnnnnnnnnnnnnnnnnnnnnnnnnnnnnnnnnnnnnnnnnnnnnnnnnnnnnnnnnnctg

SEQ ID NO: 156245 - DNA, 397 bp, Homo sapiens
  misc_feature (1)...(397): n = a,t,c or g
tgtcctttggacataagatttaccagctttgtgtnnnnnnnnnnnnnnnnnnnnnnnnnnnnnnnnnnnnnnnnnnnnnnnnnnnnnnnnnnnnnnnnnnnnnnnnnnnnnnnnnnnnnnnnnnnnnnnnnnnnnnnnnnnnnnnnnnnnnnnnnnnnnnnnnnnnnnnnnnnnnnnnnnnnngtcnnnnnnnnnnnnnnnnnnnnnnnnnnnnnnnnnnnnnnnnnnnnnnnnnnnnnnnnnnnnnnnnnnnnnnnnnnnnnnnnnnnnnncccctaataaattaatttaaaaagccccccaatctgtggtattttattatggcagccctagcaagctaatacagtggtttgagaggctgggagggttgaggggaagataaacttttaaaaagctc

SEQ ID NO: 156246 - DNA, 2978 bp, Homo sapiens
  misc_feature (1)...(2978): n = a,t,c or g
tagatagatagatagatagataggtagatagatagcaaacacagtgacccaacctcatggcgtttcactcagacttttatcttgactctgagagactcaagattcaacttaaaaatggcatccttaattctttttttttatttttaagacagcatctcactctgttgtccaggctggagtgcagtggcgcagtctcagctcaatgcaacctccacctcctgggctcaaacaattctcgcacctcagcctcctgggtagctggattaaaggccacactgccacacccatctaatttttgtatttttagtagagacggggtttcaccatgttggctaggctggtctcaaactcctggcctccgacctcagccctccccaaagtgcctgggattaacagggtgtgaagccacctcgccctggccagcatcccttaaatttttaaagaactgtgtatttcaccttcctggctatgtttaccttttacatgtgttagggcctagaagctgcaaatacttacaaaaatggtgaaatcttactaaagataaattagaattatgatgaccattatgtggaacattccagatgaataagactgttcatctaagaattgagtttaaaaatgagggcttctgaatcaggccctcctagggatacctattgatgtgcaaaagcttctaaaaagatttcaaaaatgtttgtctctttaaaagagctcacgtagaaggcaaatgaaaagtttaagcaactagtttataagaaaattgaatctgccaatcttttcacttagttactgttttactccaaaggcaaaaagaaagctaggtaatatttataaaaattaggcccttgggtgaagcagatttgcattttcagaactatccatctgcatccagaaataggaaaccctttgtctgctctatttgctaatgggctctgccctgaactcagtaatctagttaagaaacagaagctaagttgaaaagaccgcctattgaattaaatcagtctccaaaatttgcgtttctggtatttagccagttattttgaaactctttgtaaaaacgtgtatctataaaggaaaatcagtagaaattcttacaataggtgagagcattagtccaaataaactcaccttcaaccattttgtctgaactgggcttcttagcatcaactttctgtcttggcaaataacaatatttaggcctgaaatgtaagttctctgcctttgagatgtaaattttctaccttgtgttacctaggaaccatccctttcaaaatgcaattcagggtagaaaatttttaaatggttattttaaaaagggatgaatagtggactgtgatgggtttaaaacaaagatttaatctactaatgattggatggatcagaggaactcattgctggtcccctaacattacaaagctcaaaaccagtcagctcaatttactccaatctggaaaaatttttaaagccagaaggcagagattccaatgggcagcctacactagacaatcacttagggcaataatcaagcaggtcagtccagaaaagcgcaaggtccccagtctcgatccccctgttgggataggtataattagcaaattcatattttaatgaccagaacccagagattgctgcctcacggtatgttctacctctaattttcccaaacctttaagaatgtcaaagaataaaatctcaacaaattatgtaaagatctaattgggcttttattagcgattcatgaactcgggtagcattcctgtctacaaaataaaacagaagtcttgtcaggtatgatagattggtctgcatttgtaaagcagcactatcatgaacaaggaaacatcatagtagacacagcagattggttaacatcaggttacttcaggttacgttcccttgtgtgggattaaagcagaggggggcttcctcatcataatcacgcttgctcacggttgactgggactccctttgatcagttgctgtggaatctcctggacttgttggaaactgtccctatttttaaggttcactttggattacatggggctccattcctggggatgggagagggtgaggatcttgggagantttccccccccatttccacataaatgtatttgttaaagttttttgttagaaggggcctggttaaatggttgggccctgggctaagtcccttcccatctctgatcctctgcttcctaacttgtaaaatacagattaaatgctcctaacattatggaatctaagggaatgtcaggattagctaaattgcttaatggcacaacaatattaggagtggaagcttgagaagcaaaattgttacactgagcaagtatttttaactggattgaaatgaaagataagagctttttaaaagtttatcttcccctcaaccctcccagcctctcaaaccactgtattagcttgctagggctgccataataaaataccacagattggggggctttttaaattaatttattaggggggtagagatagggtcttactatgttgtccaggctggccttgaactcctggcctcaagcaagtcctcctgcgtcggcctcccacagtggacggcttaacaacagaaatttatttctcactattctggagattagaagtcaaagatcaaggtgctggtgattttgtttcttctgaagcctctctctttgcttgcagataactgccttctcactgtgtcctctcctggtctttgttctgtgcacacattgctgggtatctcttatgtccaaaggacaccatgttggattagactaacagcctccttttgaacttaagtcacctctttaaaggcctcatctccgaacagtcacattcaaaagaaatgggagttaggacctcaacaaatgaattgggggatacacagttcagcccataccaatgacctattctaaggtttctgtttcaaaacactgtagccaaatgcatactcctagggagaaaattat

SEQ ID NO: 156247 - DNA, 348 bp, Homo sapiens; identical to SEQ ID NO: 135052

SEQ ID NO: 156248 - DNA, 864 bp, Homo sapiens
atgttggactcgctgttggccttgggcggcctggtgctgcttcgggattccgtggagtgggaggggcgcagtctcttgaaggcgcttgtcaagaaatctgcactgtgtggggagcaagtgcatatcctgggctgtgaagtgagcgaggaagagtttcgtgaaggttttgactctgatatcaacaatcggctggtttaccatgacttcttcagagaccctctcaactggtcaaaaactgaggaggcctttcctggggggccgctgggagccttgagagccatgtgcaagaggacagatcctgttcctgtcaccattgctctcgattcactcagctggctgctacttcgccttccctgcaccacactctgccaggtcctgcatgctgtgagccatcaggactcttgtcctggtgacagctcctcagtggggaaagtgagtgtgctgggcttgctacatgaagagcttcatggaccaggccctgtgggagctctcagcagccttgctcagactgaggtgaccctgggcggtaccatgggccaggcctcggcccacatcctgtgtcggaggccccgacagtcgacccaactgaccagactcagtggttctccattccttccggactttcagccgggatctccaagaggggccctctgtagagtcccagccctaattccgattcctcatatacccccgaaagagagagaagccagagatagcctgatcctgcccttccagttcagttctgaaaaacagcaggctctcctgcggcctaggccagggcaggctaccagccacatcttctatgagccagatgcttatgatgacctggaccaagaagacccagatgacgacctggatatttga

SEQ ID NO: 156249 - DNA, 825 bp, Homo sapiens
gctgggcttgctacatgaagagcttcatggaccaggccctgtgggagctctcatcagccttgctcagactgaggtgaccctgggcggtaccatgggccaggcctcggcccacatcctgtgtcggaggccccgacagcgcccaactgaccagactcagagggtctccatccttccggacttcagcctggatctccaagaggggccctctgtagagtcccagccctactccgatcctcatatacccccggtatctaagaatgccaaggccagaacaaggaaatgtagtttagtatctggtcacgggagagaaaataaaagctgcagaggttgggggtggggtcagggattctagggatggggcagagtggcagcatcctttgtacctacaggtggatcccacaactcatttgacctttaaccttcacctgtccaagaaagagagagaagccagagatagcctgatcctgcccttccagttcagttctgaaaagtaaggttgggacctgggtacgtggatccctgagtagatcccagcatctgggccatggagaggttggggcaacaggttattgattaacctgactttatagggactgaagtccacctccagagacaagtccaagttcttgatccacccattccccctataatggcagaggacccttatgtctcttttctctcccttatacccttggatcacagctccagttgtccccagagcaccctgggcctgggctgagccagaccagacccttgggaggtggccctatccctatgcagaggtgctaggaggacagaaggctatatgggcgtggcagaggctgg

SEQ ID NO: 156250 - DNA, 939 bp, Homo sapiens
  misc_feature (1)...(939): n = a,t,c or g
gtgcggaaagtgagtgtgctgggcttgctacatgaagagcttcatggaccaggccctgtgggagctctcagcagccttgctcagactgaggcgaccctgggcgggtaccatggggccaggcctcggcccacatgctgtggtcggaggccccgacagcgcccaactgaccagactcagtggttctccatccttccggacttcagcctggatctcaaagaggggccctctgtagagtcccagccctactccgatcctcatataccccgggtggatcccaacaactcatttgacctttaaccttcacctgctccaagaaagagagagaagccagagatagcctgatcctgcccttccagttcagttctgaaaaacagcaggcttctcctgcggcctaggccagggcaggctaccagccacatcttctatgagccagatgcttatgatgacctggaccaagaagacccagatgacgacctgaatattttgcctggccagatttgattagattgtaattggagggggcgcgggaagactttgggcccagaaccatctttctattgtttgtgttagccttaccctgtccctgccccaccttggttccccttgtctatggagccccgccttgtgagccaggaagcagcgtctcatcaggacagaaggtaggatgaagacatggggtaatgtgagagagtagaaaaaaccccgtccctaataaaaatctttatttttttattnnnnnnnnnnnnnnnnnnnnnnnaaaggggggcccctttaaaagaacccttgggggggccaaagttaaccggggcaggcaaggaaaaaacttttccctaaaaggggggcgaaaaaaaaccaacctgggaatttttgaaaaaaaacctaactttgggggggggaaaaattggaccaacccccccacaaaaattaaaggcccaaggg

SEQ ID NO: 156251 - DNA, 439 bp, Homo sapiens
ggcacgagaggcagatggctcttcttaaggccaataaggatctcattcccgacggaatgacagagctcacccctctgctgcaaccactgggcttcgaggaccctgtcgtatgtgaacaagacgtggtgactgcaggacaagactgggtaacctactacgaccgcgattacgggcagcaggtgacaggggagccccaagagcgagacaaggctctgcaggagcttcggcaagagctgaacactctggccaaccctttcctggccaagtacagggacttcctgaagtctccatgagctcccgagtcacccaccgccctcctcctagctcagggacccagcccctcctctctgagaaactctgaccttcatgtccttaggctgtgctcctgccactctaccctgacacctcaataaagaccagtgctggttttgttggaaaa

SEQ ID NO: 156252 - DNA, 304 bp, Homo sapiens
tcatgacgttgcccaggctggtctcaaacagctggctcaaacaatcctcccatcttggcctcttaaagcactgggattacatgagtgaggcaccacacctggccaagaatttccttaaagcctatgaagtggtgagcctttcatttcatgtggaaggttctggtggctgcaggatggcagtttggcacaggtccggagaggaagaggagggctccaaggtgtgctcaaggttccactgggacagtggtgtcctccccaaaccaatgaccaattagtgaggggtgcagtcatgcccgtgggcctt

SEQ ID NO: 156253 - DNA, 785 bp, Homo sapiens
  misc_feature (1)...(785): n = a,t,c or g
tttttttttgtggagatggggtctcatgacgttgcccaggctggtctcaaacagctggctcaaacaatcctcccatcttggcctcttaaagcactgggattacatgagtgaggcaccacacctggccaagaatttccttaaagcctatgaagtggtgagcctttcatttcatgtggaaggttctggtggctgcaggatggcctgaaatgagagagcaagtgatcctttagagaaatggtttccttttatccagtctgaagctgatgggggtgaaatctggagtggcagaagtaaggctggaaaggaggagctagatcggaggagaaacatcagcaggacttggctgaaatgtgttgggtttgttcattcgttttattttacctncagcagatacacagggagtgctcgctgtgtgcttggcactgtggtcaaggaactgagtatgcaccaaagaagagaacacatacagtccttgctctgtgccactcacagtttggcacaggtccggagaggaagaggagggctccaaggtgtgctcaaaggtacctctggatcagtggtgtcctccccaaaccaatgaccaccttagtgaggggtgcagtcatgtccgtgggccttcatcagcattttacttgacaaaagcccgttctgccgggccccagggagctgaaaaggggcttgggaatggggtcttgaggaggggctggccggaatgtacagcacaagcacagcttgaccggccggcgcgggtgagcttgtctcatagaccacgcaacttccggctc

SEQ ID NO: 156254 - DNA, 456 bp, Homo sapiens
tagagaaaattatttaatagagaaacaatgaatgatactcttcacactcagcctcctgcagggaggacagacagctcttgcccaaggaagcatttaagggcagaagggctacaaatcaccaacacccgctgattatttaaaagaaactctcaaatacattcttttccaggttaaattcactttgtcctcataagtgcccatgctgtgggctgtgaaggtatactgtggggagggtggtccctgaggggtgttggagtgccccattccagtgcaaagaggagctgagttggaataaggggtcccgggaagggcaggccaggggcacagctgcctgctggcagggcgagggcaagcacagaagtaccctgcgggggccccttgccctcttctcggagccaaaaatgatagagggctgcatgccccaaaacggacaggcacaggacccagtaaccaccg

SEQ ID NO: 156255 - DNA, 534 bp, Homo sapiens
ttttttttttttttagagaaaataatttaatagagaaacaatgaatgatactctttacactcagcctcctgcagggaggacagacagctcttgcccaaggaagcatttaagggcagaagggctacaaatcaccaacacccgctgattatttaaaagaaactctcaaatacattcttttccaggttaaattcactttgtcctcataagtgcccatgctgtgggctgtgaaggtatcagccccattgaagagatgggggtctcagcactgtccatccaagaagcctgctcgccagggctgcagtgggccacttcattcttggcgtcagcctgggttagtgcccctctgctccagatggctcacatctgtccaatcattcttctagggtcactgaagggtgcaagagctacgaacagattccgacagtccctctttgtccagggtgtcagcttcccagcgagattccctcatcttgacctgctccttcaagtattcagctcgggccatgaggttctgaacctcagtgtgaagcagct

SEQ ID NO: 156256 - DNA, 578 bp, Homo sapiens
  misc_feature (1)...(578): n = a,t,c or g
cggcatgaacggaatatctctcacctggatctgaagccacagaacattctactgagctccttggagaagccccacctaaaactggcagactttggtttcgcacaacacatgtccccgtgggatgagaagcacgtgctccgtggctcccccctctacatggcccccgagatggtgtgccagcggcagtatgacgcccgcgtggacctctggtccatgggggtcatcctgtatgaagccctcttcgggcagcccccctttgcctccaggtcgttctcggagctggaagagaagatccgtagcaaccgggtcatcgagctccccttgcggcccctgctctcccgagactgccgggacctactgcagcggctcctggagcgggaccccagccgttgcatctccttccaggacttttttgcgcacccctgggtggacctggagcacatgcccagtggggagagtctggggcgagcaaccgccctggtggtgcaggctgtgaagaaagaccaggagggggattcagcagccgacttatcactctactgncaggctcttgacttctttgtacctgccctgcacta

SEQ ID NO: 156257 - DNA, 3007 bp, Homo sapiens
gcggggcctccgtatccccacgtgggccctgcaggaactggcggggcgcgtgacccggcgaggcccagagacaggggaggggcgccgggagccgggcggatccgcgtccccgatgcgcgctgcatttccggcgggcggcgctgggggcagcgtggagccacccagtgctcggcccgccccgcaacccgccggaaccgccgcccgcagcgaggaagcgcccgcgcgggcgcaggcggccggaatggcggggcccggctggggtcccccgcgcctggacggcttcatcctcaccgagcgcctgggcagcggcacgtacgccacggtgtacaaggcctacgccaagaaggacactcgtgaagtggtagccataaagtgtgtagccaagaaaagtctgaacaaggcatcggtggagaacctcctcacggagattgagatcctcaagggcattcgacatccccacattgtgcagctgaaagactttcagtgggacagtgacaatatctacctcatcatggagttttgcgcagggggcgacctgtctcgcttcatccatacccgcaggattctgcctgagaaggtggcgcgtgtcttcatgcagcaattagctagcgccctgcaattcctgcatgaacggaatatctctcacctggatctgaagccacagaacaatcttactgagctccttggagaagccccacctaaaactggcagactttgggtttcgcacaacacatgtccccgtgggattgagaagcacgtgctccgtgggctcccccctctacatggcccccgagatggtgtgccagcggcagttatgacgcccgcgtggacctctggtccatgggggtcatcctgtatggggagacctcttttccctgcttctcaccctgaggcctacagtttcctcaggcaaggcctctctgggccacttctgaagggttctgatgaaaactgactgctggcccagggcccctgctgaggggcgtcaggccaggcttgacccattccctcccagcctccgctctgcctcccttccacagaagccctcttcgggcagcccccctttgcctccaggtcgttctcggagctggaagagaagatccgtagcaaccgggtcatcgagctccccttgcggcccctgctctcccgagactgccgggacctactgcagcggctcctggagcgggaccccagccgtcgcatctccttccaggacttttttgcgcacccctgggtggacctggagcacatgcccagtggggagagtctggggcgagcaaccgccctggtggtgcaggctgtgaagaaagaccaggagggggattcagcagctgccttatcactctactgcaaggctctggacttctttgtacctgccctgcactatgaagtggatgcccagcggaaggaggcaattaaggcaaaggtggggcagtacgtgtcccgggctgaggagctcaaggccatcgtctcctcttccaatcaggccctgctgaggcaggggacctctgcccgagacctgctcagagagatggcccgggacaagccacgcctcctagctgccctggaagtggcttcagctgccatggccaaggaggaggccgccggcggggagcaggatgccctgggacctgtaccagcacagcctgggggagctactgctgttgctgggcagcggagcccccgggccggaggcgggagctgcttcacactgaggttcagaacctcatggcccgagctgaatacttgaaggagcaggtcaagatgagggaatctcgctgggaagcttgacaccctgggacaaagagggactgtcggaatctgttcgtaacttcttgcacccttcagtgaccctagaagaatgattggacagatgtgagccatctggagcagaggggcactaacccaggctgacgccaagaatgaagtggcccactgcagcccctggcgagcaggcttcttggatggacagtgctgagacccccatatcccagagtccccagcctccctcaggttactctgcaccccacagatggtttgatggctgtgctgtatactggaggggagggcaggactctggggagaacagcacttctttcatgagacctttgttactcggtggttactgggtcctgttgcctgtccgttttttggggcatgcagccctctattcattttttgggttccgagaagaggggcaaggggcccccgcagggtacattctgtgcttgccctcgccctgccagcaggcagctgtgcccctggcctgcccttcccgggaccccttattccaactcagctcctctttgcactggaatggggcactccaacacccctcagggacgcaccctccccacagtatgcactcagccccacagaacccaccagtctttctgggaactcacacctgcccgccatcttggtactttaggttaatccctcaagcatgaaagctggatcttttggggtttaagaagcccaagccttgttcctgccctggcgctacggagcactctcgagggacccttggacctcatctctcccacctccgtgccctctgggcccaacactatccacagagcgggccttgagctggagattgagcctggggacagggagagggaggcttggagacagtctgaccccagtgccttcctaggccaacccacttcctaaggccctgcccctgaccgcccgtggaagcccctgggcaagctctttccccctttactgggccctgggtctccccatctcttcaatggggctgatacccttcacaagcccacaagcatgggcacttatgagggacaaagtgaatttaacctgggaaaagaatgtattttgagagtttcttttaaataatcagcgggtgttggtgatttgtagcccttctgccctaaaatgcttccttggacaaaagctgtctgtccctccctgcaggaggctgagtgtgaagagtatcattcattgtttctctattaaattattttctgctaaaaaaaaaaaa

SEQ ID NO: 156258 - DNA, 401 bp, Homo sapiens
  misc_feature (1)...(401): n = a,t,c or g
tttggaaggcctatcaatcacaggtgcgctaattcgggagcaggtgcacgcctgtgcntactcgctaccacgcgtcttctgggaggaagtgaatgagccggttatcttctcagggagggttagtgctggccactgtgcactgccgctgccagcacgcccggtcacagccagtgtctatgggcgactggcgcggctgcgaggctgtctagaggactcctacccttctgctctgagtgcgcaagtcttcctggactctccggctgtgggctgtggtttggaaacgaggttgttcatagaggctgctctggggccaccatgcagggcaacggtgacgtccagaggccacctgcttgacatctccatcaccaaatctacaggaagaccctgtttcctatgtgagg

SEQ ID NO: 156259 - DNA, 405 bp, Homo sapiens
gaacagtgtacactttccgttcagccatcgtcacagcacgtgctgtgtgggtgcggccacgtatggatcgcagagccgacctcagctcagcgacgcagagtgcttctgctgaaaaatttggagggagggttagtgctggccactgtgcactgccgctgccagcacgcccggtcacagccagtgtctatgggcgactggcgcggctgcgaggctgtctagaggactcctacccttctgctctgagtgcgcaagtcttcctggactctccggctgtgggctgtggtttggaaacgaggttgttcatagaggctgctctggggccaccatgcagggcaacggtgacgtccagaggccacctgcttgacatctccatcaccaaatctccaggaagaccctgtttcctat

SEQ ID NO: 156260 - DNA, 408 bp, Homo sapiens
ggagggttagtgctggccactgtgcactgccgctgccagcacgcccggtcacagccagtgtctatgggcgactggcgcggctgcgaggctgtctagaggactcctacccttctgctctgagtgcgcaagtcttcctggactctccggctgtgggctgtggtttggaaacgaggttgttcatagaggctgctctggggccaccatgcagggcaacggtgacgtccagaggccacctgcttgacatctccatcaccaaatctccaggaagaccctgtttcctatctgtgtgcctccatggcagtgaccagcaaaagcgcaagggtgccgcagccacggcgaaaagaaagtccaagggtggaggggtgaacgtggagggacgtctgtgcacctggccccctgaagacccac

SEQ ID NO: 156261 - DNA, 1193 bp, Homo sapiens
cagaccatccaagaagacagtgcagccacctccgagatccttgatgtgatggcgtcacagaagagaccctcccagaggcacggatccaagtacctggccacagcaagtaccatggaccatgccaggcatggcttcctcccaaggcacagagacacgggcatccttgactccatcgggcgcttctttggcggtgacaggggtgcgcccaagcggggctctggcaaggactcacaccacccggcaagaactgctcactacggctccctgccccagaagtcacacggccggacccaagatgaaaaccccgtagtccacttcttcaagaacattgtgacgcctcgcacaccacccccgtcgcagggaaagggggccgaaggccacagaccaggatttggctacggaggcagagcgtccgactataaatcggctcacaagggattcaagggagtcgatgcccagggcacgctttccaaaatttttaagctgggaggaagagatagtcgctctggatcacccatggctagacgctgaaaacccacctggttccggaatcctgtcctcagcttcttaatataaccgccttaaaactttaatcccacttgccccctggtacctaattagaacagatgaaccccttccctaatgcccggggagttggggcccgtaattaagggtcaggccacggcagcctaccggcaatttccggccaacagttaaatgagaacatgaaaacagaaaacggttaaaactgtccctttctgtgtgaagatcacgttccttcccccgcaatgtgcccccagacgcacgtgggtcttcagggggccaggtgcacagacgtccctccacgttcacccctccacccttggactttcttttcgccgtggctgcggcacccttgcgcttttgctggtcactgccatggaggcacacagctgcagagacagagaggacgtgggcggcagagaggactgttgacatccaagcttcctttgtttttttttcctgtccttctctcacctcctaaagtagacttcatttttcctaacaggattagacagtcaaggagtggcttactacatgtgggagcttttggtatgtgacatgcgggctgggcagtgttagagtccaacgtggggcagcacagagagggggccacctccccaggccgtggctgcccacacaccccaattagc

SEQ ID NO: 156262 - DNA, 2240 bp, Homo sapiens
cgcgccagagagaagcagcctccggccccggcggcccctgtctcccgaccccggaaggcgaagcaggctgcccggggaccccgcgcgtgggcgcttgaagccgagaccagcctgcccgggcctgggcaggcggagcagggccttggaccccgcggcgcccctcggcctcggagcaacgagcgcagcgccgcctctgaagagccaatccattcaggatgggaaaccacgcaggcaaacgagaattaaatgccgagaaggccagtacgaatagtgaaactaacagaggagaatctgaaaaaaaagagaaacctgggtgaactttcacggacaacctcagaggacaacgaagtgttcggagaggcagatgcgaaccagaacaatgggacctcctctcaggacacagcggtgactgactccaagcgcacagcggacccgaagaatgcctggcaggatgcccacccagctgacccagggagccgcccccacttgatccgcctcttttcccgagatgccccggggagggaggacaacaccttcaaagacaggccctctgagtccgacgagctccagaccatccaagaagacagtgcagccacctccgagagcctggatgtgatggcgtcacagaagagaccctcccagaggcacggatccaagtacctggccacagcaagtaccatggaccatgccaggcatggcttcctcccaaggcacagagacacgggcatccttgactccatcgggcgcttctttggcggtgacaggggtgcgcccaagcggggctctggcaaggtaccctggctaaagccgggccggagccctctgccctctcatgcccgcagccagcctgggctgtgcaacatgtacaaggactcacaccacccggcaagaactgctcactacggctccctgccccagaagtcacacggccggacccaagatgaaaaccccgtagtccacttcttcaagaacattgtgacgcctcgcacaccacccccgtcgcagggaaagggggccgaaggccagagaccaggatttggctacggaggcagagcgtccgactataaatcggctcacaagggattcaagggagtcgatgcccagggcacgctttccaaaatttttaagctgggaggaagagatagtcgctctggatcacccatggctagacgctgaaaacccacctggttccggaatcctgtcctcagcttcttaatataactgccttaaaactttaatcccacttgcccctgttacctaattagagcagatgacccctcccctaatgcctgcggagttgtgcacgtagtagggtcaggccacggcagcctaccggcaatttccggccaacagttaaatgagaacatgaaaacagaaaacggttaaaactgtccctttctgtgtgaagatcacgttccttcccccgcaatgtgcccccagacgcacgtgggtcttcagggggccaggtgcacagacgtccctccacgttcacccctccacccttggactttcttttcgccgtggctgcggcacccttgcgcttttgctggtcactgccatggaggcacacagctgcagagacagagaggacgtgggcggcagagaggactgttgacatccaagcttcctttgtttttttttcctgtccttctctcacctcctaaagtagacttcatttttcctaacaggattagacagtcaaggagtggcttactacatgtgggagcttttggtatgtgacatgcgggctgggcagctgttagagtccaacgtggggcagcacagagaaagggaacacctccccaggccgtggctgcccacacaccccaattagctgaattcgcggtgggcagagggaggaaaaggaggcaaacgtgggctgggcaatggcctcacatatacactggctgtgaccgggcgtgctggcagcggcagtgcacagtggccagcactaaccctccctgagaagataaccggctcattcacttcctcccagaagacgcgtggtagcgagtaggcacaggcgtgcacctgctcccgaattactcaccgagacacacgggctgagcagacggccccgtggatggagacaaagagctcttctgaccatatccttcttaacacccgctggcatctcctttcgcgcctccctccctaacctactgacccaccttttgattttagcgcacctgtgattgataggccttccaaagagtcccacgctggcatcaccctccccg

SEQ ID NO: 156263 - DNA, 2921 bp, Homo sapiens
atgggaaaccacgcaggcaaacgagaattaaatgccgagaaggccagtacgaatagtgaaactaacagaggagaatctgaaaaaaagagaaacctgggtgaactttcacggacaacctcagaggacaacgaagtgttcggagaggcagatgcgaaccagaacaatgggacctcctctcaggacacagcggtgactgactccaagcgcacagcggacccgaagaatgcctggcaggatgcccacccagctgacccagggagccgcccccacttgatccgcctcttttcccgagatgccccggggagggaggacaacaccttcaaagacaggccctctgagtccgacgagctccagaccatccaagaagacagtgcagccacctccgagagcctggatgtgatggcgtcacagaagagaccctcccagaggcacggatccaagtacctggccacagcaaggtaccatggaccatgccaggcatggcttcctcccaaggcacagagacacgggcatccttgactccatcgggcgcttctttggcggtgacaggggtgcgcccaagcggggctctggcaagagactcacaccacccggcaagaactgctcactacgggtccctgccccagaagtcacacggccggacccaagatgaaaaccccgtagtccacttttttcaagaacattgtgacggcttcgcacaccacccccgttcgcaggggaaaggggagaggattgtccctgaggcagattttagctggggggcccaaaggccagagaccaggattttggctacggaagcaaaagcgtccgactataaatcggctcacaagggattcaagggagtcgatgcccagggcacgctttccaaaattttcaagctgggaggaagagatagtcgctctggatcacccatggctagacgctgaaaacccacctggttccggaatcctgtcctcagcttcttaatataaccgccttaaaactttaatcccacttgcccctgttacctaattagagcagatgacccctcccctaatgcctgcggagttgttgcaagtagtaggggtcaggccacgggcagcctaccggcaattttccgggccaacagtttaaatgagaacatgaaaacagaaaacgggttaaaactgttcccttttctgtgtgaagatcaagttccttcccccgcaatgttgcccccagacggcacgtggggtctttcagggggccaggtgcacagacgtccctccacgttcacccctccacccttggactttcttttcgccgtggctgcggcacccttgcgcttttgctggtcactgccatggaggcacacagctgcagagacagagaggacgtgggcggcagagaggactgttgacatccaagcttcctttgttttttttttcctgtccttctcttcacctccttaaagtaagacttcattttttcctaaacaggatttagacagttcaaggagtggcttactacatgtgggggagcttttggtatgtggacatgcgggctgggcagctgttagagtcccacgtgggggcagcacagagagggggccaacttcccagggccgtggctgcccaaaaaacccaatttagcttgaattcgcgtgtggcagagggaggaaaaggaggcaaacgtgggctgggcaatggcctcacataggaaacagggtcttcctggagatttggtgatggagatgtcaagcaggtggcctctggacgtcaccgttgccctgcatggtggccccagagcagcctctatgaacaacctcgtttccaaaccacagcccacagccggagagtccaggaagacttgcgcactcagagcagaagggtaggagtcctctagacagcctcgcagccgcgccagtcgcccatagacacttggctgtgaccgggcgtgctggcagcggcagtgcacagtggccagcacttaaccctccctgagaagataaccggctcattcacttcctcccagaaggacgcgtggttagcgagttagggcacaggcgtgcaacctgctcccgaattactcaccgagacacacggcttgaagcagacggccccgtggatggagacaaagagctccttctgacccaaaacccttccttaaaaaaccggctgggcatcctccctttcgcgccctcccctcccctaaccctactgaccccacccttttgaatttttagccgccaccctgtgaattgaataggcccttcccaaaagagtcccccacggctggcatcgcccctcccccgaggacggagatgaggaagtaagtcagccgtgatgcccaaaacgccgtccttccttaatcccaattcctaattcctgaatgtttcgtgtgggcttaataccatgtcctattaatatatagcctcgatgatgagagggttacaaagaacaaaactccagacacaaacctccaaatttttcagcagaagcactctgcgtcgctgagctgaggtcggctctgcgatccatacgtgggccgcacccacacacgcacgtgctgtgaacgatgggcttgaacggaaagtgttacactgttcctgaatatttgaaattaaaacaataaacttttaaaaaaaaaaaaaaaaaaaaagggacatgaggaattttgatacaagcatgtaatgcttattaatcacatcatggaacacagggtatccatcccctcaagcgtttatcctttatattataaacaatctaattctacccttttcattattttaaagtacacaattaagttattattaactatagttaccctgttgtgctatcaaatactaggtaaatttgatcctattttcttgtacccattagccatcaccctcttcctccaagcaccccactacccttcctagcttctgatgactgtgcttctattctctatgtccatgagtt

SEQ ID NO: 156264 - DNA, 208 bp, Homo sapiens
cttatgaaatgttatctgatccagtgaaaagacgagcatttaacagtgtagatcctacttttgataactcagttccttctaaaagtgaagcaaaggataatttcttcgaagtgtttaccccagtgtttgaaaggaattccaggtataattttgattcttggagagaattttcttatttagatgaagaagaaaaagaaaaagcagaatg

SEQ ID NO: 156265 - DNA, 394 bp, Homo sapiens
ccggttcctgggcgtcttaaagccaaggcgcgaggctcggagtgagaggtagagctggaggggaccctaagcgccctccgcccgggacgtgagccgctgcgcccaccgggctagacccggcgccatcatgctgcttctgccaagcgccgcggacggccggggcaccgccatcacccacgctctgacctctggaactggaggataagaaagagttatccgaggaatcagaagatgaagaattgcagttggaagagtttcccatgctgaaaacacttgatcccaaagactggaagaaccaagatcattatgcagttcttggacttggccatgtgagatacaaggctacacagagacagatcaaagcagctcgtaagtacttagttattttgaaata

SEQ ID NO: 156266 - DNA, 2019 bp, Homo sapiens
cgtaccggacttcccgggtcgacgatttcgtacgaaagatccatcccggaagtgcttactggtcgtctccatgcgccggttcctgggcgtcttaaagccaaggcgcgaggctcggagtgagaggtaaagctggaggggaccctaagcgccctccgcccgggacgtgagccgctgcgcccaccgggctagacccggcgccatcatgctgcttctgccaagcgccgcggacggccggggcaccgccatcacccacgctctgacctctgcctctacactctgtcaaggtggaacctgtgggaagatggtttgaagcttttgttaagaggagaaacagaaatgcttctgcctcttttcaggaactggaggataagaaagagttatccgaggaatcacaagatgaagaattgcagttggaagagtttgccatgctgaaaacacttgatcccagagactggaagaaccaagatcattatgcagttcttggacttggccatgtgagatacaaggctacacagagacagatcaaagcagctcataaagcaatggttttaaaacatcacccagacaaacggaaagcagctggtgaaccaataaaagaaggagataatgactacttcacttgcataactaaagcttatgaaatgttatctgatccagtgaaaagacgagcatttaacagtgtagatcctacttttgataactcagttccttctaaaagtgaagcaaaggataatttcttcgaagtgtttaccccagtgtttgaaaggaattccagatggtcaaataaaaaaaatgttcctaaacttggtgatatgaattcatcatttgaagatgtagatatattttattctttctggtataattttgattcttggagagaattttcttatttagatgaagaagaaaaagaaaaagcagaatgtcgtgatgagaggagatggattgaaaagcagaacggagcaacaagagcacaaagaaaaaaagaagaaatgaacagaataagaacattagttgacaatgcatacagctgtgatccaaggataaaaaagttcaaggaagaagaaaaagccaagaaagaagcagaaaagaaagcaaaagcagaagctaaacggaaggagcaagaagctaaagaaaaacaaagacaagctgaattagaagctgctcggttagctaaggagaaagaagaggaggaagtcagacagcaagcattgctggcaaagaaggaaaaagatatccagaaaaaagccattaagaaggaaaggcaaaaacttcgaaactcatgcaagatagaagaaataaatgagcaaatcagaaaagagaaagaggaagctgaggctcgtatgcgacaagcatctaagaacacagagaaatcaactggtggaggtggaaatggaagtaaaaattggtcagaagatgatctacaattactaattaaagctgtgaatctgttccctgctagaacaaattcaagatgggaagttattgctaattacatgaacatacattcttcctctggagtcaaaagaactgccaaagatgttattggcaaagcaaagagtctccaaaaacttgaccctcatcaaaaagatgacataaataaaaaggcatttgataagttcaaaaaagaacatggagtggtacctcaagcagacaacgcaacgccttcagaacgatttgaaggtccatatacagacttcaccccttggacaacagaagaacagaagcttttggaacaagctttgaaaacatacccagtaaatacacctgaaagatgggaaaaaatagcagaagcggtgcctggcaggacaaagaaggactgcatgaaacgatacaaggaacttgtcgagatggtaaaagcaaagaaagctgctcaagaacaagtgctgaatgcaagtagagccaagaaatgacaatctttgttgtgtgtgcatttttataataaaactgaaaatactgtaaacattttcattcttaaaattatactcatggtaataatttgaaagtaaaaaaaaaaaaaaa

SEQ ID NO: 156267 - DNA, 1910 bp, Homo sapiens
gacgtgagccgctgcgcccaccgggctagacccggcgccatcatgctgcttctgccaagcgccgcggacggccggggcaccgccatcacccacgctctgacctctgcctctacactctgtcaagttgaacctgtgggaagatggtttgaagcttttgttaagaggagaaacagaaatgcttctgcctcttttcaggaactggaggataagaaagagttatccgaggaatcagaagatgaagaattgcagttggaagagtttcccatgctgaaaacacttgatcccaaagactggaagaaccaagatcattatgcagttcttggacttggccatgtgagatacaaggctacacagagacagatcaaagcagctcataaagcaatggttttaaaacatcacccagacaaacggaaagcagcttggtgaaccaataaaagaaggagataatgactacttcacttgcataactaaagcttatgaaatgttatctgatccagtgaaaagacgagcatttaacagtgtagatcctacttttgataactcagttccttctaaaagtgaagcaaaggataatttcttcgaagtgtttaccccagtgtttgaaaggaattccagatggtcaaataaaaaaaatgttcctaaacttggtgatatgaattcatcatttgaagatgtagatatattttattctttctgggtataattttgattcttggagagaattttcttatttagatgaagaagaaaaagaaaaagcagaatgtcgtgatgagaggagatggattgaaaagcagaacagagcaacaagagcacaaagaaaaaaagaagaaatgaacagaataagaacattagttgacaatgcatacagctgtgatccaaggataaaaaagttcaaggaagaagaaaaagccaagaaagaagcagaaaagaaagcaaaagcagaagctaaacggaaggagcaagaagctaaagaaaaacaaagacaagctgaattagaagctgctcggttagctaaggagaaagaagaggaggaagtcagacagcaagcattgctggcaaagaaggaaaaagatatccagaaaaaagccattaagaaggaaaggcaaaaacttcgaaactcatgcaagacctggaatcatttttctgataatgaggcagagcgggttaaaatgatggaagaagtggaaaaactttgtgatcggcttgaactggcaagcttacagtgcttgaatgaaacactcacatcatgcacaaaagaagtaggaaaggctgctttggaaaaacagatagaagaaataaatgagcaaatcagaaaagagaaagaggaagctgaggctcgtatgcgacaagcatctaagaacacagagaaatcaactggtggaggtggaaatggaagtaaaaattggtcagaagatgatctacaattactaattaaagctgtgaatctgttccctgctggaacaaattcaagatgggaagttattgctaattacatgaacatacattcttcctctggagtcaaaagaactgccaaagatgttattggcaaagcaaagagtctccaaaaacttgaccctcatcaaaaagatgacataaataaaaaggcatttgataagttcaaaaaagaacatggagtggtacctcaagcagacaacgcaacgccttcagaacgatttgaaggtccatatacagacttcaccccttggacaacagaagaacagaagcttttggaacaagctttgaaaacatacccagtaaatacacctgaaagatgggaaaaaatagcagaagcggtgcctggcaggacaaagaaggactgcatgaaacgatacaaggaacttgtcgagatggtaaaagcaaagaaagctgctcaagaacaagtgctgaatgcaagtagagccaagaaatga

SEQ ID NO: 156268 - DNA, 812 bp, Homo sapiens
aagggtactcgaactccagccagtgaccctgctgctgggtgaccatggctgggtagagcatgtggataatggtatccgttataagttagacgtgacccagtgtatgttctcctttggaaacatcactgagaagcttcgagtggcatcgttgtcctgtgctggagaagtgctggtggatctctatgcagggattggttattatacattgcctttcctagttcatgctggtgctgccttcgtccatgcttgtgagtggaatccccatgctgtagttgctctgagaaataaccttgagatcaatgcgagtagcagatcggtgccaaatacactttggagataacagaaaactgaagctctcaaatattgcagatagggtgatcctggggctgattcccagctctgaagaaggctggcccattgcctgccaagtgttaaggcaggatgctggaggccattttgcatatccaccaaaatgtggaatctttcccagggaagaatcttcaggctcttggagtcagcaaagtagagaaagagcattggctgtatcctcagcaaattaccaccaaccaatgggaaaaatgggagctaccagggattctaggggaaaaattgctgtcaccagccaccaagccacagttggcaaaggtgggcagaatctgcagaaactcgaatcgccactcttcttcagcaggtgcatgggaaaccatggaagacacaaattctgcacatccaaccagtgaaatcctatgctccccatgtggatcacatagtcctggatctggaatgctgcccctgtccttcagttggctaga

SEQ ID NO: 156269 - DNA, 1218 bp, Homo sapiens
tttctttctttgagacggagtcttgctctgtggctcatcctggagcacagtggtgcgatatcagctcactaccacctccgcctcctgggttcaagcgactgtcctgcctcagcctcccgagtggctgggattacaggcacacatcaccacgcctggccaatttttgtatttgtagtagagacagggtttcactgcctgcctcagcctcccatagtgctgggattacaggcatgagcctccgtgcccggtgcatccctaatcttgagcatgatctcagtcggcaaatgaggccatctgttttcagcctgtttgaaaataagatgtgggggagggccatgatgggaaataggcacgttggggttaaacataactggcagatgtgggagcgatggtggggcatgccattcaaaccaggtcccaaaatgggtgcaacaaggtatagcacatctaccactcgctaacttgactgacttggagaaatgactacacttttgcctgtttcctcagttggaaaatagccatattaacacctctttcattggcttgctgtcagggtactgggatggggggaggtgcatgggttggggtggccaccaggtggtgctgtgccacagcgggcagcccctctggaaatgactggcatcataaaatctgtcttcatacccgaggtagtgttttttgtttttttaagatctctaccttttaaaagcgtggcatacagtgtgcttggtattgtgttaggcatttagacgtgctcaggttgtaaggttgaagtgccagtctttgaatattctgtaaggattgtgagggtgtgaggtggttttgagtctggtcacgggtcttgtttcctccggtttaggttgggtacaccagccctcaggcccaggtgcggcactgtgggcggctttcagcctttcccgttctgtaagcattgcagattcccaaggaaaagcgagcctttaccatgtgggttttctttgttcccagcacatcgtccagagtttcatcccagctcctatgagacaggccttgcaggggtgtgtccagccttgtctagagaaggccgcctttcatgcagtgcttcccagccctggcttgggactcagtcatctggggcacttaggcagttcactgtgggggccagggctgactggagattgcgaatgcggtggtctggggcataagtgtgttttcaagctctcaggtgggcctctgctt

SEQ ID NO: 156270 - DNA, 770 bp, Homo sapiens
gcgtcgacgtcttgctttgtcaccagctggagtgcactggcatggtctcggctcactgcaacctccacctccctggttcgagcgattctcctgcctcggcctcctgagtggctgggactgcaggcgtgcaccaccacgcccagctagtttttttgtatttctagtagagacagggtttcgccatgttggcaaggatggtctcgatttcttgacttcgtgatccgcccgccttggcctcccaaggtgcctgggattgcaggtgtcagcccaccgcacccggcctcaaatacattttttttaatgggccttgtctttcctggttttaggcccttttccacaatttctgatggaaatacagaaaccttgccatcattcttactgctggtttgcatctcatttatggtgtatctgggatttcttctcatgaacagaaagattcgagtggctgttatatgccttgtcaatttaatgtattgccctatcctctttttgatcaaagatagagactaagactggggaattatgacagaaaaagtccatatttttcctttaaaatggattttggaaatgttaaaataggccaatatgagtcaaagtgcaaattttttggtgagtaggttgacaaaaaaaaaaaaaattccgggaaaaaaggggcaattttttatgggcccaaattttttggttggcctaaggaagggtcccctctatttaatggttttaatatgctacaaagccccattttctgcagttatggaaccaggggggctgta

SEQ ID NO: 156271 - DNA, 290 bp, Homo sapiens
aaacccatctctttcattaaaccacctcattttggttcagaaacaagactgccatgtatgtatttaatgcttattatgtgccaagcactattccaggtactaagatacagtgatggacaaaacaagatcccttctcctctatctcaggacttattaatttgggcattttcattttccaatataggatcttttagtactggtataggattcctgaaggaattcctgaaatataattatttttctgctagagcaaatcaattttggtttttggtttttttttgagatggaga

SEQ ID NO: 156272 - DNA, 947 bp, Homo sapiens
cactgcaacttccccctcccagttcaagcaattcttggttctagcaattctcgtgcctcagcttcccgagtagctgggactacaggtgcactccaacacatgcagctaattttttgtattttagtagagacggggtttcaccgtgttgcccaggctggtctcgatcttctgagctctgacaatccatccgcctcgtcctcccaaagtgctaggactacaggcgtgacgaccccacctgaccaatttcttgttcttttaaaagtacagtaattatttttaagttccagtaataaattaatgggtagtctgtcaaatagctactggattttatatcaggagggctttctacatgtatgtatacccaaaaatgacattaagacctttttacatacactcactgtagagatacatcccaaaacaaggtaaggaatataaatgatgtttaccttcttttcaaaccaacagttcctttatacaaaaacaccatgatgatacaaaacatatttttttaaaagtacaaagttccatacagaataaaataaacactttatggttattcctaagaataagtagtgacaaaaagtctttgcaattgggtaataaaatttcagcttctaggaatatgtttccctcttccttgtccttttgagagctgccactatcacacaattcacagcatctcttcaaccacagaaaattagcgtctcttcaagcacagagaccatatattaattatctttgtgtctcctgcataggattaactcagtgtttgttataactaagttaaactccaagacaggagcttcaaatcacctcaggcccaatccaaaactgaaaaaaagacgcttctcagagtttgagaacaaaaagatactgacaaagaacaaagccatagatacttgtgcgacattagctcccacgcgtccgcggacgcgtgggtcgagccg

SEQ ID NO: 156273 - DNA, 713 bp, Homo sapiens
aactggaaatcttttttttttttttttcatttacttttttttgagatggggtctcactatgtttatcaggctggtcttgaacttctggcctcaaatgatcctcctgcctctgcctctgcctcccaaagtgctgggattacaggcttgagccactgtgtctgtcctctttttggaattaattagggcttgttaatttttttaaattatatgttttgtgataaaacatttagaagtccatgttttttattctgtactgtgtagcttaagaaatgtcaaaaccagggagtacaggcttattgggcacactagaaacaagagtggggaaagggttaattcacagacctgggccagtctcctcctgtctttcaagggcgatgatttaccctgtgattctcagacttcacatgtaccagaaatctttgggggcaacgtgctaacgtgcaggttctcagtccctttccccagcgattttgatttcgtggaatttcagttgatcattcaggacacagtataaagttcttatgcagagagaagctgacttgaactatccctatatgactgaggtgcttttaccaggaaggggcttttatagtttcagtcatatatggatgaaaaaggtgctgtattctttttctatgaactactttgtgtattttataagcagtatatatgtactgatacttgtttatcagacattgtgcggtgcatggtgt

SEQ ID NO: 156274 - DNA, 827 bp, Homo sapiens
  misc_feature (1)...(827): n = a,t,c or g
cagtgtgaccctgactgggcccgggccctggggcttccgtctgcaggggggcaaggacttcaacatgcccctcactatctcccggatcacaccaggcagcaaggcagcccagtcccagctcagccagggtgacctcgtggtggccattgacggcgtcaacacagacaccatgacccacctggaagcccagaacaagatcaagtctgccagctacaacttgagcctcaccctgcagaagtagatcaaagcgtcccattcccatctccacgacagcacctccagtccagaccccttgccgggtgatccctcaccagaaggagcctccctattaaggacttttgccgtagacagcgctcttcccgtctacanngctgtgaattaagagccagaacaagccagagatgagtgnnacgagtggaaccgccggtcctcacccctggcagctcgcttctttcgcatctggcccaatgacggggaccgaaatcatgagaccctgttggagaactcttcggaaaggcagcccctatgagcggncnnccccgtgtgaccaccaagcaccacccgctgtggcncgctttgcagcaactgtgtgcttttccaaggcgggtttgcaccctgcacaagtgtgccacactggctngcttcgctcacacacgtgnnttaagctggcgcaggcaaggccggcctcttccgggccgcatgccgcctttagactggcaccacgntcaaagaggggccggcgccttgaccaccggggtgtannactggcgcatcgccttgtgtatcaacagggctggatctacctacgccgtccagggggcaattca

SEQ ID NO: 156275 - DNA, 408 bp, Homo sapiens
agtgtggtggaattccatcacaggctacaattttcactttatccactttaataagttctgtcacctctctgaattcaacatcattcagtacaaaagtccacacattatcgcagaatctgtacgtatttagagagcccctgaaattgactctgttcctgaccctctgagccagtgctgcatttatagccttatcaaactgaagtagaacttgaagggcaagttggggggtgatctgttgagactgtatgagctcatctaggctctcctgaagactgtttcccaaagtagtatttctgtataactgatatgccatggcttaggaggaagaatttgtttttctacatttcagagcaagtgtagattctgagggactcctatttgccaaaaagacaaaactagcaaaaaaaa

SEQ ID NO: 156276 - DNA, 4795 bp, Homo sapiens
gcggccgctgacagcaccagcatgtcttacagtgtgaccctgactgggcccgggccctggggcttccgtctgcaggggggcaaggacttcaacatgcccctcactatctcccggatcacaccaggcagcaaggcagcccagtcccagctcagccagggtgacctcgtggtggccattgacggcgtcaacacagacaccatgacccacctggaagcccagaacaagatcaagtctgccagctacaacttgagcctcaccctgcagaaatcaaagcgtcccattcccatctccacgacagcacctccagtccagacccctctgccggtgatccctcaccagaaggaccccgctctggacacgaacggcagcctggtggcacccagccccagccctgaggcgagggccagcccaggcaccccaggcaccccggagctcaggcccacctttagccctgccttctcccggccctccgccttctcctcactcgccgaggcctctgaccctggccctccgcgggccagcctgagggccaagaccagcccagagggggcccgggacctactcggcccaaaagccctgccgggctcgagccagccgaggcaatataacaaccccattggcctgtactcggcagagaccctgagggagatggctcagatgtaccagatgagcctccgagggaaggcctcgggtgtcggactcccaggagggagcctccctattaaggaccttgccgtagacagcgcctctcccgtctaccaggctgtgattaagagccagaacaagccagaagatgaggctgacgagtgggcacgccgttcctccaacctgcagtctcgctccttccgcatcctggcccagatgacggggacagaattcatgcaagaccctgatgaagaagctctgcgaaggtcaagcacccctattgagcatgcgccggtgtgcaccagccaggccaccaccccgctgctgcccgcttctgcccagccacctgctgctgcctctcccagtgcggcttcgccacccctggccacagctgctgcccacactgccatcgcctccgcctccaccacagcccctgcttcaagtcctgccgacagcccaaggccccaggcctcttcctacagccccgcagtggccgcctcttcagcacctgccacccacaccagctacagtgagggccccgccgcccctgcacccaagccccgggttgtcaccactgccagcatccggccttctgtctaccagccagtgcctgcatctacctacagcccgtccccaggggccaattacagtcccactccctacaccccctcccctgcccctgcctacaccccctcccctgcccctgcctacaccccctcacctgtccccacctacactccatccccagcaccagcctataccccctcacctgcccccaactataaccctgcaccctcggtggcctacagcgggggccctgcggagcctgccagccgtccaccctgggtgacagatgatagcttctcccagaagtttgccccgggcaagagcaccacctccatcagcaagcagaccctgccccggggaggcccagcctacaccccagcgggtcctcaggtgccaccacttgccagggggaccgtccagagggctgagcgattcccagccagcagccggactccactctgcggtcactgcaacaatgtcatccggggcccatttctggtagccatgggccgttcttggcaccctgaagagttcacctgtgcctactgcaagacttccctggcagatgtgtgctttgtggaagagcagaacaacgtttactgtgagcgatgttatgagcaattctttgccccgctgtgtgccaagtgcaacaccaaaattatgggggaagtaatgcatgccttgagacagacatggcacaccacctgcttcgtctgtgcggcctgcaagaagccttttgggaacagcctctttacacatggaagacgggggagccctactgcgagaaagactacatcaatctgttcagcaccaagtgccattgctgccatttgccccgtggaggctggcgacaaggttatcgaagccctgggccacacttggcacgacacctgcttcattttgcgcagtcttgccatgtgaatctgtgaggggcagccgttctactccaagaaggacagacccctgtgcaagaagcacgcacacaccatcaacttgtaggcggccaaggccgcctgtgctgacgaggcccggagctgctcctgctgctggcaacaaaggattcgggaggctgatgtttcttctgaggggaatggggagagagaggaagcgactgagccctttggaagtataattttaggttttttcttctgtacacagatcgtgcatttgcatagttcagactaggagccaaatgaagactcaaaaccaagctagttattaatccaagactggaattgtacttcagacatttagagcagaattccaagaactcaaaagtgaaaagcaacaagcagctttcccaaagccgatacacttgctttggtcaccagagggaggaccagagctttagagccagctgttggagaatcctggaagcatttctgccggagttccttaagcgctcccctggcaaacaaattgaagtgccaaacagcactcgctgcagggtatttttagagtcatagctgagagcttgttagctaagacccattgggctttcctcaccaaaaaaggaagtgttattccattactagcgtcatggagctacctctgcgcatcagacttcagaccttgaacaaacttaaaaccttcttgggagcccggacgtccaaagagatgtcttctgggagccactgggcaattgccagggctccaggaagggctctggctcaggttgcagacagctgagaaaagatggccctgtcagccaccctctctcagtctgaaacatccaacatccccagaaggcttagctcctttttgaattgtgatgggaaagtagagttgggtttttccagttttgctctgtggtgtgtgagagatttttttaaaggctttgggttgtctttggcctttgtttagctttaagggttcgttagcatgagtgtccagtcgtgtgcatgaatttcaccccaacttgtgactgctcacttatgacgtctcccccagtaccctccatctcaaataggcttggtggcctgtggaaaagaagagagacagagagacagtgtctgaaacaggatggcagaataggctcacatgcccaaactctgggtggggaagaggaaacttactttctgccaccctcagtaagaacacacgaggaggcaggacctcccaccttcaggtctgcatcatccttttcaaatgttcctttaaatgcagcacactgagtttgtacaattgtgttaactgctggaagggacagatgcactgatatatatgcatttgctgttttggccaatattttgaaaatgtatgagctgagttgatctagctattatttaagtatttattgaagtagaggggccttcaaactactttatactagtgatagtttgagttaggtaagcatcttaaagctgtttggtgataaagaaggcagcttagattctgtggttggaaacagtgtagtcgcttccctttttaggaagccctgttaatatgctcattgaaaacatggcattgaagcaggcacttgcgtggatgtttctcacttgagcacgatatttaggctctcttccaactcactctattctgtcctcactccctgttttggattttttctcttggcatgtttgaaaatgttttatgggaatgtattagaaactctttttcttcttaagggactgagactttccaggggattgcccatctttacctgtctcttctcccatgagggagaaggaaagcagcttagcttatgtcccttagctgcaggaagcccctattttttcccaagcacgaagccaccaagtcttccccaagggagcaatcagggaagggacatgggatgtgcttccttccacagggcccgttcctacctttggatctgtgaagaaggtgaatacaaagcagcaggcagagtaaaatctgctgggactgcctggagatttgtcaggagctgcagacaagtaccttggagcattctagttatttttggaaagttcaaatatgcagggacaaggaggttgctgactgtacttgacaggctctaagtcattttctccaaaaactatctattcaattatcaggggctggtcttgaggaaggaaaaaaataaaaaaaaacgttcccaagaattcagtttccaaaatctctttttaaagggtttacacacacacacacacacacacacacacacacacacacacacacacacgatcgattaaaaagtgtatgctctttaagaagaaaagtaaaatatctcaaaggacggtttcaccaccgtccttttattgaatcaatttttctacatttcagagcaagtgtagattctgagggactcctatttgccaaaaagacaaaactagcaaaaaaaaaaacaaaaaaacaaaaaaaaaaccacttaaaagggaaccagaaaaaaaaggaacttttaaagggggttcactcagtgtctgtgagtctggtgtagtgtcaggagtaaggccgtgtctagctcaagtttacatttggatgtcctacaaccctaaccaaaattttcaaaaacccaggggggggagcacacttggaacctacatttttggccccctaatgggggactttaataaaccttttatgggccaggcccaggggctaa

SEQ ID NO: 156277 - DNA, 2925 bp, Homo sapiens
  misc_feature (1)...(2925): n = a,t,c or g
cggacgcgtgggggggacgtgaagactgaccttaataacatcgaggagttcctggaggagaccttgacccctgaaaagtaccccatactggctgcaaaacaccgggaatacaacacagaggacatcgacatcttttacaagttttctgcctacatcaaaaataccaagcagcagaacaatgctgctcttgaaagaggcctaaccaaggctctaaagaaagtggatgactacctgaacacccctctaccacaggagagagacgcctacacttgtggggaagacaaggggacccggcgcaagttcctgggatggggatgagcttgaccctggcttgactgcaatctgtttgcccaagctccatgtggttcaagattgtgggcaagaaataccgcaactatcatatcccagctgatatgacaggcctgtggcggtacctcaagaacgcctatgcccgtgaatgagttcaccaacacctgtgcagctgacagtgagatcgagttggcctacgctgatgtcgccaaacgcctcagccgatcctgagcacagccattttgccccatccccgctgcagaaggactcaaccactcccctaagactccagcttcatagactcctctgtatcactgccttgaggcgcactttttataatcaagcctcatcttgctggtatcatgggaactccagcctgctatctttcatgaagtttcatctcctaaaaagcttacccagcctgagcttggggacctgtgcagaggaaactaagaaaaatgcactcatcaactccttctcccagtgaacgcccgagatctttctccagatgcttcagcctgtctggccttcttatcatatgtgcagcacatcatgtctcagcaacagtgtggtgaggtccttaggtgtcccaagaacaactcagggagcacgggagggtctgcagttgggaccccacaactatacagctatagggtaggaggcttccttttcattggtcctgaatgaatacaaatcgctcagaaagcattttggtggcacagaaaggggatgtatttgtgttgagatcttattttattttgtatttatttatcttctttgacttgcacagcactattgggggtgggggaagcagggtagtgggagacgaaggcagaagcaagagtcaaactcagaatgactgagttgaattcactgtctagtcagcaatgcctgcttctgagtttggcccagagagaaggtattgagtaagattttaataactgtaaaaagtaagctggataagtaaaatcatgatggatccaaagcacagtttcttcatctcctgataaagaaagtcaaatgcttgataaattcagagtcacagatgtgagcatagctatattcttttaaacgagaggtagagtgacctagcactaagcaaatgagctgaaatgtcggaaacagagtccatcagcttatttggccacacgatcccaaacttgttttattcttggggaaatggccctgttcctcagcattcccttcttgttgctggtggggccagtggaagtcttgatcttattcaggtaaagggccacaccaagtgcgagttttcccagggttgactttccagggcccttatcaaatgaaacaacagaagctctttcacagttctgttgccccttggccacttccacagacagacaataccaagcatcttagaactgtcataagataggtcatgcctgaaatagatcttgaccatatgagagtcccagaaatcagcaaggcctggacaaatagaactaagagagaggcagaggcaggaagctgcggagtctatcttgtaaagagtttagcatcactgtgagaagtgtgtgtccaaaattaaattaaactagaagcagcaggtgagtatttggtaagtacttctgtgactcgcctcaattcccactggccaggggccatctcaactgcacggtgaatcaagatgctggtgtcatcctccttggaaaaaggaaatgttaactcatggttaaaactaagtacaatgattcccaagggatcactttcttatttttttaaatgacattaaggagaatcttaagaaagcatcagagaaagacatgtgcatgtgaagcaccctgattctgatgttagggaaaacttaaggcgaacaggacctgctggcacacagccccattgtcttctatccattttctctttatcctttcaaatccaggcaacatgtgccctcctcatcaacacacatttttcccctttgtcagtatgcatctcccagcttagtgtcaggatcctttcgattcataattatgtatgatccaaagtgtgcataatttcatttaccgttaaagaaatagatccaattcctttcttgcaaccaaaaataaataaaatacgttgcctcaatataaggtttgggctattctgtgtttctatagaagcaatctgtttttggtaaaatgtacttttaaggatccagtcatcctgaagtattttatgtagagttagagatttcacaatattgacctatacatatattgtaaaaataataaattaccccaggctgatgtttgaatttgcccttaccttcccccggccaccctcgttgcccctattttataagctggggagttaacctagccttaacaaaagatgcttagcttttgtaaaagaacaagtgtttcattttacaaagacactccaaatgatagttacttgattttctcgagacctttaactatggtgatgaataacaggacttgctttcaacgccttaataaatnggtaaaatcgccttttaatgaagataacagctgagtgttttcctcatgaatctgaaccaattaccaatttgtgttccagtcttgattggtattgactgattcaaataaagttggtttattttcaaatattaaaaaaaaaaaaaaaaaa

SEQ ID NO: 156278 - DNA, 788 bp, Homo sapiens
tgggaggggcccacctgctctatgtgcaaggtgattggcatccacaacgcctgcgaagaggccccattgcacagtgtctttcacggacaaaagactgaactgaataactgtatctccatgctggtggcggcgaatgaccgcgtgcacaccatcatcactcagctggaggactcccgtcgagtgaccaaggagaacagtcaccacgtaaatagaagagctgagccagaagtttgacacgttgtatgccatcctggatgaaaagaaaagtgagttgctgctgcggatctcgcaagagcaggaaaagaagcttatcttcatcgaggccctcatccagcagtaccaggagcagctggacaagtccacaaagctggtggaaactgccatccagtccctggacgagcctgggggagccacctttctcttgactgccaagcaactcatcaaaagcattgtggaagcttccaagggctgccagctggggaagacagagcagggctttgagaacatggacttctttactttggatttagagcacatagcagacgccctgagagccattgactttgggacagatgaggaagaggaagaattcattgaagaagaagatcaggaagaggaagagtccacagaagggaaggaagaaggacaccagtaaggagctggatgaatgagaggcccccagatgcagagagactggagagggtggggaggggcccagcggccttggtgacaggcccagggtgtgaggggtcggggcccctggaggggccctggggaggtgctgcttc

SEQ ID NO: 156279 - DNA, 778 bp, Homo sapiens
aactggaagaatggtgatgctgttcaagtaataaggacaaaggggaaccaggcactgtgagcctctgtggggtgtgttactcttttagctcatgtgtttcaagtcattctaccccttgccgtctccacatccaaacctaactactttggattttaattgcagctcctccacccccaccacctgtgatccgaaatggtgccaggggatgctccccctcccccaccaccataccgaatgcatggggtcaggaacccccgaggccgagggaaaggcccccacctccaccctcaagggacgccagctggggccaccccttccttccttccaccgcccctgaggaatggccacagagattctattcaccactgttccggtctttcttggatgattttgagtcaaagtattccttccatccagtagaagactttcctgctccagaagaatataaacacttttcagaggatatatcccagcaaaacaaaccgagctgcccgtgggagccccacctctgccacccattcttcaggtgaagcctggcttggtcccgttcctcatcaaaaggatggaccttctcttcttctcatatggtcccttacattcctctgaactcctgcatgatagctcctaacatgcttctccaatgcatccaatccctatactccaaatgacctaccagcatacctccatctttacatctcatctatcaattagaccatcatactcaatctctacacctactcccctatcacctacttcacgactatcctcataatatcct

SEQ ID NO: 156280 - DNA, 409 bp, Homo sapiens
  misc_feature (1)...(409): n = a,t,c or g
ggtctgcgacgaggcctgcagcatgcagcacgtgtgtgccatgcgccaggtggacattgacgcttacaccacctgtctgtatgcctctggcaccacgcccgtgccccagctcccgctgctgctgatggccctgctgggcctgtgcacgctcgtgctgtgacctgccaggctcaccttcttcctggtaacgggtaacgggggcagcgcccaggatcacccagagctgggccttccaccatttcctccgcgcctgaggagtgaactgaaataggacaaccgaatcaggaagcgaagccccannnnnnnnnnnnnnnnnnnnnnnnnnnnnnnnnnnnnnnnnnnnnnnnnnnnnnnnnnnnnnnnnnnnnnnnnnnnnnnnnnnnnnnnnnnnntgacgacccagtgtatt

SEQ ID NO: 156281 - DNA, 1937 bp, Homo sapiens
  misc_feature (1)...(1937): n = a,t,c or g
aatagtagccgtggacaggccctgagttaccgcgtcgacgatttcgtccctgctgggcaaaggaggaagagccagaggatccagacgctttggaggacttggaacacctgtaacaggacaaggagtcctgctccggcacgtggccacagaaaactacttaggaagcctgtggtgagaacaacaacagtgcctggagaatcccacggctctggggaagtgagccccgaggatgaggctgctcgcctggctgattttcctggctaacctggggaggtgccagggctgaaccagggaagttctggcacatcgctgacctgcaccttgacccctgactacaaggtatccaaagaccccttccaaggtgtgccaatcagctggatcccagccacgtggcccgacgcaggccccctggggtgactacctctgtgattctccgctgggccctcaatcaactcctccatctatgccatgaaggagattgagccagagccagacttcattctctggactggtgatgacacgcctcatgttgcccgaatgagaaactgggagaggcagctgtactggaaattgtggaacgcctgaccaagctcatcagagaggtctttccagatactaaagtctatgctgctttgggaaatcatgattttcaccccaaaaaccagttcccagctggaagtaacaacatctacaatcagatagcagaactatggaaaccctggcttagtaatgagtccatcgctctcttcaaaaaaggtgccttctactgtgagaagctgccgggtcccagcggagctgggcgaattgtggtcctcaacaccaatctgtactataccagcaatgcgctgacagcagacatggcggaccctggccagcagttccagtggctggaagatgtgctgaccgatgcatccaaagctggggacatggtgtacattgtcggccacgtgcccccggggttctttgagaagacgcaaaacaaggcatggttccgggagggcttcaatgaaaaatacctgaaggtggtccggaagcatcatcgcgtcatagcagggcagttcttcgggcaccaccacaccgacagctttccgaatgctctatgattatgcaggtgtctcaataagcgccatgttcatcacacctggagtcacgccatggagaaccacattacctggagtggtcaatggggccaacaatccagccatcgcgtgtcttcgaatatgaccgagccacactgagcctgaaggacatggtgacctacttcatgaacctgagccaggcgaatgctcaggggacgccgcggctgggagctcgagtaccagctgaccgaggcccaatggggtcccgcacgccaccgcccactcaatgcacacagtgctgggccgcattcgttggggacaagagcacactgcagcgctactaccgtctataactcaagtcagctactctgctggggtctgcgacgaggcctgccagcatgcagcacgtgtgtgccatgcgccaggtggacattgacgctacaaccacctgtctgtatgcctctggcaccacggccgtgccccagctcccgctgctgctgatggccctgctgggccctgtgcacgactcgtgctgtgacctgccaggctcaccattcttcctggtaacgggtaacgggggcagcgcccaggatcacccagagctgggccttccaccatttcctccgcgcctgaggagtgaactgaaaataggacaaccgaatcaggaagcgaagcccccaggagctgcagncccatcccgtgatctgcgccactgcactccagcctgggcgacaaagccagactctctccaaaaacaaaccagaaacagaaaagaaatgacgacccaagacccccctacaagcatacttcttttgcgtattatgttttactcacaaaacaaagctcatcatgcgtttg

SEQ ID NO: 156282 - DNA, 534 bp, Homo sapiens
gggcctatggtgattccatgtgtgcttaaatgtgttagtgacaggatcaagcatgctttctttatcaaggagcagaaaatcattgtgaaagtgttgaaagcacaagcagggagtcagaaagctaaataaaagatgaagcttttttgagtaataaaaattaaaagactttttaaaaaaattagaaggcaggaacccagatgggaagtgtcttcctaatgctcttggccttggagggtcctttctgtgtgttcaattgacaaaatctaaaaatgcgctagcttggcaaagagaaatgtttatagggtctagctctagtatcagaaaggaaagcagaggaagggtggatttggaactgatagacaataaattgataattggcacttaaagagtagtgtaggccaggcgcagtggctcacgcctgtcatccccgcttcccaagctcctactcgccaaattatctttaagaactctgatcctcaaatgctcagggagactaatttgtgtaataataaaactctggtctcccccaaaaaa

SEQ ID NO: 156283 - DNA, 490 bp, Homo sapiens
tttttttttttttttgtgggagaccagagttttattattacacaaattagtctccctgagcatttgaggatcagagttcttaaagataatttggcgagtaggagcttgggaagcggggagtgctgattggtcaggttgaagacggaatcacagggagtcaaagtgaggttttcttgctgttttctgttcctgggtggaatggcagaactgattgagccaggttactggtctaggtagtcagctgatccaatgagtgcagggtctgcaaaacatctcaagcactaatcttaggttttacaatagttatgttattcctaaaagcaatttggggaggttcagactcttggagccgagaggctgcatgtcccctaaactgtaatttgtaatcttgtagctaatttgttagtcctgtaaagacagactgggtccccaggcaagaagggggtcttttcgggaaggggctattatcaattttgtttcaaaccataaa

SEQ ID NO: 156284 - DNA, 1434 bp, Homo sapiens
  misc_feature (1)...(1434): n = a,t,c or g
gacaccagcctttgcagagtcctcaacagccaatttatgctccaacaagcatcactaatgctatcactaacaggaggcatcaggcttctgccctgggaccagacaacgaaaatggaaggaataagaaacgtgttacaaatgagcagaccatcaacaaatatactcaggtgataggaattagcattgtgaatgttgtagcttttttctcttcttatccaacgttttcactacaatttttgtttgctttaattacggcttctgaggcgacaggacagtgtcagtcttcagccactaagccaagaaggagtcagagagccttgggccagagttccaggggctctgggagtggctgccagcgatttccaatagatttctgcgtggccttgacacagacagctagtgtgaatccccgcccacagaggggcggcacgttggttgccgtacaacgtggtggttccctgcatctctgcccacgtcggagaggtgcgtcggcttccgtacaacacggatactctctctctgacgcaacttcctgtcctgcgcaattctatttgacctttgaactggcaaaggcttttttcttcctcttccggggacgttgtctgcaggtatggatgttgttctcttttccctgtctttatttccttaccaatcggctgccatccgaggagctgaggaagcctagagctctcagaagcagtcctttgagctggtgtaggggtaaggggcacaacagggaggttggtggtgaggaagttccttactttgatctttggaaatcccttgttcctggtggcacctccaaagccgcactcagaatggtcccagcgtttgacatacccgacgtaggccttccccctacaatacagccctctaacaaaaactaggcatcggtcccacaaccaaatacctcctagaattgtttaccttttatacccaagaaggttgggaaagcaccccaatntctgcatgtggtgtgtgccccaggcaagaattcgagggggttcgtgctgtaagaccttaaagtttcttatgagattgtccaaaacaaagaaacatgtcagcagggcctatggtggttccaatgtgtgcttaaatgtgttccgtgacaggatcaagcgtgctttccttatccgaggagcagaaaatccgttgtgaaagtgttgaaggcacaagcacagagtcagaaagctaaataaaaaaaatgaaactttttttgagtaattaaaaatgaaaagacgctgtcccaataggaaaaagttgggtgtgctgggagctacctcacctcagcttgagagagccagttgtgtgcatctctttccagttttgcatccagtgacgtctgcttggcatcttgagattgttatggtgagagtatttacacctcagcaaatgctgcaaaatcctgttttcccccagagagctggagggtag

SEQ ID NO: 156285 - DNA, 369 bp, Homo sapiens
caccggggctatttattgtttaatttatttgttgaggttatttcctctgagcagtctgtcctggccccgcctgtcagaagatgaacatgtatagtggctaacttaaggggagtgggtgaccctgacacttccaggcactgtgcccagggtttgggttttaaattattgactttgtacagtctgcttgtgggctctgaaagctggggtggggccagagcctgagcgtttaatttattcagtacctgtgtttgtgtgaatgcggtgtgtgcaggcatcgcagatgggggttctttcagttcaaaagtgagatgtctggagatcatatttttttatacaggtatttcaattaaaatgtttttgtacatagtg

SEQ ID NO: 156286 - DNA, 312 bp, Homo sapiens
tatttattgtttaatttatttgttgaggttatttcctctgagcagtctgcctctcccaagcccctgacacttccaggcactgtgcccagggtttgggttttaaattattgactttgtacagtctgcttgtgggctctgaaagctggggtggggccagagcctgagcgtttaatttattcagtacctgtgtttgtgtgaatgcggtgtgtgcaggcatcgcagatgggggttctttcagttcaaaagtgagatgtctggagatcatatttttttatacaggtatttcaattaaaatgtttttgtacataaaaa

SEQ ID NO: 156287 - DNA, 435 bp, Homo sapiens; identical to SEQ ID NO: 155227
  misc_feature (1)...(435): n = a,t,c or g

SEQ ID NO: 156288 - DNA, 422 bp, Homo sapiens; identical to SEQ ID NO: 133176
  misc_feature (1)...(422): n = a,t,c or g

SEQ ID NO: 156289 - DNA, 418 bp, Homo sapiens
  misc_feature (1)...(418): n = a,t,c or g
cccagccgccagcctatgccggtagttttaccccttataccccttaaaattttattttttccctaaagcctttaatttctgtagggaggttgtcccaatatgtccccccccaaaagtaagggtcctttcccaagattcccaggtaggttttaaatcggccccctataaggaaaaaacttttacgttgccagcccgggtaaagtttggcccccccagggatcctttaaaacggcccccccnnnnnnnnnnnnnnnnnnnnnnnnnnnnnnnnnnnnnnnnnnnnnnnnnnnnnnnnnnnnnnnnnnnnnnnnnnnnnnnnnnnnnnnnnnnnnnnnnnnnnnnnnnnnnnnnnnnnnnnnnnnnnnnnnnnnnnnnnnnnngacttcaaatcctgtgttgaatagaagtagtgagatcg

SEQ ID NO: 156290 - DNA, 412 bp, Homo sapiens
  misc_feature (1)...(412): n = a,t,c or g
ccccgggnnnnnnnnnnntgtgtggnngnnngnnccaacttttcaaacagcgagcgtatggaggttgttttaccccttatacccttaaaaannnnnnnnnnnccctagagccttaaatttctggagggaggttggcccaatatgtcccccccccaaagtaagggtcctttcccaaaattcccaggtaggttttaattcggccccctataaggaaaaaactattcncttgcaagcccgggtaaacttgggcccccccaggggttctttaaaacggccgccccnnnnnnnnnnnnnnnnngnnnnnnnnnnnnnnnnnnnnnnnnnnnnnnnnnnnnnnnnnnnnnnnnnnnnnnnnnnnnnnnnnnnnnnnnnnnnnnnnnnnnnnnnnnnnnnnnnnnnnccctcgcgtccg

SEQ ID NO: 156291 - DNA, 398 bp, Homo sapiens
  misc_feature (1)...(398): n = a,t,c or g
cccacgcgtncgcccacgcgtccgggctctgaaagctggggtggggccagagcctgagcgtttaatttattcagtacctgtgtttgtgtgaatgcggtgtgtgcaggcatcgcagatgggggttctttcagttcaaaagtgagatgtctggagatcatatttttttatacaggtatttcaattaaaatgtttttgtccctnnnnnnnnnnnnnnnnnnnnnnnnnnnnnnnnnnnnnnnnnnnngggggggggcccttttaaaagatccctgggggggcccaaattttccnnnnnnnnnnaaaaannnnnnnnnnnnnnnnggggggggctataaaaacccccctggggatttttgggaaaacccccttttttgggggggggaaaaaaagggacaaac

SEQ ID NO: 156292 - DNA, 1981 bp, Homo sapiens
  misc_feature (1)...(1981): n = a,t,c or g
cgaccgtgcccctggaggtggtgctgctgcgcaaggtgggcgcggcgggcggcgcgcgcggcgtcatccgcctgctggactggttcgagcggcccgacggcttcctgctggtgctggagcggcccgagccggcgcaggacctcttcgactttatcacggagcgcggcgccctggacgagccgctggcgcgccgcttcttcgcgcaggtgctggccgccgtgcgccactgccacagctgcggtgtcgtgcaccgcgacattaaggacgaaaatctgcttgcggtcctgcgctccggagagctcaagctcatcgacttcggctcgggtgcgctgctcatggacacggtctacaccgacttcgacggcacccgagtgtacagccccccggagtggatccgctaccaccgctaccacgggcgctcggacaccgtgtggtcgctgggcgtgcttctctacgatatggtgtgtggggacatccccttcgagcaggacgaggagatcctccgaggccgcctgctcttccgggagaggggtctctccagagtgccagcagctgatccggtggtgcctgtccctgcggccctcagagcggccgtcgctggatcagattgcggcccatccctggatgctgggggctgacgggggcgccccggaanaagctgtgacctgcggctgtgcaccctcgaccctgatgacgtggccagcaccacgtccagcagcgagactttgttgaggagcttgcacctgactgggagctaggggaccacctgccttggccagacctgggacgcccccagaccctgactttctcctgcgtgggccgtctcctcctgcggaagattggacctcttgacccctgggtgaccttcgctttgagtgcctttttgaaacgttggttcccgcgggaatttggttttgttcaagctctgtctgttccaaagacgtttcggttcgaggtcccgcctgccctggggtggatacttgaaccccagacgcccctctgtgctgctgtgtccggaggcggccttcccatcttgccttgcccacccggagctcttttccgccggcgcagggtcccaagcccacctcccgccctcagtcctgcggtgtgcgtctgggcacgtcctgcacacacaatgcaagtcctggcctccgcgcccgcccgcccacgcgagccgtacccgccgccaactctgttatttatggtgtgaccccctggaggtgccctcggcccaccggggcctatttattgtttaaatttatttggttgagggttaattcccctctgagccagtctgccttctccccaagcccccaggggacaagtggggagggcaggggagggggtgggctgtggtcccagggaccccccaggccctgatttcctgtcccctggcgtctgtccctggccccgcctgtcagaagatgaacatgtatagtggctaacttaaggggagtgggtgacccctgaaacttcccaggcactgtgccccagggtttgggttttaaaatattgactttgtacagtctgccttgtgggctctgaaagctggggtggggccagagcctgagcgtttaatttattcagtacctgtgtttgtgtgaatgcggtgtgtgcaggcatcgcagatcgggggttctttcagttcaaaagtgagatgtctggagatcatatttttttatacaggtatttcaactaaaatgtttttgtacatagtgnnnnnnnnnnnnnnnggggcggccgttttaaagaacccctcgggggccccaactttacccgggcatgcaacgtaatagttttttccttatagggggcccaataaaaacctacctggggatctttgggaaggaacccttacttttggggggggaccatattgggccaacctccctacagaaatttaaggctctagggaaaaaataaaattttaaagggtataaggggtaaaacaacctgcatatccttgctgtttgaaaaattg

SEQ ID NO: 156293 - DNA, 422 bp, Homo sapiens
atcgcccttggcgccgaggatgccaaggaagaaaagagggcccactaccgagagctcgcagcccagatcaccaagacgtgtcacgagtcatacgcccgctcagacaccaaacttgggcctgaggccttctggtttaactccggcagagaggccgtggccacccagctgagcgagagctactacatcctccggccagaggtggtggagagctacatgtacctgtggcgacagacccacaaccccatctacagggagtggggctgggaggtggtgctggccttggagaaatactgtcggacagaagccggtttctctgggatccaagacgtgtacagtagcacccccaaccacgacaacaagcagcagagcttttttctagcggagacactaaaggatgccttgccttttcaggatttgagact

SEQ ID NO: 156294 - DNA, 435 bp, Homo sapiens; identical to SEQ ID NO: 124380

SEQ ID NO: 156295 - DNA, 840 bp, Homo sapiens
atgcccctggtgatgaaggctggggaaaaccagagaagacaaggagacagaggcctcagcggggcaacagtcattgactccctcgataccctctacctcatggagctgaaggaggagttccaggaggccaaggcctgggtgggagagagcttccacctgaacgtgagcggagaagcatccttgtttgaggtgaacatccgctacatcgggggactcctctcagccttctacctgacaggagaagagaacaggaaaatgacagaaggagcagaaaaagcatctgtgttcttcagggcatatgcccagccttcctacttggccgtggtcagtggagatggcctgcaggaaggaagaggggaggacacagctcagggctctcggggcggtttggggatgaagcttcagagggagaccccctgctgggtaggccagtcctaccgagagccagtgcccatgggagtaactcgtataaccacagctgcacacgtgttccgaataaaggccatcaggctgggagagaagctcctgccggcgttcaacacccccacgggaatcccaaagggcgtggtgagcttcaaaagtgggaactggggctgggccacagccggcagcagcagcatcttggcggagtttggatccctgcacttggaattcttacacctcactgaactctctggcaaccaggtcttcgctgaaaaggcaagtctcctccccacccttcttcctgcggagcagagggatgagcgtgcggctgccacagggttttcagaggcgagtgggtcctccctcatggatcagcaggagggcagtggggagcccgggagcccaagctaccactaa

SEQ ID NO: 156296 - DNA, 665 bp, Homo sapiens
accaaacttgggcctgaggccttctggtttaactccggcagagaggccgtggccacccagctgagcgagagctactacatcctccggccagaggtggtggagagctacatgtacctgtggcgacagacccacaaccccatctacaggggagtggggctgggaggtggtgctggccttggagaaatactgtcggacagaagccggtttctctgggatccaagacgtgtacagtagcacccccaaccacgacaacaagcagcagagcttctttctagcggagacactaaagtatctctatcttctgttctctggaagatgacttgctctccctggaagactgggtgttcaacaccgaggcccacccactcccggtgaaccactcagacagctccggcagagctgggggaagacactgaccccatctcctgccgccgccctggggccgccgcagggatgccttgccttttcaggatttgagacttgttctcaaagggattgggaacgaaggccccatcttcgggcagacccccagcaagattttgtcggacaaagcaacttttttttcccctgtgaggaggacaagactttgaggactcagcgatgttcaggccagggccatggccacactggcccacacatttcctttctacagaggatttctatgg

SEQ ID NO: 156297 - DNA, 1187 bp, Homo sapiens
gagagcttccacctgaacgtgagcggagaagcatccttgtttgaggtgaacatccgctacatcgggggactcctctcagccttctacctgacaggagaagaggtgttccgaataaaggccatcaggctgggagagaagctcctgccggcgttcaacacccccacgggaatcccaaagggcgtggtgagcttcaaaagtgggaactggggctgggccacagccggcagcagcagcatcttggcggagtttggatccctgcacttgggaattcttacacctcactgaactctctggcaaccaggtcttcgctgaaaaggtcaggaacatccgcaaggttcctcaggtaagtttcgaaaagccctttggcctctaccccaacttcctcagcccagtgagtgggaactgggtgcaacaccatgtctcatttggaggactcggggacagtttttatgaatatttgatcaaatcctggttgatgtcggccaagacagatattggaggctaaaaatatgtactacggaggcctttggaggcgatagagacctacttgctgaatgtctctcccggggggctgacctacattgccgagtggcgaggggggattctggaccacaagatggggcacctggcctgtttctccgggggcatgatcgcccttggcgccgaggatgccaaggaagaaaagagggcccactaccgagagctcgcagtccagatcaccaagacgtgttacgagtcatacgcccgcttcagacaccaaacttgggcctgaggccttctggtttaactccggcagagaggccgtggccacccagctgagcgaagagttacttacatcctccggccagaggtggtggagagctacatgtacctgtgggcgacagacccacaaccccatcttacagggagtggggctgggaggtggtgctggccttggagaaatactgtcggacagaagccggtttttctggggattccaagacgtgttacagtaggcacccccaaccacggacaacaagcaggcagagcttctttctagcggagacactaaacagatgcttggtgagtgcctgcaacggaccagacactgggctagaggccagggacaccgctgagagtgagacagtcataagccctgcagtcaaggggtcaagaggggagaaagcgatggtaagggaaactgacaa

SEQ ID NO: 156298 - DNA, 1918 bp, Homo sapiens
  misc_feature (1)...(1918): n = a,t,c or g
atgatatttgtggttataattctaatggttgttctctccccagagggtggttctgggctggactccagccccttcctgtcggaggccaatgccgagcggattgtgcagaccttatgtacagttcgaggggccgccctcaagccctacccaccaacaggccccaacttcagatactcacacggggtccctcctcacctcttcgcttacttcccccctggttccactgtctcccaagacaacagcttcatcagccctcagctgcagcacatctttgagcgggtccgccagagcgccgacttcatgccccgctggcagatgctgagagttcttgaagaggagctcggcagggactggcaggccaaggtggcctccttggaggaggtgccctttgccgctgcctcaattgggcaggtgcaccagggcctgctgagggacgggacggaggtggccgtgaagatccagtaccccggcatagcccagagcattcagagcgatgtccagaacctgctggcggtactcaagatgagcgcggccctgcccgcgggcctgtttgccgagcagagcctgcaggccttgcagcaggagctggcttgggagtgtgactaccgtcgtgaggcggcttgtgcccagaatttcaggcagctgctggcaaatgaccccttcttccgggtcccagccgtggttaaggagctgtgcacgacacgggtgctgggcatggagctggctggaggggtccccctggaccagtgccagggcctaagccaggacctgcggaaccagatttgcttccagctcctgacgctgtgtctgcgggagctgtttgagttccgattcatgcagactgaccccaactgggccaacttcctgtatgatgcctccagccaccaggtgaccctgctggactttggtgcaagccgggagtttgggacagagttcacagaccattacatcgaggtggtgaaggctgcagctgatggagacagagactgtgtcctgcagaagtccagggacctcaaattcctcacaggctttgaaaccaaggcattctccgacgcccacgtggaggcagtgatgatcctgggggagcctttcgccacccagggcccttatgactttgggtcgggggaaacggcccgccgcattacaggacctcatcccggtgctgctgcggcaccggcttgtgtcccccacccgagggagacctatggccctggcaccgcaagctgggcaggggctttcctggcctgtgcccacctccgagaccacatcgcctgcagggaccataaaccaggacacctaccaccgctactgggccagtcgccagccagacgcagccactgccggcagcctccccaccaaagggggactcctgggtggatccctcatgacagcctccatgggggattcagtccccagagcaggccgtaccctgctgtagtgcctcttatcccttccccgtctgccctgggtcagaggagcccccttgggcttcccagtcttgcctggctctcctccttggccccaaaaactcaggaatccctggggctggggaactccccaanttcgtgccctagatcctgcacctcccccactcgaaagtgaggtatccgaaaactaagccaggggaagcggttaacttatctttgccaaaattttgagggagccttgggccgctgcatgtcgttatgcagatcagactcatcagggggaagccctcacctctgcctcaagcctcccgtggaaggcgaagatggtcctggaggcagtcctcacctcttgcctccctcgctcctccaacaagctggcttctcccgggttccagcctctcagtgtgttggaaaggtatgggtgcggggtgggggggagctgaatcttcaatcgggaataaaagcagccctccccttcaaaaaaaaaaaaa

SEQ ID NO: 156299 - DNA, 1674 bp, Homo sapiens
atgccccaggccctggagcgtgcagatggcagctgggcctgggtggtgctgctggccaccatggtgacccagggcctcaccctgggcttccccacgtgtatcggcatcttcttcactgaactgcaatgggagttccaggccagcaacagcgagacctcttggttcccctccatcctcacggctgtgctccacatggcagggcccctgtgcagcatcctggtgggacgcttcggctgccgagtgaccgtgatgctggggggcgtgctggccagcctgggcatggtggccagctccttctctcacaacctcagccagctctacttcacagcaggattcatcacaggcctgggcatgtgcttcagcttccagtcaagcatcacggtgctgggcttctactttgtccgccggcgggtgctggccaacgcgctggcctcgatgggcgtctccctgggcatcaccctctggccgctgctctcccgttaccttctggagaacctgggctggaggggtaccttccttgtcttcggcgggatctttctccactgctgcatctgcggggccatcataaggcctgtggccaccagtgtggcccctgagaccaaagaatgtcccccgccacctcccgagacacctgcacttggctgcctggctgcatgcggccggaccatccagcgccacctggccttcgacatcctgcggcacaacacaggctactgcgtgtacatactgggtgtgatgtggtccgtcctgggcttcccactgccacaagtcttcctggtgccatatgccatgtggcacagcgtggacgagcagcaggcagccctcctcatctccatcatcggcttcagcaacatcttcctgaggcccctagccgggctgatggcaggacggccggcctttgctagccaccgcaagtacctgttcagcctggcactcctgctcaatgggctcactaacctggtgtgtgcggcatcaggtgacttctgggtgctcgtgggctactgcctggcgtacagcgtgtccatgagtggcatcggcgccctcatcttccaggttctcatggacatcgtccccatggatcagttccccagagccctgggactcttcactgtcctggacggccttgctttcctcatctccccaccactggccgggttgctcctggacgccaccaacaacttttaggatgtttttcaacaatgtcccagtttctttccctaatctaaagctcccctcttaaagggtggcagctttcctccgcccccgcagaagaaggagcaaggcaagcaggctgtcgcggcggatgcccctggagcgggatctttttcttgaaagccaaagacggtcctgggaagcaacggtccccctgagatcatgtgccagtctttcccgccagccacgtccatgctggcgtcaataagcatctttggggatgtcctgcctcctccaggaccagccatgagtggctcttctggccaaaggcggtactgcaggccaagcaaacggctctgggctggaatagccctacctgagtgccctgtttgactccgccactatctgccatgtgagttgggcaaattgttgaccacctctgagccttgaaaaagtaggaggttactttgttagagcaaaataataaaatttaattttaaaaaggaaaaaaaaaaaaaaaaa

SEQ ID NO: 156300 - DNA, 1392 bp, Homo sapiens
aggccctccggacttttttccttgggttccagtttactcggggcccaggaacctgggtctgagccctgctcaagtttgtcccagccggctcagcgcagctggctgtgtgttgctgctcctacagctcaatgcactggaccttctcgtccagcctggatgcctctatcatttctctttgtctttctctggcctccataccgttctgaagagctcaccttcctctaggttcctcctgccctgctcttcccaagagacccagccctcacctgtagggcagccaaggctggtggtgcagctgcccccagtgaaagtcattgagcctcgcactgggcaatgcagaggtccaggctgaagagttgagtggcgcgcccatcctggcgcctgtgcaaagaacgggaggggggcccctggcttggatcctagaatcggtgaagtctgagggcccccctgcagtctcagcaggacctgctctatcaaggggcttcctccttcctttccccaccctgtctccttggcggggaggattagtgccaggtgggggaagccagacatttgactgacgggagaggaaggcttgccaggcagcccgaagactgttgtgaaaatggggctgcttttgcaagggaagctcttttactccccattcctgtcctccagaggccccccttttccctgccgtgttattggtgtcaaccctggggtaagtggctggctggactcacccctgctccccgtacacctgtgcctgtgactggcggtccaagctccccacacacacatcttgctggtgcctttccctgaagtcaccacccaggggctggctgtcatcagcccattcttgtcccagcagggtaccgagggaatgataaaacagaatgtgtttgaattacacacaaaaatcgttccctgcagcaggtcataaactctgtgaactaatgaagctgacaaacagagctgggagtacgtttccccttcacccttcctttcctcctaggttcagcaagggggtgctcaggtttcagggtgttgtttgttgatttcagggttcaaccagggttccgcaaggaaaaccttattcagggagatttatttttcatgaacaggtgccagtcttcccgccagccacgtcccagctggcgtcaataagcatctttggggaatgtcctgccctcctccagggacccagccatgaagtggctcttatggccaaaggcggtactgcaggccaaagcaaacggctctgggctggaatagcccctacctggagtgccctgtttgactccgccactatctgccatgtgagttggggcaaattgttgaccacctctgaagccttgaaaaagtaggaggttactttgttagagcaaaataataaaatttaattttaaaaag

SEQ ID NO: 156301 - DNA, 919 bp, Homo sapiens
cagagtcttgctctgtcactcaggctggagtgcactggtgaatcttggctcactgcaaccttcgccttccggattcaagcgattctccttcctcagtctcccgagtagctgggatcacaggcatgtgccaccacgcccagctaatttttgtatttgtagtagagacagggtttcaccatggtgaggctggtctctgccttcgcctcccaaagtgctgggattataggtgtgagccaccgcgcctgcacttgggcctccaattaaactttacttacaaggacaggtgcttggcctgatttgggtccatgggcatagtttgacaaacagtggtttgaacaaatgggacctaggggacttcagcagtaatccagtcctgaactaaggcaatactataccatttttttgtatagcttttatatttatacatgaagtgtaatatcacataacgttagctctgatctagtctgcctggctgtaagtcctggcatctcctggttattgacagtgtgacattgggcaaattaacttctctttgcgtcagttttttaattttaatctttaaaatggggataatagtacttcttacaaagggttgtaaggagtaaatgagttaaagcacataagtgtagtgcttgtacatataataaaagctcaatatgtgttaacttaatattttaaaaattattcctcatatacattattaaaggcagatctgagagatgttttaaggtagaatttactggcttaatgcatctctagctacggaggaaagacagtatccaacacttcaaggcaagggccgttcacatagaggtaatatggaagtcataaaagtaaattaagggagagagggagggtaggaaatggaggattaaggactgattttgatgggatgcacaggagagaaagtggggagagt

SEQ ID NO: 156302 - DNA, 880 bp, Homo sapiens
atggcacttcatatgagccctttcccccggacccgccaccccagagtcaagctgagggcatcggcatgccccagggaagacgatcaggactgtttttaatcgggcagtcgcgcggatggccttttccctctcgcctccttccgccccgcccccactctcagcccggccgcgctgattgtcctgggtcacataatgccaagctgagcgtaaaaaagccaagcaagtatggaagaaaaagactctttaccaaacaacaaggaaaaagactgcagtgaaaggcggacagcgagcagcatggagaggccaaaagacgatattcaagctcacttgccaagaaggaggtcagcaaggcccctgaagacaagaagaagagactggaagatgataagagaaaaaaggaagacaaggaacgcaagaaaaaagacgaagaaaaggtgaaggcagaggaagaatcaaagaaaaaagaagaggaagaaaaaaagaaacatcaagaggaagagagaaagaagcaagaagagcaggccaaacgtcagcaagaaaaaagaagcagctgctcacatgaaagaaaaagaagaatccattcagcttcatcaggaagcttgggaacgccatcatttaaaaaaggaactttgtagcaaaaaccaaaatgctccgggcagccgaccaaaggaaaactttttcagccgccttgactcaagtttgaaaaaaaatactgcttttgtcaagaaactaaaaactattccagaacaacaaagagactccttgtcccatgattttaatggcctaaatttaagcaaatacattgcagaagctgtagcttccatcgtggaagcaaaactaaaaatctctgatgtgaactgtgctgtgcacctctgctctc

SEQ ID NO: 156303 - DNA, 994 bp, Homo sapiens
actagatctagatctctttaatgccattctgatcgtaacgtctttagctccattcttccaagactgcatgtctgaaaatgctctacatgaactgaatattgaattgctacgcaataaactatacaagtcttaccttgaggcattctataaattctgtaagaatcatggtgatgtcacagcagaagttatgtgtcccattcttgagtttgaggccgacagacgtgcttttatcatcactcttaactcctttggcacggaattgggccaagaaggaccgggagaccctttatcccaacctcgggcaactcttatctgaggggtttgcgctttgtggctcaggcagaagactttgaccagatgaagaacgtagcggatcattacggagtatacaaacctttatttgaagctgtaggtggcattgggggaaagacattggaggacgtgttttacgagcgtgaggtacaaatgaatgtgctggcattcaacagacagttccactacggtgtgttttatgcatatgtaaagctgaaggaacaggaaattagaaatattgtgtggatagcagaatgtatttcacagaggcatcgaactaaaatcaacagttacattccaattttataacccaagtaaggttctcaaatgtagaaaattataaatgttaaaaggaagttatttgagagaaaataaaagaaattatgttatattatctagactacacaaaagtaagccacactatatcttcatgagttgcaaatccatggaaacacagtaaaccagccctgaaacaaagcatttccttgttttcagtggtattagatcttgtttccacatgtctgtctcattcttcactgggccttacaggttagttttaattaactctatggtatttttcttattcttgtttgatcatgttaaaaattggacctaataaaagtattttattcttgcttttccatgcttctctacaggtccaaatactgaatgtctcctttac

SEQ ID NO: 156304 - DNA, 2736 bp, Homo sapiens
cggatcggatccactgatggcacacgtggagctgaacttgacgccagcggcggggcggggaggcactgccctcactgttgcagttccttcattctgttgagggcactgccagcgcggaaccactcaatctgcgtcggccagtgcaggaggggaaacaaggtggctgcccctcaccccaccacctcagggggacccgggcccctaaccttgccaggggtgaagtccttcaggccctgaatggtcagcttgtccacaggcacgggcagggagagtgaccttgatcactagggatgggatgaggatggcctgggtacagactccagctcaccgtggatcctggcaaagctcttggtgatgatggcccggcccccaaggtggcgaggctccagacctccctgcacctgccttgcaggccccttcaggagtgaccactggcattgcccctatcaactctgacccaccttgtagtagcgggcagtgtcagggacggggccaaactcctgagtgacggcattgcgcacggagttggccttgccgttttcaatgttgatggcaccaatgagcaggttgttggagatgttatggacgtgccaggtgtggagcctgctgtgcaatcacacacactgtcccagcccagcctgagctgtactcacctgcccacacccagaagggggacgctggactgcgttgcgataccctctctgctctgcagccaaacctcccttccatctcccacctgcgtcttgactgtgctcacttcctccaggttcatggcccttcccgatgctcaggggacggggggccctggcagggtggggctgtcctgccgtccccatgctgctgaccttgatgaggatctgcaggtcctccaggtccttgccatcccacttgtcaaaaggctccaggagctgcaggcgctggctggtggggggtgctgtgaggttgagaaggaagtgacgtggccacacagcaaccagcaagcagggggcgtgggcgctcacccctttgggaagctcatctgcatccggagcctccagcctgaacttcttgccatgcctcctcctctgacccgccagggacccccagaggccatcccaggcttgtgcgcagctgggcagtctcacctctggggacgtgacaaaggcatgggtctcggggtttgcgttccccctccaacttctggggctctgtaccctgtgcacaaggggctgtcttgtcaaaagatacgcctcttacctggggcttgtgccgcctggaggcattactcagcatggggtgggggagatgggcagggggatatgggcactcacatagccgtcccgctcaatggtggcgcggatctgctcggaacctggagtgatggtgaactgggacttgcacttgaggccatgggccaggattgtctacagccctgggcagagccactggccctgagacctgctaaacagatggggtggaaggtgctcacccactcggatgtccagaggccatccttccttctctagaggccaacgactttctcttgactgaaacctcatcacagggaagaactgagcagttggctctgcacacacccgctcccgggctccctccagccctgcaatttaggcaggacccgccctgctccccactactctcagaaacttcttgaacccagttaattgtctcctcacctcactgaggttaatttcaatcatagctctgtcttggggaggagcgggcatgtgactgttccacccacacgggcctgcccctgccagctcaccttcccggccggtcttgctcaggtacttcttcattctactcccaactggagacccatcaggcccagcacagggtaggggccacgtcgcctggccgccttcctcaccagtgcaggagatggagtctacaccaggcccgtggtattccacgattgcacctgtgccacctttcaccgtgaggatgcctaccgtctcccgttcatccccaccaaccaccaccccacagccagcccagaatgagtccctccccaccctcaccttggggcacttcagctcccaggggatcccagccatgacatccacagcatcggcacccccaactccaatgcagatgcccccaaggccggtggatgtaaatggacacaaactaggtcagtggtccctaacagtgcccttggaagaaagggaagcacccacctccccaggatatacacgttcacacttgcacttccagagacaaaactgtccaactgtccaccaaaagctccccccataggcctggaacatacttctctggcttgggcccttgggacggcagactgagcccagctttacctggtgaatgattccagatccatccagtgtgagggtgaggcctctcgcccagtcttgcccacttgcccacccccaaagccaccttctgctcaccttggcccggcgcaggtctttctcgcccccaacctgggcttcaatcagatggtcacagtggatggtggatggcacagccaccttggacagcccgctgctgatgaactggagcatggccatctgggccgtcgcatcctgcatggccacacggtccggccgcagccgcaggtacgacttgcctcgctcaacttctctgcctgacgggcaggcagcagacgcaatgcccttgacagtcacagcctcccatctgcagccttaccgtttgcgaacaatgttaatgttcttctctagcaggtcataatggatgtactcgttgggctcaaag

SEQ ID NO: 156305 - DNA, 471 bp, Homo sapiens
tggcaagaagttcaggctggaggctccggatgcagatgagcttcccaaaggggtgagcgcccacgccccctgcttgctggttgctgtgtggccacgtcacttccttctcaacctcacagcaccccccaccagccagcgcctgcagctcctggagccttttgacaagtgggatggcaaggacctggaggacctgcagatcctcatcaaggtcagcagcatggggacggcaggacagccccaccctgccagggccccccgtcccctgagcatcgggaagggccatgaacctggaggaagtgagcacagtcaagacgcaggtgggagatggaagggaggtttggctgcagagcagagagggtatcgcaacgcagtccagcgtcccccttctgggtgtgggcaggtgagtacagctcaggctgggctgggacagtgtgtgtgattgcacagcaggctccacacctggcacgtcca

SEQ ID NO: 156306 - DNA, 489 bp, Homo sapiens
ctccccccataggcctggaacatacttctctggcttgggcccttgggacggcagactgagcccagctttacctggtgaatgattccagatccatccagtgtgagggtgaggcctctcgcccagtcttgcccacttgcccacccccaaagccaccttctgctcaccttggcccggcgcaggtctttctcgcccccaacctgggcttcaatcagatggtcacagtggatggtggatggcacagccaccttggacagcccgctgctgatgaactggagcatggccatctgggccgtcgcatcctgcatggccacacggtccggccgcagccgcaggtacgacttgcctcgctcaacttctctgcctgacgggcaggcagcagacgcaatgcccttgacagtcacagcctcccatctgcagccttaccgtttgcgaacaatgttaatgttcttctctagcaggtcataatggatgtactcgttgggctcaaag

SEQ ID NO: 156307 - DNA, 604 bp, Homo sapiens
ttagatgggagtcttgtcatcaaaaataaatacagttgcatggagctgcttaagatctgaaccaaactcaaaataggaagacgggggctaaaaagttattttaagaacccccccaccacaaccacagtcactccgtgggctaagcggggagcaggaagcatgtctggtcacaccatcttggaataggaagccatgtttcttgtagtagcgggcagtgtcagggacggggccaaactcctgagtgacggcattgcgcacggagttggccttgccgttttcaatgttgatggcaccaatgagcaggttgttggagatgttatccaagtgcccacggaacttgagccaggggccagcagctgagatgtggtcagtggtacacttccctttgaccttgatgaggatctgcaggtcctccaggtccttgccatcccacttgtcaaaaggctccaggagctgcaggcgctggctggtggggctcacgtccacatgctgcccgctgctgtccttgggtgggtgctggtaggtgtcatgccctgggtcaaactcccctttgggaagctcatctgcatccggagcctccagcctggaattccaccacactgcc

SEQ ID NO: 156308 - DNA, 920 bp, Homo sapiens
agatgggagtcttgtcatcaaaaataaatacagttgcatggagctgcttaagatctgaaccaaactcaaaataggaagacgggggctaaaaagttattttaagaacccccccaccacaaccacagtcactccgtggggctcacgtccacatgctgcccgctgctgtccttgggtgggtgctggtaggtgtcctgccctgggtcaaactcccctttgggaagctcatctgcatccggagcctccagcctgaacttcttgccatccgtgcccgtcaggtagtcggtctctgggttgaacttgagggttcccgcaatggccagggctgtgacaatctctggggacgtgacaaaggcatgggtctcggggtttgcgtcgttgcggcccgtgaagttcctgttgtaggaggtgacgattgtgttcttctcccccttcttgatgtccttcctgttccactggccaatgcaggggccacaagcattggccaggacaatgccacccagatccctcaagatctgtgcctgccagggagagaggaagacagaatgtcaagggtgggtgagagtctgatgggaaggggtgatgtggtggctgcaggacgaagtgctgtactggaaccccagggcagccactgggacctgccccagccccggcccaacaggcctctgggcttgtgccgcctggaggcattactcagcatggggtgggggagatgggcagggggatatgggcactcacatagccgtcccgctcaatggtggcgcggatctgctcggaacctggagtgatggtgaactgggacttgcacttgaggccatgggccagtgcctgcttggccacagctgctgagcgccccatatcttcatagcttgaattggtgcagctaccaattagacctggtgcattgtgggtggtggggttaa

SEQ ID NO: 156309 - DNA, 888 bp, Homo sapiens
gcctggcctgaagcccatgtggccctttagggtggaaagcacccaggaccacagaacacgtgtctgaagacttgcctgcctctcacccctctgtcacccctcctgggccccggggcctgctgcctgcctctggagggcttgtcatccacccctccagggccatgccttgacctctgtcctctctacttaccacccaaggtcaaagggaagtgtaccactgaccacatctcagctgctggcccctggctcaagttccgtgggcacttggataacatctccaacaacctgctcattggtgccatcaacattgaaaacggcaaggccaactccgtgcgcaatgccgtcactcaggagtttggccccgtccctgacactgcccgctactacaaggtgggtcagagttgataggggcaatgccagtggtcactcctgaaggggcctgcaaggcaggtgcagggaggtctggagcctcgccaccttgggggccgggccatcatcaccaagagctttgccaggatccacggtgagctggagtctgtacccaggccatcctcatcccatccatagtgatcaaggtcactctccctgcccgtggctgagttgggcctggttctaggctgtgtccactgcagcccacaggcccgtcagcctcttgccccttcttaggctcacacagtgcacatccgacgctcagcttcccggcttcccgcaggccctgcttccaggcttgtagatctgagccactgagatctaggacatgtgccagggggttctttctgatcatgaatgtgcagcaggaaggcctcgcagacctcagcaccagcgcacacttgctaggggcacccctagtgaaagggagcagaccgcacgcgtgggcggacgcgtggg

SEQ ID NO: 156310 - DNA, 1164 bp, Homo sapiens
  misc_feature (1)...(1164): n = a,t,c or g
gggttggtggacgagagctttgttgacacgtcccccacagggcccagctcagcagatgccaccacttcagtgagagctgcaaagaagagggctccgtacacgcttgtgggatccatcagtgagccaggcctgggctctcatctcctggtggaccagcaactagccctggggctggacagtggaccctaaccagcctgcgggaaaggtggtaatggcccggctgtgaaagaacaaacagcaagctgaaggcccgaatgcctaaggaagaatagtgtcctcgaagctggaanaagtgaaggccaaaggccccaggaagtgccccacccagcttgcccccgctccctcccacccatctaggccctgctccctcccttcactgcagtgatggatcccatctgtggctgtggctgttgggcctcccactgacccttgactgaaaagacccttccctggaccctggacttgacaacaaacggcacagacaccaatcactcacagaacagtcactggttttggattcttgttttccttgcaagaacaaaaggttctctagaatccttcagccaccaatgaaatgatcatggcatggagaaaaactttagatgggagtcttgtccatccaaaaataaatacagttgcatggagctgcttaagaatctgaaccaaacttcaaaatagggaagacgggggctaaaaagttattttaaggaacccccccaccacaaccacagtcactccgtggggctaagcgggggagcagggaaggcatgtctgggtcacaccatcttgggaatagggaaggccattggctgggacggatcggatccactgatgggcacacgtgggagcttgaactttgacgccagcggggtgtcggggggagggcactgccctncacatgttgcagttccttcattctgttgagggcactgcctagcngcggaaaccactcaatctgcgtcttggtaaaggggggtggttcagggagggatggttctcctggggtcccctgtggggtggcttgatggatgcactttcaggggcttgccaggggtgaagtccttcaggcccctgaatggtcagcttgtgcacagggtgaatcttgttgtagtcaacccggtcagcgaaggtcagaggccacaagcccctgttcttcaggttggt

SEQ ID NO: 156311 - DNA, 426 bp, Homo sapiens
  misc_feature (1)...(426): n = a,t,c or g
naagggggtgtcgctgtggctggttctgcggtgtgcggccagccatggagcgctctgggcccagcgaagtgacaggctcagacgcatcgggaccggacccgcagcttgtggtcaccatgggcttcacggggttcggggttcggtaaaaaagctcacacatttgacttggaagcaatgtttgaacaaactcaaagaacagctgtggaaagaagtcacaaaacactgggatggtgattgctcacaccaaagccttggacccctcccagcctgtgacctttgtgaccaacgtcacctatgcagcagacaagggggctctgtatgtggatgtgatccgtgtgaacagctactactcttggtatcgcaactacgggcacctggagttgattcagctgcagctggccacccagtttgagaattggtgtaaga

SEQ ID NO: 156312 - DNA, 1152 bp, Homo sapiens; identical to SEQ ID NO: 118854

SEQ ID NO: 156313 - DNA, 1101 bp, Homo sapiens
agatccctgcggaaccgctccggaatttccgggtcgacgatctcgtctgcggtgtgcggccagccatggagcgctctgggcccagcgaagtgacaggctgggacgcatcgggaccggacccgcagcttgtggtcaccatgggcttcacggggttcgggggtcggtaaaaaagctcacacacttgacttggaagcaatgtttgaacaaactcaaagaacagctgtggaaagaagtcacaaaacactggggctggtgaattaccagatctccatcaagtgcagtaaccagttcaagttggaagtgtgtcttttgaatgcagaaaacaaagtcgtggacaaccaggctgggacccagggccagctgaaggtgctgggtgccaacctctggtggccgtacctgatgcacgaacaccccgcctacctggactcgtgggaggatggtgattgctcacaccaaagccttggacccctcccagcctgtgacctttgtgaccaacgtcacctatgcagcagacaagggggctctgtatgtggatgtgaccccgtgtgaacagctactactctgggtatcgcaactacgggcacctgggagttgattccagctgcagctggccgccccagtttgagaattggtgtaagacatcacaatcccattattcagagcgcgtatggagtggaaacgctttgtagggttttcaccaggatccacctctgatgttccagtgaagaggacccggaaaagtcctgctagagcagtaccatctgggtctggatcaaaaacgcagaaaatacggtggttggagagctcatctggaattttgccgatttcatgactaaccagtgtgtcagtttcttggtcgggaatgaaaatagtgccaacctgtgataccttcactctaattttactttctgaggaagttttctgtaatagttatttggtgataattattaatactggtgagaaaatcaatgtaaaagaggagaaataacccacacaaccacatacaactaggaaatgatagatggatctgaaaaaaaggatatgcactcttaacaagttcaacacccaagtactattgcaagtaccagctgtatttcatgg

SEQ ID NO: 156314 - DNA, 2341 bp, Homo sapiens
atgcacgaaaggtggccccgaaaagtggacattgctataaagaccccgaaaatgggaaacagctttggaactgaactcaagctccatgaggagatgtttcattgtcgagagcagtcatgatggcctgcactccacacaatgcaacagagtgaaagagcaggttctgcttctttggtgtagtcctgaagcttcctaagaaacttcacatcaggtgatggataggagcaaccctgtaaaaccagccttagactattttttaaacaggctggtgaattaccaaatctccgtcaagtgcagtaaccagttcaagttggaagtgtgtcttttgaatgcagaaaacaaagtcgtggacaaccaggctgggacccagggccagctgaaggtgctgggtgccaacctctggtggccgtacctgatgcacgaacaccccgcctccctgtactcgtgggagggcaggccagatggggctcaggctgtcggggcgctcacacctggcgctttggctgtcgtaggtgcggctgactgcacagaagtcactggggcctttgacttctacacactccctgtggggctccgcactgtgcccgtcaccgagagccagtgggctctgtatgtggatgtgatccgtgtgaacagctactactcttggtatcgcaactacgggcacctggagttgattcagctgcagctgcccgcccagtttgagaattggtgtaagacatcacaatcccattattcagagcgcgtatggagtggaaacgcttatagggtttcaccaggcggagggaaccttccccatgctctgccctgttgcagccagaacctggctctcccaacattctcgccaggcactgttgttatttctttggctctctctttgatcggactgtgggctcaggagacaggagtcctatttattgttgtttcccaggatccacctctgatgttcagtgaagagtaccagaaaagtctgctagagcagtaccatctgggtctggatcaaaaacgcagaaaatacgtggttggagagctcatctggaattttgccgatttcatgactaaccagtgtaagtggcagtttagcgcatgggataatgtacccgtcctcattttttcaggttgccttgcccattctggacattttggctgtaagaatattggaaacaaagggggaaagctggtttaatccatgtagattgtgttgagaatttcctaggaaaagtaacgttgtgcttaggaagtaggaaagcagacaggcccccgcttcccacatacgggcaaaaagcaaacatgatagtctgctatactgagatggaaatggctagcttgcctttttcttggctatttcatagccaaggatgaaggaaaaactggacctcattatggatttacttttgggatacactcattattccagaggagggtaaaaggctgagaagcttaaggtatttcaggctgttttatgctactcatttgcgaccaagcaggctcatcgaatacaggagagtgtgagagcgtgttgaatatggcagcatttaaaagtcttcagaccaggcatggtggctcatgccttgtcatcccaaaaactttgggaggccaaggggggaggattgcttgaggccaggagttcgagaccagcctgttcagcatggcaggacccccatctctacaaaaactaaacagattagctaggtgtggtggtgtgtgcctgtggtcctagctgcttgggaggctgaggcaggcggatagctcgagcacacggagttggaggctgcagtgagccatgattacaccactgcacttgagcctgggcagcagagtgagacctgtctttaaaaaaaaaaaggagctgggcacggtggctcatgcctgtaatccccagcactttgggaggccgaggtgggtggatcacgaggttaggagatggagaccatccctggctaacacggtgaaaccccgtcttctactaaaaataatacaaaaaaaatcagccgggcgtggtggcgggtgcctgtagtcccagctgctcgggaggctgaggcaggagaatggcatgaacccaggagttggagcttggcagtgagccgagattgtgccactgcactccagcctgggccacggccacagagcgagactccatcttaaaaaaaaaaaaaaaaaaaatttattaagggaaactatggcctggtttttaaacttcaattctgatttaagggcaaaattgtatcaatcccctaatgccaaaaattactacttggcactaacacatttttatttatttttccttcaacggggccaggggactctggttcaatttaattttttgaaatttaacgggctg

SEQ ID NO: 156315 - DNA, 660 bp, Homo sapiens
atggcagattttgggatctctgctggccagtttgtggcagtggtctgggataagtcatccccagtggaggctctgaaaggtctggtggatgagcttcaagtgaaagagctgcagcgggagcccctaacccctgaggaaatacagtctgttcgagaacaccttggtcatgaaagtgacagcctgctgtttgttcagatcacaggcaaaaaacaaaactttgaagtgggttcttctagtcagcttaagttttccatcaccaagaagtcttctccttcagtgaagcctgcagtggaccctgctgctgccaagctgtggaccctctcagccaacgatatggaggacgacagcatggatctcattgactcagatgagctgctggatccagaagatttgaagaagccagatccggcttccctgcaggctgcttcttgtggggaagggaaaaagaggaaggcctgtaagaactgcacctgtggccttgccaaagaactggaaaaagagaagtcaagggaacagatgagctcccagcccaagtcggcttgtggaaactgctacctgggtgatgccttccgctgtgccagctgcccctaccttgggatgccagccttcaaacctggggaaaaggcacttctgagcaatagcaatcttcacgatgcctag

SEQ ID NO: 156316 - DNA, 614 bp, Homo sapiens
  misc_feature (1)...(614): n = a,t,c or g
gagtcgacggctggagagaagccgggagcgagcccaggcgncagtcttgattcccttttggccagcagtttttaggtctgtcagtactgcactgcaagaatggcagattttgggatctctgctggccagtttgtggcagtggtctgggataagtcatccccagtggaggctctgaaaggtctggtggataagcttcaagcgttaaccggcaatgagggccgcgtgtctgtggaaaacatcaagcagctgttgcaatgtttaagtcccaggaagcaccactcctgcacagtgcctgagattttggcctgaaatcgcccggatccttcggcctggtggaatgtctttttctgaaggagccagtagagacagctgtagataacaatagcaaagtgaagacagcatctaagctgtggttcagccctgactctttcctggtcttgtggaagtgaaagagctgcagcgggagcccctaacccctgaggaagtacagtctgttcgagaacaccttggtcatgaaagtgacaacctgctgtttgttcagatcacaggcaaaaaaccaaactttgaagtgggttcttctatgcagcttaagctttctatcaccaagaagtctt

SEQ ID NO: 156317 - DNA, 1294 bp, Homo sapiens
ctctgacgaatgacgactgcatgaattctgcacgagtggctctatgttgccaagcgagctcatgcggcagtcttgattcctttttgtccagcagtttttaggcctgtcagtactgcactgcgagaattgtagattttgagatctctgctggccagtttgtggcataggtctgggataagtcatccccagtggaggctctgaaaggtctggtggataagcttcaagcgtttaaccgggcaatgagggccgcgtgtctgtgggaaaacatcaaggcagctgttgcaattctgcccacaaagaatccagctttggacattattttgttcaggtttagtcccagggaaggcaccactctggcacagtgcttgagatttttgggctggaaatccgcccggattccttcggcctgggtggatgttctttttcctgaaggagccagtagagacagctgttagataacaataggcaaagtggaagacagcatctaagctgtgttcagccctgactctttctggtcttgtgggaagttgaaagagctgcagcgggagcccctaacccctgaggaagtacagtctgttcgagaacaccttggtcatgaaagtgacaacctgctgtttgttcagatcacaggcaaaaaaccaaactttgaagtgggttcttctaggcagcttaagctttccatcaccaagaagtcttctccttcagtgaaacctgctgtggaccctgctgctgccaagctggtggaccctctcagccaacgatatggaggacgacagcatgtgcatcttctgtggatgtagtttaactcaccgttggcctcttgagcatgtggtcaggttgaacatgatgatcaaccaaaaggaggacagggtggacaccttctttaccctggactccaagtttcctctcgaagcctgcagtcactttagcttttcattagcagagaccacgactgtatcactcattgctttgaacactctccaggatctcattgactcagatgagctgctggatccagaagatttgaagaagccagatccagcttccctgcgggctgcttcttgtggggaagggaaaaagaggaaggcctgtaagaactgcacctgtggccttgctgaagaactggaaaaagagaagtcaagggaacagatgagctcccaacccaagtcagcttgtggaaactgctacctgggcgatgccttccgctgtgccagctgcccctaccttgggatgccagccttcaaacctgggggaaaaggtgcttctgagtgatagcaatcttcatgatgcctag

SEQ ID NO: 156318 - DNA, 1807 bp, Homo sapiens
atggggtttcgctatgttgcccaggctggtctcgaactcctgagctcagatccctccattcccagctctaaaacattgcaagagcaaaatgatcaaagctatccaagtacactgcctgtgtttcctgaagtcgccctgcacacgctgttgtggggggaagatgcgaacaacagcaaagtgaaagagctgcagcgggagcccctaacccctgaggaaatacagtctgttcgagaacaccttggtcatgaaagtgacaacctgctgtttgttcagatcacaggcaaaaaaccaaactttgaagtgggttcttctaggcagcttaagctttccatcaccaagaagtcttctccttcagtgaaacctgctgtggaccctgctgctgccaagctgtggaccctctcagccaactgatatggaggacgacagcatggatctcattgactcagatgagctgctggatccagaagatttgaagaagccagatccagcttcccctgcgggcttgcttcttgtggggaagggaaaaagaggaaggcctgtaagaactgcacctgtggccttgccgaagaacttggaaaaagagaagtcaagggaacagatgagctcccaacccaagtcagctttgtggaaactgctaccgtggagcgatgccttccggctgtgccagctgcccctaccttgggatgccagccttcaaacctggggaaaaggtgcttctgagtgatagcaatcttcatgatgcctaggaggttcctgacatgggacccatctgctcctccagccaactcctgtccctcacatcccaccatggtggctcctcccacctcctctggatttgttcactctgagatctgtttgcagagtagggtgcttagcagacagagtgaagctggctgggggggcacagtggtgtgttagtgctgctgtgttattcaaaagaccaaggtattatgggacctggtttcaagaaatggggatggggtttccttcaaccctcaatgttaaaggagaaggggaagtgtgtccctgaaagaaagccccttccttcctggatgttaaaaatgcctgaaccagaacggttcttgagccccaggcatccgttggagcattaaacactctgtgaacagagctgcagacccctgccttgaagtctcatcctcagcaatgctgccacccctcttgtcttttcagagttgttaagtttactccattcttttgtgacaccgagtcaagtgggctcacaacctcctcaggggcaccagaggacttcactcacttggttgctgtgatgatatccagtgtccctctgcccccttccatccccaaccacattttgactgtaggcattgcatctgtgtcctgttgtcatttatgttaaccttcagggtattaaacttggctggcatatcttggacatatcttggaggattctggcatgtcttgtaaaagagagggggatgtggcatttgtgtgtgatgttggatagtcatcccacgcctcagtttggacccattggaggaacttagtgtcacgcacaaatggggctattcctacgcttagaatagggcttgtctgcccactttagaagagtcccaggttggtgagcatttagagggaagcagggcagaactctgaacgacaatacgtctctctgagcagagacccctttgttcttgttatccacccatatggacttggaatcaatcttgccaaatatttggagagattgtgtggatttaagagacctggatttttatattttaccagtaaataaaagttttcattgatatctgtccttgaaaaaaaa

SEQ ID NO: 156319 - DNA, 365 bp, Homo sapiens
ctacaggcatatggcaccacacccaactaattttttaaaaaaattttttgtagagacgggggtcttgtcatgttgcccaggttggtcttcaactcctggcctcaagggatccttctgcctcaacctcccaaagttctaggattacaagtgtgagtcgctgcacctggccatagaactttaaaataatcaatataaaaatataggaatatttaaacatagtcatgcaccatataacattttagtcaacaacggaccgtgtgcagctgtggtcccatattatactggagctgaaaaattcctactgttttgcccgtcccagctgttgtaacatcatagcacaatgccgttgtgaaacacctcgtgcc

SEQ ID NO: 156320 - DNA, 1236 bp, Homo sapiens
gagaagcagagctgtaagagctgtggtgagacctttaactccatcaccaagaggaggcatcactgcaagctgtgtggggcggtcatctgtgggaagtgctccgagttcaaggccgagaacagccggcagagccgtgtctgcagagattgtttcctgacacagccagtggcccctgagagcacagagaagacacccactgcagacccccagcccagcctgctctgcggccccctgcggctgtcaaagagcggtgagacctggagcgaggtgtgggccgccatccccatgtcatatccccaggtgctgcacctgcagggaggcagccaggacggtcggctgccccgcaccatccctctccccagctgcaaactgagtgtgccggaccctgaggagaggctggactcggggcatgtgtggaagctgcagtgggccaagcagtcctggtacctgagcgcctcctccgcagagctgcagcagcagtggctggaaaccctaagcactgctgcccatggggaacacggcccagggacagcccgggggccctgcagcttcaggtccctatgggcgcagctgctccgtgagctgagtctcccactgccctgcacaccaccacattggacctgtgctgtcctgggaggtggtgttggaaggccccatgaagagcgccctggactgctgagggtgggccaacagcccagagctcaggacacttggctttggggggaaggaaactgaggcccagagaggggcaaccactggccaagggtcacccagcaagttttggctaagagcctggcctccagccccagcagtgtggcccagagcaggggccgactgccaaagtaacccattatccatatgggcacgtgtggtgatgctggcccggaaaggcaagaaagaggcaagcatgggcactgcccagggacagccacatcctgctggtctgcagcgtggtccaccccgcctctgcccagcctgtctacaccgtgtgagctgaatcgtgacttgcttcccacctcctttctctgtcctctcctgaggttctgcctgcagcccccaggaggtgggcctgccccatcctagctggactcatggttcctaaataaccacgctcagaagctctgctaggacttaccccagccactgagtggcaggcgcatgagatttgtggctgttcctgatgctagtggcacacagtgcttatctgcataaataaacactggccaccagcagtga

SEQ ID NO: 156321 - DNA, 1460 bp, Homo sapiens
atgaaagagaatttcaaacacaggcacgtggtggcgttcattagcagtcaggaagctcaggaagattcaagagaggaagaagaccgactggagtctcggttttactttctttttctcttggagctgagctataagacaacaggactgaacagggagccaactgtttctttgaacagtaaatcaggaacaccaatggaccaaaatgaacacagtcactggggaccacatgcaaagggccaatgtgccagcagatctgagctgagaatcatcctggtgggcaaaacaggaactggcaaaagtgctgcagggaacagcatcctcaggaagcaagcatttgaatcgaagctgggttcccagaccttgactaagacttgcagcaaaagtcagggaagctggggaaatagagagattgtcattattgacacaccagatatgttttcttggaaggaccactgtgaagctctgtacaagagaggtgcagaggtgctacttggtggctggaccaagaaccccatgtgctgctcctggtgactcagctgggccgctatacctcacaggaccagcaggctgcacagagggtgaaggagatctttggagaggatgccatgggacacacaattgtcctctttacccacaaggaagacctcaatggtggctccctgatggattacatgcacgactcagataacaaagccctaagcaagctggtggcagcatgtggtgggcgaatctgtgcctttaataaccgtgctgaagggagcaatcacgatgaccaagtgaaggaactaatggactgtattgaggatctgttgatggagaaaaatggtgatcactataccaatgggttgtacagcctaatacagaggtctaaatgtggacctgtgggatcagatgaaagagtaaaggaattcaaacagagccttataaagtacatggaaactcaaagaagttacacagccttggctgaagcaaactgcctaaaaggagccttaatcaaaacacaactaccaaaagtagataaaaccacaaagatagggaaaaaacagagcagaaaaactggaaactctaaaaagcagagcacctctcctcctccaaaggaacgcagttcctcaccagcaatggaacaaagctggacagagaatgactttgacgagctgagagaagaaggcttcagacgatcacattactctgagctaccggaggacattcaaaccgaaggcagagaagttgaaaactttgaaaaaagtttagaagaatgtataactagaataacccacacagagaagtgcttaaaggagctgatggagctgaaaaccaaggctcgagaactacgtgaagaatgcagaagcctcaggagccaatgcgatcaactggaagaaagggtgtcagcaatggaagatgaaatgaatgaaatgaagcgagaagggaagtttaaagaaaaaaagaataaaaagaaatga

SEQ ID NO: 156322 - DNA, 1448 bp, Homo sapiens
gagctataagacaacaggactgaacagggagccaactgtttctttgaacagtaaatcaggaacaccaatggaccaaaatgaacacagtcactggggaccacatgcaaagggccaatgtgccagcagatctgagctgagaatcatcctggtgggcaaaacaggaactggcaaaagtgctgcagggaacagcatcctcaggaagcaagcatttgaatcgaagctgggttcccagaccttgactaagacttgcagcaaaagtcagggaagctggggaaatagagagattgtcattattgacacaccagatatgttttcttggaaggaccactgtgaagctctgtacaaagaggtgcagaggtgctacttgctctctgcaccaggaccccatgtgctgctcctggtgactcagctgggccgctatacctcacaggaccagcaggctgcacagagggtgaaggagatctttggagaggatgccatgggacacacaattgtcctctttacccacaaggaagacctcaatggtggctccctgatggattatcatgcacgactcagataacaaagttcctattcaagctggtggcagcatgtggtgggcgaatctgtgcctttaataaccgtgctgaagggagcaatcaggatgaccaagtgaaggaactaatggactgtattgaggatctgttgatggagaaaaatggtgatcactataccaatgggttgtacagcctaatacagaggtctaaatgtggacctgtgggatcagatgaaagagtaaaggaattcaaacagagccttataaagtacatggaaactcaaagaagttacacatgccttggctgaagcaaactgcctaaaaggagccttaatcaaaacacaactgtgtgttttattttgtattcagttgtttctcagattgataattctgtggctttgcatactgcacagcatgtgcaatttgttttgttgcttactctttagtatgtgcaatttattctgcagtttgctgtttattatacccaaaaagttaatgatatttttgagaacagttattagactagaaacgcaagactcctaggtttatagttacagatcccaggttattatttacctcacctatcatttaagtggggtgaatccacagtaatttcccctgtaaaatgtggtacctgaagtcatatttgagattctatgaaatgtttaaatctgaacatcactccaattattaatgaaccaaatcatacgataagttactgtttgcattgaaatataatatcaaagccttttgaaatctgtaaacataaaattcctctcattttcaaatatctaaagccagttttatgttcctaaaatctcattttcttctttctagtactactatttctattgaatataatgaaaatggcaataaaataatattacataaactgtaaaaaaaaaaaaaaaaa

SEQ ID NO: 156323 - DNA, 568 bp, Homo sapiens
ccgtgtggggcccggcagggctgtggaggcccaccccccagactctctcttctaggaggaccagccaggagctcctctccaagccagtgcctcccccagcaccagggggcccggcctccagagtgggcagggggagtgtgtcaggggcgctgagcccagagtggaatggggaacgccagcaccaccgtggagtggtcctcacacacccacagagcccaaaccaccaggcagggtcccccaaccccaacaccaggcaggctctagccaccctgtcggttcccaataagccatttattgaataaagattgaatccaaaactccaggttccaggggagtgtgattcctgagctctggctgagggtagccgggccggaagaacacccagagggagtagctatcctccatgcccttctcctctgcagcacgggttggcgcaagctcaccctgggctaaaggaaggcttgccctgccatgcccctgctcaaggacctgccagggctccctatgggcgttagtatctgatcccatccctctgcctggctttcaaggtcctctgtcccacggggct

SEQ ID NO: 156324 - DNA, 591 bp, Homo sapiens
gcgacggagtcttgctctgttgcccaggttggagtgcagtggtgcgatctcagctcactgcaagctccgcctcctgggttcacaccattctcctccctcagcctccagggtagctgggactacaggagcccgccaccacacccggctaatttttttgtagttttagtggaaatgcctcggcctcccaaagcgctgggattacaggtgtgagccaccgcacccggccaagaattgctatttttaatttgactgagaacacaaacgggagtgttgatgaagactaatgaaaaatgtttgggtattctggtacttaaatgcaaaactgtgtcggaaaaaaaaatcttaaaacagggcatctatattcaaaattcaaaacattttatcccaataaataagctaaaaagcacatctttaaaaagatgttatgacacataaaaataattttatgtgttatgacacataaaaataatatgaacttcagccaggcgtggtggctcacacctgtaatcttgggaggccaaggcgggcagatcacgaggtcaggagatcgagaccatcctagccaacacggtgaaaccccatcactactta

SEQ ID NO: 156325 - DNA, 421 bp, Homo sapiens
tgggcatccacggctggtcctatggaggatacctctccctgatggcattaatgcagaggtcagatatcttcagggttgctattgctggggccccagtcactctgtggatcttctatgatacaggatacacggaacgttatatgggtcaccctgaccagaatgaacagggctattacttaggatctgtggccatgcaagcagaaaagttcccctctgaatctatcctcaggagagacacagcataagagttcctgaatcgggagaacattatgaactgcatcttttgcactaccttcaagaaaaccttggatcacgtattgctgctctaaaagtgatataattttgacctgtgtagaactctctggtatacactggctatttaaccaaatgaggaggtttaatcaacagaaaaccacggaat

SEQ ID NO: 156326 - DNA, 1203 bp, Homo sapiens
atgaagaaccctgccatcagcatcactgaaaacgtgctgcatttcaaagctcaaggacatggtgccaaaggagacaatgtctatgaatttcacctggagttcttagaccttgtgaaaccagagcctgtttacaaactgacccagaggcaggtaaacattacagtacagaagaaagtgagtcagtggtgggagagactcacaaagcaggaaaagcgaccactgtttttggctcctgactttgatcgttggctggatgaatctgatgcggaaatggagctcagagctaaggtgcagttggtgaataatcggtttaaaggagtcaagtatttccgcttgaataccctagcctctctaggttatgtggttgtagtgatagacaacaggggatcctgtcaccgagggcttaaatttgaaggcgcctttaaatataaaatgggtcaaatagaaattgacgatcaggtggaaggactccaatatctagcttctcgatatgatttcattgacttagatcgtgtgggcatccacggctggtcctatggaggatacctctccctgatggcattaatgcagaggtcagatatcttcagggttgctattgctggggccccagtcactctgtggatcttctatgatacaggatacacggaacgttatatgggtcaccctgaccagaatgaacagggctattacttaggatctgtggccatgcaagcagaaaagttcccctctgaaccaaatcgtttactgctcttacatggtttcctggatgagaatgtccattttgcacataccagtatattactgagttttttagtgagggctggaaagccatatgatttacagatagctttctgtgataattttgccttttatatttgtctagagctagccaacatggaagaagatgccagatcagctggagtcgctacctttgttctccaagaagaatttgatagatattctggctattggtggtgtccaaaagctgaaacaactcccagtggtggtaaaattcttagaattctatatgaagaaaatgatgaatctgaggtggaaattattcatgttacatcccctatgttggaaacaaggagggcagattcattccgttatcctaaaacaggtacagcaaatcctaaagtcacttttaagatgtcagaaataatgattgatgctgaaggaaggggaaacttctgcaagtaa

SEQ ID NO: 156327 - DNA, 985 bp, Homo sapiens
caacaggggatcctgtcaccgagggcttaaatttgaaggcgcctttaaatataaaatgggtcaaatagaaattgacgatcaggtggaaggacatccaatatctagcttctcgatatgatttcattgacttagatcgtgtgggcatccacggctggtcctatggaggatacctctccctgatggcattaatgcagaggtcagatatcttcagggttgctattgctgggggccccagtcactctgtggatcttctatgatacaggatacacggaacgttatatgggtcaccctgaccagaatgaacagggctattacttaggatctgtggccatgcaagcagaaaagttcccctctgaaccaaatcgtttactgctcttacatggtttcctggatgagaatgtccattttgcacataccagtatattactgagttttttagtgagggctggaaagcaatgatgatttacagatctatcctcaggagagacacagcataagagttcctgaatcggggagaacattatgaactgcatcttttgcactaccttcaagaaaaccttggatcacgtattgctgctctaaaagtgatataatattgacctgtgtagaactctctggtatacactgagctatttaaccaaatgaggaggtttaatcaacagaaaacacagaattgatcatcacattttgatacctgccatgtaacatctactcctgaaaataaatgtggtgccatgcaggggtctacggtttgtggtagtaatctaataccttaaccccacatgctcaaaatcaaatgatacatattcctgagagacccagcaataccataagaattactaaaaaaaaaaaaaaaaaaagggggggccgttttaaagaatcaaattttacttcccggggctggcaaggttttattttttttttggggcccccaaaattaaattcccgggccggggttttacaacgcggggatgggaaaaccccg

SEQ ID NO: 156328 - DNA, 248 bp, Homo sapiens
tcacaggatgcgtcgccgtttgatggctattgcagatgaggtggaaattgccaagccatccagttgggcgtagaagacactttggatggtcaacaggacagttcttgcaggcatctgttcccaacaactatcagctggcactgcaacagtgtctctaagcatagacttcagggattcattccctgcagaataccttctcatctcctcaaacacagcgcaagttttctctacaattccacagaaactgc

SEQ ID NO: 156329 - DNA, 555 bp, Homo sapiens
atggatcttgtgtggaccaagcaaaacctgcagctaggggagaagccaaacaagagtacagaagattcaagtctgccatctcatgctaaacctggagcatatcctttgaatggaatggagaacagaggcactggcatcccttctggaggcgagaagttcatgatcaaggtccggcagagtcagtttctggtgagggttcttttcctggcttgcagacagttgtcttctcaccgtgtcctcacacaggttttccttgatgcatggtcttccatgattcagtggggcctgctgttgcaatggggagacaactgggaaaatttctggggggggcaaccagttgggaagcagcccgattgggggacccaacccaagtttgggtcttcccagaccagtatctcaggagatgtggtggaggcatgctgcagcgttctgtcaatggtctgtgctgaccctgtctacaaagtgtacgttgctgctttactgttggagagggaattgccaggtgtctttagtggaaagatatttaacctgctgtctgactgcttattgtggtag

SEQ ID NO: 156330 - DNA, 1660 bp, Homo sapiens
atggatgatcgtccagaggaacgaatgatcagggagaaactgaaggcaacctgtatgccagcctggaagcacgaatggttggaaaggagaaataggcgagggcctgtgccccccaacaataaatggtctcccccccgcattcaaattaagcattccagaaaccctccaccaatctacccgtttacgctcgaaacaaaagattgggtctcaaaaaatcaaataaaacaagctgcacagcagcaaaccgtacagcagcagcctttggctggatcacgaaggaatcaagagagcaattttaaccttactcattatggaactcagcaaatccctcctgcttacaaagatttagctgagccatggattcaggtagtcgctactccttacctcatggctatcaatgccgcatcgtccctgcgcacctgcaacaaccaccgccctgctagcatttcttaccttgattcagtcaggctactgtgtcacaaaaggccctcaaagtcatccgtatctgcgctcatcaccgtgtgtagttcatttgcaggcttcatgaggcccccgtattcactccgggccaccgtacatgtgtcatgctcaccccttgctgctttacactctattgctccctcgtccgttaaggtacgagtacaagcgtgcggcacttcggctagtccccaaataaggataatggcttttcggtatcccggtagccgcgccattttccctataatcccatgttctgcaaagcccgtccgcatgtcaacttgctcatggcgggccactgtcattgccatgagtttgcgcctaacggaggtgttaggccagcaaaatcgctacgggtcaaacaacccatacgcacatggcgcaaacctgtgtggtgaactgcccctagagctttacgtattcccgattcgcccaagtttttctacccgccctaagaccgttgcagtagatatagccagtattttcaagatccagcaatttcccagtcacttcacaactcctcaactcatcgacctcgttcgctttaactcccctgttttattacgcgtcggcgccctgttccaccagtgctcgatatcacgttcgccattgcgcaggcgttcgctcagtgacgcaaccagttcacgtgcgcgaaaggctgttttgacgcggacgtttgggctatgctatgcggatctgaaaaaccacctcaacgctacatttgtagccgtattgaaaacaggaccactggctgccatgcaagagcaataccgcccggaagagatagaatccaaagtacagcttcattgggatgagaagcgcacatttgaagtaaccgaagacgagagcaaagagaagtattactgcctgtctatgcttccctatccttctggtcgactacacatgggccacgtacgtaactacaccatcggtgacgtgatcgcccgctaccagcgtatgctgggcaaaaacgtcctgcagccgatcggctgggacgcgtttggtctgcctgcggaaggcgcggcggtgaaaaacaacaccgctccggcaccgtggacgtacgacaacatcgcgtatatgaaaaaccagctcaaaatgctgggctttggttatgactggagccgcgagctggcaacctgtacgccggaatactaccgttgggaacagaattcttcaccgagct

SEQ ID NO: 156331 - DNA, 1950 bp, Homo sapiens; identical to SEQ ID NO: 118462

SEQ ID NO: 156332 - DNA, 5285 bp, Homo sapiens
  misc_feature (1)...(5285): n = a,t,c or g
ccgagccctgaggcaggcggcggcggaggagccctcaaggcgagcagcgcgcgcgcggctgccgcgggactgctgcgggaggcgggcagcgggggccgcgagcgggcggactggcggcggcggcagctgcgcaaagtgcggagtgtggagctggaccagctgcctgagcagccgctcttccttgccgcctcaccgccggcctcctcgacttccccgtcgccggagcccgcggacgcagcggggagtgggaccggcttccagcctgtggcggtgccgccgccccacggagccgccagccggcgcggcgcccaccttaccgagtcggtggcggcgccggacagcggcgcctcgagtcccgcagcggccgagcccggggagaagcgggcgcccgccgccgagccgtctcctgcagcggcccccgccggtcgtgagatggagaataaagaaactctcaaagggttgcacaagatggatgatcgtccagaggaacgaatgatcagggagaaactgaaggcaacctgtatgccagcctggaagcacgaatggttggaaaggagaaataggcgagggcctgtggtggtaaaaccaatcccagttaaaggagatggatctgaaatgaatcacttagcagctgagtctccaggagaggtccaggcaagtgcggcttcaccagcttccaaaggccgacgcagtccttctcctggcaactccccatcaggtcgcacagtgaaatcagaatctccaggagtaaggagaaaaagagtttccccagtgccttttcagagtggcagaatcacaccaccccgaagagccccttcaccagatggcttctcaccatatagccctgaggaaacaaaccgccgtgttaacaaagtgatgcgggccagactgtacttactgcagcagatagggcctaactctttcctgattggaggagacagcccagacaataaataccgggtgtttattgggcctcagaactgcagctgtgcacatggaacattctgtattcatctgctatttgtgatgctccgggtgtttcaactagaaccttcagacccaatgttatggagaaaaactttaaagaattttgaggttgagagtttgttccagaaatatcacagtaggcgtagctcaaggatcaaagctccatctcgtaacaccatccagaagtttgtttcacgcatgtcaaattctcatacattgtcatcatctagtacttctacatctagttcagaaaacagcataaaggatgaagaggaacagatgtgtcctatttgcttgttgggcatgcttgatgaagaaagtcttacagtgtgtgaagacggctgcaggaacaagctgcaccaccactgcatgtcaatttgggcagaagagtgtagaagaaatagagaacctttaatatgtcccctttgtagatctaagtggagatctcatgatttctacagccacgagttgtcaagtcctgtggattccccttcttccctcagagctgcacagcagcaaaccgtacagcagcagcctttggctggatcacgaaggaatcaagagagcaattttaaccttactcattatggaactcagcaaatccctcctgcttacaaagatttagctgagccatggattcaggtgtttggaatggaactcgttggctgcttattttctagaaactggaatgtgagagagatggccctcaggcgtctttcccatgatgtcagtggggccctgctgttggcaaatggggagagcactggaaattctgggggcagcagtggaagcagcccgagtgggggagccaccagtgggtcttcccagaccagtatctcaggagatgtggtggaggcatgctgcagcgttctgtcaatggtctgtgctgaccctgtctacaaagtgtacgttgctgctttaaaaacattgagagccatgctggtatatactccttgccacagtttagcggaaagaatcaaacttcagagacttctccagccagttgtagacaccatcctagtcaaatgtgcagatgccaatagccgcacaagtcagctgtccatatcaacactgttggaactgtgcaaaggccaagcaggagagttggcagttggcagagaaatactaaaagctggatccattggtattggtggtgttgattatgtcttaaattgtattcttggaaaccaaactgaatcaaacaattggcaagaacttcttggccgcctttgtcttatagatagactgttgttggaatttcctgctgaattttatcctcatattgtcagtactgatgtttcacaagctgagcctgttgaaatcaggtataagaagctgctgtccctcttaacctttgctttgcagtccattgataattcccactcaatggttggcaaactttccagaaggatctacttgagttctgcaagaatggttactacagtaccccatgtgttttcaaaactgttagaaatgctgagtgtttccagtgtttccactcacttcaccaggatgcgtcgccgtttgatggcttatgcagatgaggtggaaattgccgaagccatccagttgggcgtagaagacactttacaacgacaacaacacaacagcttttgcaggcatctgttcccaacaactatctggaaaccacagagaacagttccccttgagtgcacagtccatttagagaaaactggaaaaggattatgtgctacaaaattgagtgccagttcagaggacatttctgagagactggccaggatttcagtaggaccttctagttcaacaacaacaacaacaacaacaacagagcaaccaaagccaatggttcaaacaaaaggcagaccccacagtcagtgtttgaactcctctcctttatctcatcattcccaattaatgtttccagccttgtcaaccccttcttcttctaccccatctgtaccagctggcactgcaacagatgtctctaagcatagacttcagggattcattccctgcagaataccttctgcatctcctcaaacacagcgcaagttttctctacaattccacagaaactgtcctgaaaacaaagactcagataaactttccccagtctttactcagtcaagacccttgccctccagtaacatacacaggccaaagccatctcgacctaccccaggtaatacaagtaaacagggagatccctcaaaaaatagcatgacacttgatctgaacagtagttccaaatgtgatgacagctttggcttgagcagcaatagtagtaattgctgttataccagtgacgagacagtgttcaccccagtagaggagaaatgcagattagatgtcaatacagagctcaactccagtattgaggaccttcttgaagcatctatgccttcaagtgatacaacagtaacttttaagtcagaagttgctgtcctgtctcctgaaaaggctgaaaatgatgatacctacaaagatgatgtgaatcataatcaaaagtgcaaagagaagatggaagctgaagaagaagaagctttagcaattgccatggcaatgtcagcgtctcaggtagccctccccatagttcctcagctgcaggttgaaaatggagaagatatcatcattattcaacaggatacaccagagactctaccaggacataccaaagcaaaacaaccgtatagagaagacactgaatggctgaaaggtcaacagataggccttggagcattttcttcttgttatcaggctcaagatgtgggaactggaactttaatggctgttaaacaggtgacttatgtcagaaacacatcttctgagcaagaagaagtagtagaagcactaagagaagagataagaatgatgagccatctgaatcatccaaacatcattaggatgttgggagccacgtgtgagaagagcaattacaatctcttcattgaatggatggcagggggatcggtggctcatttgctgagtaaatatggagccttcaaagaatcagtagttattaactacactgaacagttactccgtggactttcgtatctccatgaaaaccaaatcattcacagagatgtcaaaggtgccaatttgctaattgacagcactggtcagagactaagaattgcagattttggagctgcagccaggttggcatcaaaaggaactggtgcaggagagtttcagggacaattactggggacaattgcatttatggcacctgaggtactaagaggtcaacagtatggaaggagctgtgatgtatggagtgttggctgtgctattatagaaatggcttgtgcaaaaccaccatggaatgcagaaaaacactccaatcatcttgctttgatatttaagattgctagtgcaactactgctccatcgatcccttcacatttgtctcctggtttacgaagatgtggctcttcgttgtttaagaacttcaaccttcanggacagacctccatcaagagagctactgaagcatccagtctttcgtactacatggtagccaattatgcagatcaactacagtagaaacaggatgctcaacaagagaaaaaaaacttgtggggaaccacattgatattctactggccatgatgccactgaacagctatgaacgaggccagtggggaacccttacctaagtatgtgattgacaaatcatgatctgtacctaagctcagtatgcaaaagcccaaactagtgcagaaactgtaaactgtgcctttcaaagaactggccctaggtgaacaggaaaacaatgaagtttgcatgactaaattgcagaagcataattttatttttttggagcactttttcagcaatattagcggctgaggggctcaggatctattttaatatttcaattattcttccatttcatatagtgatcacaagcagggggttctgcaattccgttcaaattttttgtcactggctataaaatcagtatctgcctcttttaggtcagagtatgctatgagtagcaatacatacatatatttttaaaagttgagacttctttatgacccacagctgacctttattttcttaaataccacggcagttgtggctcattgtgcattttactgttggcccattcattccgttattggaaattatggttttggattttcatgtctatttacattcttttttgtttattcagggaaagctgatctttttttctaaccagaaaaaaaaaaatgaactataattgaagttcagttccttaaatatcttgctatggtccgaggttttaaaaatagacttaattttgttttttaaattggaaaacg

SEQ ID NO: 156333 - DNA, 2085 bp, Homo sapiens; identical to SEQ ID NO: 141311

SEQ ID NO: 156334 - DNA, 1281 bp, Homo sapiens; identical to SEQ ID NO: 119783

SEQ ID NO: 156335 - DNA, 2748 bp, Homo sapiens; identical to SEQ ID NO: 116383

SEQ ID NO: 156336 - DNA, 3300 bp, Homo sapiens; identical to SEQ ID NO: 118076

SEQ ID NO: 156337 - DNA, 2205 bp, Homo sapiens; identical to SEQ ID NO: 122554

SEQ ID NO: 156338 - DNA, 2871 bp, Homo sapiens; identical to SEQ ID NO: 116399

SEQ ID NO: 156339 - DNA, 3240 bp, Homo sapiens; identical to SEQ ID NO: 148407

SEQ ID NO: 156340 - DNA, 2004 bp, Homo sapiens; identical to SEQ ID NO: 122556

SEQ ID NO: 156341 - DNA, 2985 bp, Homo sapiens; identical to SEQ ID NO: 121567

SEQ ID NO: 156342 - DNA, 4728 bp, Homo sapiens
aaaaatggcaaatttaaaatattttttattcagaaatattttttcaaccaagcaatcaggagtgccaagatcgcatgatttgtgtaaaacacaactttggtctgaaagtaacaagtgaattttacaaaagaaaatatcctgatcctagttccagacttagagagaaaatgcttttgctgaatgttaaccaggaaagttggtaaccagcacttcagtcttatggaagaatcttgatttgttcattctgtaatctctttgagagctcagcacaaaaactgtactcaggagtttgtttgtttttttttgaactttttttttttaatttaagttttagggtacatgtgcacaatgtgcaggtttgttacgtatgtatacatgtgccatgttggtgtgctgcacccattaactcatcatttacattaggtatatctcctaatgctatccctcccctctccccgcaccccacaacaggccctggtgggtgatgttccccttcctttgtccatgtgttctcattgttcatttcccacctatgagtgagaacatgtggtgtttggtttttgtccttgcgatagtttgctgagaatgatggtttccagcttcacccatgttcctacaaaggacatgaactcatcctttttatggctccatagtattccatggtgtatatgtgccacattttcttaatccagtctatcattgttggacatttgggttggttccaagtctttgctattgtgaatagtgctgcaataaacatatgtgtgcatgtgtctttatagcagcatgatttataatcctttgggtatatacccagtaatgggatggctgggtcaaatggtatttctagttctagatccttgaggaatcgccacattgacttccacaatggttgaatgagtttacagtcccaccaacagtgtaaaagtgttcctatttctccacatcctctccagcacctgttgttccctgactttttaatgatcgccattctaactggtgtgaaatggtatctcattgtggttttgatttgcatttctctgatggccagtgatgatgagcattttttcatgtgtttgttggctgcatcaatgtcttcttttgagaagggtcttttcatatccttagcccgttgattgggttgtttttttcttgtaaatttgtttgagttcattgtagattctggatattagccctttgtcagatgagtagattgcaaaaatcaccactcctattcaacatagtgttggaagttctggccaaggcaatcaagcaggagaaggaaataaagggtattcaattaggaaaagaggaagtcaaattgtccctgtttgcagatgacatgattgtatatctagaaaaccccactgtctcagcccaaaatctccttaagctgatgagcaacttcagcaaagtctcaggatacaaaatcaatgtgcaaaaatcacaagcattcttatacaccaataacagacaaacagagagccaaatcatgagtggactcccattcacaatcacttcaaagagaataacatacctaggaatccaacttacaagggatgtgaaggacctcttcaaggagaactacaaaccactgctcaaggaaataaaagaggatacaaacaaatggaagaacattccatgctcatgggtaggaggaagaatcaatctcgtgaaaatggccatactgcccaaggtaatttacagattcaatgccatccccatcaagctaccaatgactttcttcacagaattggaaaaaactactttaaagttcatatggaaccaaaagagagccctcattgccaagtcatccctaagccaaaagaacaaaactggaggcatcacgctacctgacttcaaactatactacaaggctacagtaaccaaaacatcatggtactggtaccaaaacagagatatagatcaatggaacagaacagagccctcagaaataatgccacatatctacaactatctgatctttgacaaacctgacaaaaacaagcaatggggaaaggattccctatttaataaatggtgctgggaaaactggctagccatatgtagaaagctgaaactggatcccttccttacaccttatacaaaaattaattcaagatggattaaagacttacatgttagacctaaaaccataaaaaccctagaagaaaacctaggcaataccattcaggacataggcatgggcaaggacttcatgtcgaaaacaccaaaagcaatggcaacaaaagccaaaattgacaaatgggatctcattaaactaaagagcttctgcacagcaaaagaaaccaccatcagagtgaacaggcaacctacagaatgggagaaaatttttgcaacctactcatctgacaaagggctaatatccagaatctacaatgaactcaaacaaatttacaagaaaaaaacaaacaaccccatcaaaaagtgggcaaaggatatgaacagacacttctcagaagaagacatttatgcagccaaaaaacacatgaaaaaatgctcatcatcactggccatcagagaaatgcaaatcaaaaccacaatgagataccatctcacaccagttagaatggtgatcattaaaaagtcaggaaacaataggtgctggagaggatgtggagaaataggaacacttttacactgttggtgggactgtaaactagttcaaccattgtggaagtcggtgtggcaattcctcagggatctagaactagaaataccatttgacccagccatcccattactgggtatatacccagaggattataaaccatgctgctataaagacacatgcacacgtatgtttattgcggcactattcacaatagcaaagacttggaaccaacccaaatgtccaacaatgatagacgggattaagaaaatgtggcacatatacaccatggaatactatgcagccataaaaaaggatgagttcatgtcctttggcagggacatggatgaagctggaaaccatcattctgagaaaactatcacaaggacagaaaaccaaacaccgcatgtactcactcataggtgggaatttaacaatgagaacatttggacacagtgcagggagccatcacacaccagggcctatcatgaggtgtggggctgggggagggatagcattaggagaaatacctaatgtaaatgacgagttaatgggcacagcaaaccaacatggcacatgtatacctatgcaacaaaactgcacattgtgcacatgtaccctaaaacttaaagtataataataaaaaaagaaaaaaagaaagttagttttcagttatggaaggttgggcttgtaatctcaactactcgggacgctgaggcaggaggatcatctgagccccgcagtttgaggctgcagtaagttatgactgcaccactgcactccagcctgggtaacagtgagaccctatctcttaaaaaaattatgctgagaatattttctgagttgtcacatgggtcttgtgataaactaataatgcaaacttttatttttcattatatataaatattggatttatcccaaccaaactagtttgcagggaacctctgcctttatttcacggctggagaatgagatacaaaagatgtcaatttccatcgtaagaactttccacagtagtgttctttggacattctctcccttgtattaggctcctcagaaatctatctccagactgaaaccagcacattctgatgagatcatagcttagtactcagaaaaatcactactcagtggaattcttgaaattttgaaacaactgattttagcatacagaatttcaaaaagaacatacattacagccagaaacgattgtttgctcatgaattttgattattggcagacacatttgctgtagcggcaactgtgcaagagttcattttaacagaataatatgttctgaaatactcttttataatcaatataaaattctagaatgttaattcctatagcaagaacttgtgacattataaaatgtggtttaccatagaaagtcgctagatttcccatgttttcttaaaattaaatgtactaaaaaatccaaatgtaatagaaaaatgcaatcacataggtgctttaaacagacatttctgaataacactgcattctaactcatgagtacaaagaaatgtgtatgctatttatacattttcttagtgttccctacctttggactccaatcattttaacgtatccgtatactggagatttgatcacagtatatggcacttcacaataacattccatgtcctaataatgtgaaatgcctgtatacaatctgagtatattgtttagtcagaaaacatcaaaattaaggatataggacatggaatgtctgttaagtgctgagtttttctgactagagtttaatctagccagtgttaatgtggaagctgtatgcttttttcatgggcatgttcgaattttttctttcaaaatgtttctcaactttttgatgtgacactttgttttctcccaagtcactctaagggttctatcaacatctttctttgaaaacagcccaaaaacatatttttaaaatgaaaaaaaaattcacaagagaatcaagatttggttttaatctattatttacatatttgtaaactgctgttaaaatgctctcaaaaatgttatttaggaaggcacaatttggtagcatcaattttttatttatagttttttctaaacaagatccgaag

SEQ ID NO: 156343 - DNA, 6001 bp, Homo sapiens
cctccggtctacagctcccagcgtgagcgacgcagaagacgggtgatttctgcatttccatctgaggtaccgggttcatctcactagggagtgccagacagtgggcgcaggccagtgggtgcgcgcaccgtgcggagccgaagcagggcgaggcattgcctcacctgggaagcgcaaggggtcagggagttccctttccgagtcaaagaaaggggtgacggacgcacctggaaaatcgggtcactcccacccgaatattgcgcttttcagaccggcttaaaaaacggcgcaccacgagactatatcccacacctggccttcggagggtcctacgcccacggaatctcgctgattgctagcacagcggtctgagatcaaactgcaaggccgcagcaaggctgggggaggggcgcccgccattgcccaggcttgcttaggtaaacaaagcagccggggaagctcgaactgggtgcagcccaccacagctcaaggaggcctgcctgcctctgtaggctccacctctgggggcagggcacagacaaacaaaaagacagcagtaacctctgcagacttaaatgtccctgtctgacagctttgaagagagcagtggttctcccagcacgcagctggagatctgagaacgggcagactgcctcctcaagtgggtccctgacccctgacccccgagcagcctaactgggaggcaccccccagcaggggcacactgacacctcacacggcagggtattccaacagacctgcagctgagggtcctgtctgttagaaggaaaactaacaaacagaaaggacatccacaccgaaaacgcatctgtacatcaccatcatcaaagaccaaaagtagataaaaccacaaagatggggaaaaaacagaacagaaaaactggaaactctaaaacgcagagcacctctcctcctccaaaggaacgcagttcctcaccagcaacggaccaaagctggatggagaatgattttgacgagctgagagaagaaggcttcagacgctcaaattactctgagctacgggaggacattcaaaccaaaggcaaagaagttgaaaactttgaaaaaaatttagaagaatgtataactagaataaccaatacagagaagtgcttaaaggagctgatggagctgaaaaccaaggctcgagaactacgtgaagaatgcagaagcctcaggagccaatgcgatcaactggaagaaagggtatcagcaatggaagatgaaatgaatgaaatgaagcaagaagggaagtttagagaaaaaagaataaaaagaaacgagcaaagcctccaagaaatatgggactatgtgaaaagaccaaatctacgtctgattggtgtacctgaaagtgatgcggagaatggaaccaagttggaaaacactctgcaggatattatccaggagactttccccaatctagcaaggcaggccaacgttcagattcaggaaatacagagaacgccacaaagatactcctcgagaagagcaactccaagacacataattgtcagattcaccaaagttgaaatgaaggaaaaaatgttaagggcagccagagagaaaggtcgagttaccctcaaagggaagcccatcagactaacagcggatctctcggcagaaaccctacaagccagaagagagtgggggccaatattgaacattcttaaagaaaagaattttcaacccagaatttcatatccagccaaactaagcttcataagtgaaggagaaataaaatactttacagacaagcaaatgctgaccgattttgtcaccagcaggcctgccctaaaagagctcctgaaggaagcgctaaacatggaaaggaacaaccggtaccagccactgcaaaatcatgccaaaatgtaaagaccatcgagactaggaagaaactgcatcaactaacgagcaaaatcaccagctaacatcataatgacaggatcaaattcacacataacaatattaactttaaatgtaaatggactaaattctccaattaaaagacacagactggcaagttggataaagagtcaagacccatcagtgtgctgtattcaggaaacccatctcatgtgcagagacacacataggctcaaaataaaaggatggaggaagatctaccaagcaaatggaaaacaaaaaaaggcaggggttgcaatcctagtctctgataaaacagactttaaaccaacaaagatcaaaagagacaaagaaggccattacatgatggtaaagggatcaattcaacaagaggagctaactatcctaaatatgtatgcacccaatacaggagcacccagattcataaagcaagtcctgagtgacctacaaagagacttagactcccacacattaataatgggagactttaacaccccactgtcaacattagacagatcaacgagacagaaagtcaacaaggatacccaggaattgaactcagctctgcaccaagcagacctaatagacatctacagaactctccaccccaaatcaacagaatatacatttttttcagcaccacaccacagctattccaaaattgaccacatacttggaagtgaagctctcctcagcaaatgtaaaagaacagaaattataacaaactatctctcagaccacagtgcaatcaaactagaactcaggattaagaatctcactcaaagccgctcaactacatggaaactgaacaacctgctcctgaatgactactgggtacataacgaaatgaaggcagaaataaagatgttctttgaaaccaacgagaacaaagacacaacataccagaatctctaggacgcattcaaagcagtgtgtagagggaaatttatagcactaaatgcccacaagagaaagcaggaaagatccaaaattgacaccctaacatcacaattaaaagaactagaaaagcaagagcaaacacattcaaaagctagcagaaggcaagaaataactaaaatcagagcagaactgaaggaaatagagacacaaaaaacccttcaaaaaatcaatgaatccaggagctggttttttgaaaggatcaacaaaattgatagaccgctagcaagactaataaagaaaaaaagagagaagaatcaaatagacacaataaaaaatgataaaggggatatcaccaccgatcccacagaaatacaaactaccatcagagaatactacaaacacctctacgcaaataaactagaaaatctagaagaaatggatacattccttgacacatacactctcccaagactaaaccaggaagaagttgaatctctgaatagaccaataacaggagctgaaattgtggcaataatcaatagtttatcaaccaaaaagagtccaggaccagatggattcacagccgaattctaccagaggtacaaggaggaactggtaccattctttctgaaactattccaatcaatagaaaaagagggaatcctccctaactcattttatgaggccagcatcattctgataccaaagccgggcagagacacaaccaaaaaagagaattttagaccaatatccttgatgaacattgatgcaaaaatcctcaataaaatactggcaaaccaaatccagcagcacatcaaaaagcttatccaccatgatcaagtgggcttcatccctgggatgcaaggctggttcaatatacgcaaatcaataaatgtaatccagcatataaacagagccaaagacaaaaaccacatgattgtctcaatagatgcagaaaaagcctttgacaaaattcaacaacccttcatgctaaaaactatcaataaaataggtattgatgggatgtatttcaaaataataagagctatctatgacaaaaccacagccaatatcatactgaatgggcaaaaactggaagcattccctttgaaaaccggcacaagacagggatgccctctctcaccgctcctattcaacatagtgttggaatttctggccagggcaatcaggcaggagaaggaaataaagggtattcaattaggaaaagaggaagtcaaattgtccctgtttgcagatgacatgattgttgatctagaaaaccccatcgtctcagcccaaaatctccttaagctgataagcaacttcagcaaagtctcaggatacaaaatcaatgtacaaaaatcacaagcattcttatacaccaacaacagacaaacagagagccaaatcatgagtgaactcccattcactattgcttcaaagagaataaaatacctaggaatccaacttacaagggatgtgaaggacctcttcaaggagaactacaaaccactgctcaaggaaataaaagaggatacaaaaaaatggaagaacattccatgctcatgggtaggaagaatcaatatcgtgaaaatggccatactgcccaaggtaatttacagattcaatgccatccccatcaagctaccaatgactttcttcacagaattggaaaaaactactttaaagttcatatggaaccaaaaaagagcccgcatcaccaagtcaatcctaagccaaaagaacaaagctggaggcatcacactacctgacttcaaactatactacaaagctacagtaaccaaaacagcatggtactggtaccaaaacagagatatagatcaatggaacagaacagagccctcagaaataacgccgcatatctacaactatctgatctttgacaaacctgacaaaaacaacaagaaaaacaagcaacggggaaaggattccctatttaataaatggtgctgggaaaactggctagccatatgtagaaagctgaaactggatcccttccttacaccttatacaaaaattaattcaagatggattaaagacttaaatgttagacctaaaaccataaaaaccctagaagaaaacctaggcaataccattcaggccataggcatgggcaaggacttcatgaataaaacaccaaaagcaatggtaacaaaagccaaaattgacaaatgggatctaactaaactaaagagcttctgcacagcaaaagaaactaccatcagagtgaacaggcaacctacagaatgggagaaaatttttacaatctacccatctgacaaagggctaatatccggaatctacaatgaactcaaacaaatttacaagaaaaaaacaaacaaccccatcaaaaagtgggtgaaggacatgaacagacacttctcaaaagaagacatttatgcagccaaaaaacacatgaaaaaatgctcatcatcactggccatcagagaaatgcaaatcaaaaccacaatgagataccatctcacaccagttagaatggcaatcattaaaaagtcaggaaacaacaggtgctggagaggatgtggagaaataggaacacttttacactgttggtgggactgtaaactagttcaaccattgtggaagtcagtgtggcgattcctcagggatctagaactagaaataccatttgacccagccatcccattactgggtgtatacccaaaggactataaatcatgctgctataaagacacatgcacacgtatgtttattgcggcactgttcacaatagcaaagacttggaaccaacccaaatgtccaacaatgatagactggattaagaaaatgtggcacatatacaccatggagtactatgcagccataaaaaaggatgagttcacgtcctttgtagggacatggatgaagctagaaaccatcattctgagcaaactattccaacgacggaaaaccaaacactgcatgttctcactcataggtgggaattgaacaatgagatcatatggacacaggaaggggaacatcacactctggggactgttgtggggtggggggaggggggagggatagcattgggagatatacctaatggtagatgacgagttagtgggtgcagcacaccagcatggcacatgtatacatatgtaactaacctgcacaatgtgcacatgtaccctaaaacttaaagtataat

SEQ ID NO: 156344 - DNA, 651 bp, Homo sapiens
cccgggccgacccacgcgtgcgcggacgcgtggggcagacattgaaagtctagtggtattttccagacatcctcatgtggtgccatattgttgaatggcacaccccataaacttagataatctaatttcttccatgcacactgtactccctaagggacagctattagatggccaggcctgttccaacccctggactttcatcactgtatggtgcagagcttttggtataaatgtgtaatcatatgactgagccaaaaaaagagagagtggtaatatatcaaaatttaaaaaaattttaatgagttataaatcttaatatagccatcttagccataaccacaaataaactcattttttctgttaaaatacttgacagagtccttgcaattgaatgtctttgttcaacaaaaactgtattaagtgttttaaatttaaaatctaatcttatgcaaatagctggtggtcaaaacctttttccatcaaaagaagatctttggtttgacttcatattctgggatgtttgtaggtacctggaatggaaacacaaaagtagccataaagactcttaaaccaggcacaatgtcccccgaatcattccttgaggaagcgcagatcatgaagaagctgaagcacgacaagctggtccagctt

SEQ ID NO: 156345 - DNA, 637 bp, Homo sapiens
tgaaaggagaccatgtcaaacattataaaattcgcaaacttgacaatggtggatactacattaccacccgggcccagtttgaaacacttcagcagcttgtacaacattactcagagagagctgcaggtctctgctgccgcctagtagttccctgtcacaaagggatgccaaggcttaccgatctgtctgtcaaaaccaaagatgtctgggaaatccctcgagaatccctgcagttgatcaagagactgggaaatgggcagtttggggaagtatggaatggtaccctggaattggaaacacaaaagtagccataaagactcttaaaccaggcacaatgtcccccgaatcattccttgaggaagcgcagatcatgaagaagctgaagcacgacaagctggtccagctctatgcagtggtgtctgagggagcccatctacatcgtcaccgagtatatgaacaaaggaagtttactggatttcttaaaagatggagaaggaagagctctgaaattaccaaatcttgtggacatggcagcacaggtggctgcaggaatggcttacatcgagcgcatgaattatatccatagagatctgcgatcagcaaacattctagtggggaatggactcatatgcaagat

SEQ ID NO: 156346 - DNA, 2526 bp, Homo sapiens
atgcactggaagcggccctggcaagtgggagggtatttgaccctggctgctaccgatactgtccaaatgctgaattacatgtcggtcagacagctcagctatttgaatttccccaacacgtggcagttcttgtcctggagccaaatgcccacacagcaagcatacccgtgcgttacacacacacatacacccccggtgctgggccagatggcatgctgtatctctaatcaaaggcgcactgcagctttgattggcactggccgtccagagaggaatgtgcatgtgaatttgaggcaagggtttgtggttaacgctcatgaaccatgggtaaatgaaaaggttgccaggcaggagccagaggatgctggcaggggtgctgttaatagggcctgggggtttagtccacgccttattcactggagtgagggtcctcaggctgcggccctaggtgatagggaccctcgctggctcccctaccatcacgctgctgccctgagcgggtcccacgctgctgccctcagcctggcccccagccggtcctctgcattagctgtcctgattgcccttctgccggctgcccagctgcaccatcatgtccccagaagcaaggcttgtgacattgcctatgtcgggggtcacaggagacaggtgtggtatggacaagaagatggacagcagatccttgtggtgcctgtgctcctgagtacaactcagcaaaaggtgtctgcactctgggcagacagattagaaatgggcactccttgcacgttcccttgcagcaaggttggcaccaccttctgtacatccctgctgggtttcaccttcccatcagcagtagcctggataaacgcaggaagtttactggatttcttaaaagatggagaaggaagagctctgaaattaccaaatcttgtggacatggcagcacaggtggctgcaggaatggcttacatcgagcgcatgaattatatccatagagatctgcgatcagcaaacattctaatggggaatggactcatatgcaagattgctgacttcggattggcccgattgatagaagacaatgagtacacagcaagacaagacccaaccagaagtagaggtcacaggagctcagcgatgaatccttatgggtccagagcagggagagggagagtggagagtggacttacactacagatggctgcaacacaggtcacagtgcaatggtcagcacatctagtgtctggtgaggcagtggcctggaatacttttcctactgccaatcaagaccggaaggagttagctgcccttagctgctcatgtccaagtactctttgttttatgctccttggcttatacccaacacttgatcatttgcaggtgagacagtcacattgtttaactgtttcctgtgcatggcagggtctgaagccattgttcttgtggctagccatcaacaaagctgaggaaatttgccttaccttgttgaagtattggcaagcagactgtgagctccttgccagtgcttatcagcatgcttggcacacctgtgcaaggactcagtcaagtaacttgtccattgcagacattgaaagtctagagctggtggtcaaaacctttttccatcaaaagaagatctttggtttgacttcatattctgggatgtttgtaggtacctggaatggaaacacaaaagtagccataaagactcttaaaccaggcacaatgtcccccgaatcattccttgaggaagcgcagatcatgaagaagctgaagcacgacaagctggtccagctctatgcagtggtgtctgaggagcccatctacatcgtcaccgagtatatgaacaaaggtggagatgagggcacaataagagaggaaataggacaggtgaaggctccgaggagggacaatatccccaaacccagtgctgcccatgcagcccagctcgtcatgtggcatgaagtcagactgacacgggccctctgccccttctgggggtggctggattcttggcatcatttctgtgttgagctacatcccacacatccgttgatcactcagaaaccaaagggaaaggaactcactgacgttgtacatagaagtcaattttctggggcacagagcagagtggagagtatttggatacagaggagtatgacgaagacgccaggtgcaaaacttcaaaagcaagcataccagggagtgtcaaaccctcaccaccatcatcacacaggacagcagctaaaggctgtgccacacccactcatggaagcacctgatgctatagatgggtacagaaaaattcttgtcaattttacaaaaatctacagtgcatttgcagtgactaacagtgattatgaatggcaaccaacacttgtggccataggctacaggtgtggggacccacagggaaccgaacggaggacccagaaaccacctacagaggtggtcactacacagctccagccccagccgtggctgctgagaggccatgttggccttgtgctgctagatcatcctatttttaaagaaaagccataa

SEQ ID NO: 156347 - DNA, 1005 bp, Homo sapiens; identical to SEQ ID NO: 130266

SEQ ID NO: 156348 - DNA, 764 bp, Homo sapiens
cgcggagccgtgggacgagggcggcgatggcgtcccatgtagagtgccgtcctctgggagtgtttgagtgtgaactctgtaccttgacagctccgtacagctatgtgggacagaagccccccaacacccagtcgatggtcctcctggaggaaagctatgtcatgaaggatcccttcacctccgacaaggacagattcctggtcctcggctcgtgctgcagtttgtgcagcaggctggtgtgtgtgggcccggtgggaatgcagtttattctactccaagagattctgcctcccttgtgtccgggagaacatcaatgcttttcctcaggaaattcggcaagacttggagaaaaggaaagctccatcaaagaggacccccagccagcccggttctcggacgtgagtgcaactggggctaggtcatcgggcggcaccctgcacagagctcctaggaccagcctgcgccaaggatgctgctgagctgggaaccgccatgcctggccttgtttttggaccactgggagcagcactgcagcccaggggagctggagtccagcttggagcagccacaggcccagggagctgtagcaagagggtagtccaaaggcagatgccagacaagacacagccaggaacccggccaggtccccccacatgcccctcagggcccaggcctgagtgagtgctgctcagatgtgactgagagggatgacctccttcagcagggcagctcctaagaggctgcgtgcaggtgcgtgtgggggg

SEQ ID NO: 156349 - DNA, 615 bp, Homo sapiens
  misc_feature (1)...(615): n = a,t,c or g
tgattttgtacatatttatttgaaaatatgctgtcaacatcatgacttttcaaaacttaaaaaaaaaacttctgcatgcatctcctaagaattagaacattatcctacgtaactcaattatcacttctagaaaaatcaaatataccacattatctactacccattccatcttcctatttccccaaatatccccccaaatgtctcttataggttttttttatgaatcagaagctaataaaggatcacactttccatttggttatgtctcttgtcttaatctagcagagaccactttttgttttactacatttgctttttgaaaagtccagaccagggccaaaatgcacaaactatggcttacaacatcacacccctgcgtagggccagtggaatgtgtgcaagatcagtttgggcttcattaactatgaagtagggggatagcaagaaggctctttttccatatgaaagaagtttgagggatggcnagtgcagtgcctggaatgtttggccgagtctgntgaggggccccaaggctggttgcagctcctcgacctggatcggttgggtcagtcgcttgaagaacatcaccctgggatggatgccagtgatcctcgc

SEQ ID NO: 156350 - DNA, 3729 bp, Homo sapiens
gcttatggcggcgctggagagggggcgctgagctgttgggtatgaagtgtaacagaacagactttaccacctgaaactgctgcttcaagttcagatcaggcaaggaacaaacctcgtaacaactaacaagaccaaagaagagtacacttaagttgaagacacaacacttgatctgaaacaagaagtttgtgcctactcaacagctttgaaagagcacttcccaacgctgctagtagtctttgttttcttcagtgctgtactgtgagattgcccggtacagcagcagttgtattctttattagcttggtagatcattttctctcgctcttttttttaatactagcaactttcatcctttgaaacgtgtgctgaaaaagaagaatcagcaaatactactgaaagtgcaatatttgagtatcactgcgagatgagctttgatccaaaccttctccacaacaatggacataatgggtaccctaatggtacttcagcagcactgcgtgaaactggggttattgaaaaactgttaacctcttacggatttattcagtgttcagaacgtcaagctagacttttcttccactgttcacagtataatggcaacctgcaagacttaaaagtaggagatgatgttgaatttgaagtatcatcggaccgacggactgggaaacccattgctgttaaactggtgaagataaaacaagaaatcctccctgaagaacgaatgaatggacaagttgtgtgcgctgttcctcacaacttagagagtaaatctccagctgccccgggtcagagtccaacagggagtgtatgctacgaacgtaatggggaagtgttttatctgacttacacccctgaagatgtcgaagggaacgttcagctggaaactggagataaaataaactttgtaattgataacaataaacatactggtgctgtaagtgctcgcaacattatgctgttgaaaaagaaacaagcccgctgtcagggagtagtttgtgccatgaaggaggcatttggctttattgaaagaggtgatgttgtaaaagagatattctttcactatagtgaatttaagggtgacttagaaaccttacagcctggcgatgatgtggaattcacaatcaaggacagaaatggtaaagaagttgcaacagatgtcagactattgcctcaaggaacagtcatttttgaagatatcagcattgaacattttgaaggaactgtaaccaaagttatcccaaaagtacccagtaaaaaccagaatgacccattgccaggacgcatcaaagttgactttgtgatccctaaagaacttccctttggagacaaagatacgaaatccaaggtgaccctgctggaaggtgaccatgttaggtttaatatttcaacagaccgacgtgacaaattagagcgagcaaccaatatagaagttctgtcaaatacatttcagttcactaatgaagcccgagaaatgggtgtgattgctgccatgagagatggttttggtttcatcaagtgtgtggatcgtgatgttcgtatgttcttccacttcagtgaaattctggatgggaaccagctcccatattgcagatgaagtagagtttactgtggttcctgatatgctctctgctcaaagaaatcatgctattaggattaaaaaacttcccaagggcacggtttcatttcattcccattcagatcaccgttttctgggcacggtagaaaaagaagccactttttccaatcctaaaaccactagcccaaataaaggcaaagagaaggaggctgaggatggcattattgcttatgatgactgtggggtgaaactgactattgcttttcaagccaaggatgtggaaggatctacttctcctcaaataggagataaggttgaatttagtattagtgacaaacagaggcctggacagcaggttgcaacttgtgtgcgacttttaggtcgtaattctaactccaagaggctcttgggttatgtggcaactctgaaggataattttggatttattgaaacagccaatcatgataaggaaatctttttccattacagtgagttctctggtgatgttgatagcctggaactgggggacatggtcgagtatagcttgtccaaaggcaaaggcaacaaagtcagtgcagaaaaagtgaacaaaacacactcagtgaatggcattactgaggaagctgatcccaccatttactctggcaaagtaattcgccccctgaggagtgttgatccaacacagactgagtaccaaggaatgattgagattgtggaggagggcgatatgaaaggtgaggtctatccatttggcatcgttgggatggccaacaaaggggattgcctgcagaaaggggagagcgtcaagttccaattgtgtgtcctgggccaaaatgcacaaactatggcttacaacatcacaccccctgcgcagggccaccagtggaatgtgtgaaagatcagtttggcttcatttaactatgaagtaggagatagcaagaagcttctttttccattgtgaagaaagttcaggatggccattgagctacaggccaggagatgaggtggagttctccagtgattcttaatccagccgcaactggcaaagtgcaagcgccctgtaaatgtttggcgaagtctgtgaagggcccccaaggctgttgcaagctccctcgacctgatcgggttgggtcaatccgcttgaagaatatcacctctggatgatgccagtgctcctcggcctaatggttccttcgtcagcccaagggggaccagataacgtcaatggggttttggtgcagaaagaaagatcccgtcaagctggtgtcattgactaaccacatccaccaaagcacaccatttaatcccactatgattcaagttggggggaatctcggtgaagggttctgaatatctccctcttcatccctcccgaaatctgggattacttattctattgaggctattacaccagttttacacacctctcctcggtgttatgtttaaaaaaataaataaatttaaggaaaaccattttaaataatgcacagttgcagccggggaaaaacttaaggtgggcgccttatagtatcaattttaggagctttatcttggtgcatttaacgcaactgggtaattgcagaatccactttgcctgtgtaagtggaaaaatataggcttgtttatctttggttgccctatggaaattctggcactttttcattatatactctaccttcattaattacttctgggcaagatgttctgccttaggcactcagttgcattcttttcctttttcttcctgttcattatgctttaattctgaggaccatatgagggtagaatatattatcttttaaaaattacaaaaatttgtataggcaaaccatttcttaaagttgatgggccaaattttaaaatgttatttttcatatcatttataatcttgtcacaatccacttaaagaagtttggttatatttcagtgaaaattttcttccagagtaggttttttttcgtgggttgggggggtaactttactacaattaggtaagtatggtgcagaatttcatgcaaatgaggagtgccagcagtgtgataatttaaacatatttaaacaaaaacaaaaaaatgaatgcacaaacttgctgctgcttagatcactgcagcttctaggacccggtttcttttactgatttaaaaaaaaaa

SEQ ID NO: 156351 - DNA, 1078 bp, Homo sapiens
  misc_feature (1)...(1078): n = a,t,c or g
tcaggtacctccagagctttgaggggtggggcagagagtcagtgggactgggaggactagggcagtgtcccctcatccctgggacggttttcctgaatggcctggcaggctgggggctgtcgcgtcaacagccaacctcctggatgatgtggagggccacgcgtgtggggaggctggaggggagatcgaagctccaacttctctatgatcggggatctcccagcggagttcctgggtgtttcatgggagcacccgccctgtcccctggaggaacacactgagggttggggggcgggtgacccaaagatatggatccccctgacttggtcgacattgcttccccctttctgcaacccctgagaaggggccctagccctacttccacctagatgagtacctgtagcatgaagtgccaggtactgtttctggggaatattcttttgggtgtgaggtggcagacaggcctgccccctgtgggagcccgtcggccgtgagaaccaagcactgggcagcttcagtctgtgggcccagaggcttcttcaactttcacccagtcccttccaaaggccacgtgggcaggaagactctgcctcagaccctcctgggcccgcagctgaaaccctgatcctcatgccacattcgagggtcaggaggcatccagaaacaaggactggaagggcctcagaggtcatctagatagtccagcttttccatcccattttatagatgaggaaatttgaggcccaaagacgaggggagaacttgtccaaggtctcagagctcagtggtggaccctggccagcacctgagtgtcctgctgcctctctccctggacccatgcatcgtctacctggggggatctgcatgggtcccaaatgaagggggcagagagagtcaggtcagctctcttgcccagtctaggggccgtgcctgagcgaggccctgcagggttagaggatgaggcagcttccctctccttttcagatgaagacttccgggggcaggcgtcaggaggcacccaaggttggagggaaggcctgcgagaaaggacagttaagagattgccagcagttntttc

SEQ ID NO: 156352 - DNA, 602 bp, Homo sapiens
gccttattcagggacaagctgaaacacatgggaaagtccacccggaggaaactgtttgaacttgcccgagccttctcagagaagaccaaaatgaggaagtcaaagaggaaacacttgttgaagcatcagtccaggctgggggctgccgcgtcaacagccaacctcctggatgatgtggagggccacgcgtgtgatgaaaaacttccggggccaggcgtccaggagggcaccccaaggtggaggaaggccctgccgagaaggacagtaagagatgcccagcagctcttccttgcccagagatgatctgtacccggtggggggcagctggaaagcaacactggcccccagctgaagggcccagctgcagccagacagatggtgcttgagaaccgaggcccggtgatcctccagccacagtccagcccaaccactgccactttccatgggacttagaacttcggagttgctgccttgcaattggaggaaggacctggggcccctataggcagcagccaattacagccccttttgtagccaggcgttcctatggtcaaagagtggaaatgcaggaaccaacctccctttaaaaaaaaaaaaaaaaa

SEQ ID NO: 156353 - DNA, 775 bp, Homo sapiens
  misc_feature (1)...(775): n = a,t,c or g
tttttttttttttttttgacagacatacttttattcttttatttttgagatggagtttcactgtcacccaggctggagtgcaatggagcgatcttggctcactgcaacctccacctcccaggctcaagcaattctcctgcctcagcctcctgagtagctgggatcacaagtgcctggcaccacgcccagctaatttttgtagctttagtaaagacggggtttcaccatgttggccaggctggtctcaaactcctcacctcaggtgatccacctgcttcggcttccccaaagtactgggattaccaggcgtgagcccactgcgcccggccttaacataggattttcatcctagaatgacttttcccccnaaaaagattcaatccttaggccctcttgctgtaggcaagttcccatgggactgccacaaaaagaggcagggaaacagtcccccatggggagattgtaagtttctttaaaaataggcttcctaggcccaggaatggtgtaaacatgcttgtaatccccagcaggttaagaagccaaggcagaggatcccttgagcctaggcattacagaccagcctgggcaacacagggagaccctcctgtctctataaaaaatcaaaaaagtttgccaggcatggtagcatgcgcctgtggtcccagctactcatgaggccgaggtgggaggaactctagagcccaggaggttgaggctacagtgagccacagttatgccactgcaatcctgcttgggtgacagagcgagactttgt

SEQ ID NO: 156354 - DNA, 325 bp, Homo sapiens
atggggacgagcagtggatcctggccgaggtggtcagttacagccatgccaccaacaagtatgaggccttgttccagaaggagcagctcgtgctggccctgtatccccagactacctgcttctaccgcgccctgatccatgcgcccccacagcggccccaggatgactactcggtcctgtttgaagacacctcctatgcagatggctattcccctcccctcaatgtggctcagagatacgtggtggcttgtaaggaacccaagaaaaagtgatgccgcctggcagactcgccatcccccaacgacacagggcaggacagcagagg

SEQ ID NO: 156355 - DNA, 523 bp, Homo sapiens
cggccgcggcggatgggaagccgtgcacgacgagcacaatctccatggggaggagaacaggaatgttcctgtgagccccgccgcgccctaccgccagcgcagcccagcatcgcgggtcccctcctatcccaccggagaacggggtcctcactcccagcttcagccgagccctggccccgcaactgcctgaaggcacgccccctgcacctgcccacctcaggtcccgcctccagcccagtggccaagatcgcgggtctctacaatgacttggagccaccccggaagaccatgcgcagaggggtgctgatgaccctgctgcagcagtcggccatgaccctgcccctgtggattgggaagcctggtgacaagagactacgtggccagacctggagacaaagtggctgcccgggtgaaggccgtggatggggatgagcagtggattctgggcgaggtggtcagttacagccatgccaccaacaagtgagtgacaccagccccggggctgctccctgcccttcctgtc

SEQ ID NO: 156356 - DNA, 754 bp, Homo sapiens
ctaaattgctggtagctgacgaatattttgtaagtaatggcaaactgtcagctcatcgtatccagtcgtcgcgtatccggtgaacaaaacgcaaaatcgtctgccaatttttctccagcagcagaatactctcgttatgcagcgatattttttgctttcatgataaatatcgaatgaacgacgaatgaggatcaccgagcagacagagtcatgattatcccttataaaaggttgtacagactgaagagcgcaaaaaagcgaatcagtttgatgcgccaatctctatttatgaagttcacctgggttcctggcgtcgccacaccgacaacaatttctggttgagctaccgcgagctggccgatcaactggtgccttatgctaaatggatgggctttacccacctcgaactactgcacattaacgagcatcccttcgatggcagttggggttatcagccaaccggcctgtatgcgccaacccgccgttttggtactcgcgacgacttccgttatttcattgatgccgcacacgcagctggtctgaacgtgattctcgactgggtgccaggccacttcccgactgatgactttgcgcttgccgaatttgatggcacgaacttgtatgaacacagcgattcgcgtgaaagctatcatcaggactggaacacgctgatctacaactatggtcgccgtgaagtcagttactttctcgtcggtaacgcgctttactggatgaaccgttttggtattgatgc

SEQ ID NO: 156357 - DNA, 2712 bp, Homo sapiens
atggggcttgatgatggcgtggcgcgcaatctcgggctggccttgtcgcttgcgcgtctggcagacgctgtcgctggcgatgtcatcagtgcgctgctggtgaacgctgtggggattatcgggcttatcgggttgttcgcgaccgctgtggccaaaattgtgggggagcggtggttcgccagacgccattttttcgatattgcgccgtggatggaggaaatcgccatcaagaaacgcggcatgaagttgatgcgccacttcactggcgaccgcagatttgccgctgcccgatacgcccatcaagacgtaaatgtggtgatcatggttagtcgtgctcaaagtggtgcccccacaatacaagaattaaaaatgttacgggtaactgttatcggtaacattgtccagccggacaatatcagaagcaatatccatccatgccttaagtgtataagtattcgccacgaatacgcgccagcaggcgttcagcgccaatactgcccatccgctcacgcggcgtcagcacgctcgcaagtcgtggctccatcacctgaccaatgtcatgaccgtggaaaccggcaatcgccatatcgtcaggaacttttaaccccagacgctgacattcaaacgccgcgccgaccgccaggtcatcattcgtacagaacacgccatccagctgcggatattcccgccgcgcctggcgaatcagttcaataccggaagaaacagaccgaacttcataccggaatattcaatgtggtaaccatccgccagttcctgctcggcttccggctggtcaaacgggtgacggtgacataccgccacgcccgcgatggcaaagcccgcaaacagcaccgcgtaaaccgccagacctgccatcatcaggaagaacaaaatcccgatgttcaggtcggcaaccacccaacccggactgactggcacaatcgcaaaggccagcagcagcgaggtaaaggcaatcatcggtgccagggtaaagatgacgcgatccgagaatttcgggatccagtcttctttaaagaacattttgatcatgtccgcaaccagctggagcgaaccgccccagccaacacggttaggtccgtaacggttctggaacagacccagcaggcgacgttcgccaaagctcatgaatgccccgcaggtgacaaccaccagcaggatcaccaccgctttgaggatgatcctcaagatgcgcgccagccagcaccggagcatgccgacatttcctcggaagccacctgcctggcggcaggcctcggcgaattcaccggggcgggacgggatatgggcggtctgggcttctggtacaagtggaacctcggctggatgcatgacaccctggactacatgaagctcgacccggtttatcgtcagtatcatcacgataaactgaccttcgggattctctacaactacactgaaaacttcgtcctgccgttgtcgcatgatgaagtggtccacggtaaaaaatcgattctcgaccgcatgccgggcgacgcatggcagaaattcgcgaacctgcgcgcctactatggctggatgtgggcattcccgggcaagaaactactgttcatgggtaacgaatttgcccagagccgcgagtggaaccatgacgccagcctcgactggcatctgttggaaggcggcgataactggcaccacggtgtccagcgtctggtgcgcgatctgaacctcacctaccgccaccataaagcaatgcatgaactggattttgacccgtacggctttgaatggctggtggtggatgacaaagaacgctcggtgctgatctttgtgcgtcgcgataaagagggtaacgaaatcatcgttgccagtaactttacgccggtaccgcgtcatgattatcgcttcggcataaaccagccgggcaaatggcgtgaaatcctcaataccgattccatgcactatcacggcagtaatgcaggcaatggcggcacggtacacagcgatgagattgccagccacgttcgtcagcattcactaagcctgacgctaccaccgctggccactatctggctgggcgtcaacttcacacttttctccgctcatgccgagcgggtagaactgtgtgtctttgacgccaatggccaggaacatcgctatgacttgccagggcacagtggcgacatttggcacggttatctgccggatgcgcgcccgggtttgcgttatggttatcgcgttcatggcccctggcaacccgccgaggggcatcgctttaacccggcgaagttgttgattgatccttgcgcgcggcaaattgacggggagtttaaagataacccgctgctgcacgccggtcataatgaacctgactatcgcgacaacgccgccattgcgccgaaatgcgtagtggtggttgatcactatgactgggaagatgatgccccgccgcgcacgccgtggggcagcaccatcatttatgaagcccatgtcaaaggattaacaaacttgcacccggagatcccggtcgagatccgtggcacttataaagccctcgggcatccggtgatgatcaactatttgatacaattgggcattaccgcgctggaactgctgccagtggcgcagtttgccagtgaaccacgtctgcaacgcatggggctaagtaactactggggttacaaggccggtggcgatgtttgcgctgcatccggcgtatgcctgctctaa

SEQ ID NO: 156358 - DNA, 925 bp, Homo sapiens
ggaacgcgcctgctcccctcgtcgcagtttccagcccgacgagcttgttttgtcccggactcggtgcccctgtagacaatgtttcttcttgtctgccgattcccgcattgcagagcttctgacagagctccatcagctgagcaaacaaacccaggaagagcgttcgcggagcgaacacaacttagtgaacatccagaagacccatgagcggatgcagacagagaacaagatttctccctattaccggacaaagctgcgtggcctctacacaaccgccaaggccgatgcagaggctgagtgcaacatccttcggaaagctctggacatgatcgcggaaatcaagtctctgttggaagagaggcggagtgcggccaagattgccggtctctacaatgactcggagccaccccggaagaccatgcgcagaggggtgctgatgaccctgctgcagcagtcggccatgaccctgcccctgtggatcgggaagcctggtgacaagccctctcagccttccagccccctcgttttggctgcctctaaggccctccaggtcctcctgggcttcctcctctacaatcttccctgtctttcccaccgccaccacccccagttcctcagccgcctgcgcctcccgctctacagtggggactgcatctcccaggagtgcctcaacctggtgttcctgctggcagacgtgtggttcggctttctgccaagcatctacctcgtcttcctgatcattctgtatgaggggctcctgggaggcgcagcctacgtgaacaccttccacaacatcgccctggagaccagtgatgagcaccgggagtttgcaatggcggccacctgcatctctgacacactggggatctccctgtcggggctcctggctttgcctctgcatgacttcctctgccagctctcctga

SEQ ID NO: 156359 - DNA, 1504 bp, Homo sapiens
atggcagttggggttatcagccaaccggcctgtatgcgccaacccgccgctggtctgaacgtgattctcgactgggtgcaagcccacttcccgactgatgactttgcgcttgccgaatttgatggcacgaacttgtatgaacacagcgatccgcgtgaaggctatcatcaggactggaacacgctgatctacaactatggtcgccgtgaagtcagtaacttcctcgtcggtaacgcgctttactggattgaacgttttggtattgatgcgctgcgcgtcgatgcggtggcgtcaatgatttatcgcgactacagccgtaaagagggggagtggatcccgaacgaatttggcgggcgcgagaatcttgaagcgattgaattcttgcgtaataccaaccgtattcttggtgagcaggtttccggtgcggtgacaatggctgaggagtctaccgatttccctggcgtttctcgtccgcaggatatgggcggtctgggcttctggtacaagtggaacctcggctggatgcatgacaccctggactacatgaagctcgacccggtttatcgtcagtatcatcacgataaactgaccttcgggattctctacaactacactgaaaacttcgtcctgccgttgtcgcatgatgaagtggtccacggtaaaaaatcgattctcgaccgcatgccgggcgacgcatggcagaaattcgcgaacctgcgcgcctactatggctggatgtgggcattcccgggcaagaaactactgttcatggcggccaagattgccggtctctacaatgactcggagccaccccggaagaccatgcgcagaggggtgctgatgaccctgctgcagcagtcggccatgaccctgcccctgtggatcgggaagcctggtgacaagcccccacccctctgtggggccatccctgcctcaggagactacgtggccagacctggagacaggttgcttgcccggttgaagcccttgaatggggaacgagcagttgattccttgcccgaaggtggtcaagttacagccattgccacccaacaaggtatgaggtagattgaccatccgattgaagaaaggccaaagagagacacacccttgagccggcgccgtgtcatcccgctgccccaagtggaaggcccaacccggagacggaccctgaggcctttgtccaagaaggagcagcttcgtgctggccctgtatccccagactaccatgcttctaccgcgcccttgatccatggcgcccccacagcggccccaggatgactaattggtcctgtttgaagacacatcctatgcagatggctattcccctcccctcaatgtggctcagagatacgtggtggcttgtaaggaacccaagaaaaagtgatgccgcctggcagactcgccatcccccaacgacacagggcaggacagcagaggacgtgctgggattaaacacattccccctctaaaaaaaaaaaaaaaaaaaaaaaaaaaaaaaaaa

SEQ ID NO: 156360 - DNA, 506 bp, Homo sapiens
cctctgctcccgggttcaagcgactctgctgccacaccacacgcccaactaattttttgtatttttagtagagatggggtttcaccatgttggccaggctggtcttgaactcctgaactcaagtgatctaccctcctcagcctcccaaagtgctgggattacaggtgtgaaccactgtgcccagccttttttttttttttttctgagacggagtctcgctctgtcgcccaagctgtagtgcaatggtgtgatctcagctcactgcaacctccacctccccatttcaagcgattcttctgcctcagcctcttgagtagctgggattacaggcacgtgccaccatgcctggctaatttttgtatttttagtagaggcagggtttcaccatgttggccaggctggtcacaaactgctgatctcaagtgatccacctgcctcagtctcccaaagtgctgggattacaggcatgagccattgcatccagcctcattcccctgtgttttcta

SEQ ID NO: 156361 - DNA, 4252 bp, Homo sapiens
  misc_feature (1)...(4252): n = a,t,c or g
tctgcaaatgctacaacaaagaccagcgaaacaaatcacacctcaaggccccggctgaaaaacgtggacaggagcactgcacagcagttggcagtaactgtgggcaacgtcaccgtcattatcacagactttaagggaaaagactcgctcctcatcggacatcctcatccacagtgacctcccagtgcagggtcaggaacagcagaacccagagcagctcgggggtccagagagcaccggacaaagggcttcctccccgttccctcccaaccccaaagggcgacatgtcaagcagtcaatgatgaaatctttcctgaaattgccacatggaattgtgaaaaactatgaatcagggtatgaaattcaaaacctcccacctgcccatgctgcttgcatccctggagaatcttctgtggacatcgacctcttagtgatgctgcccaggataatttctgcttgccatgggcatctggccaccaaggaatttcgcaccctgacgattactcttgacacttttaatgtattccattgttttatatgattttcctaacaatcatttataattggatgtgctcctgaatctactttttataaaaaaaaaaaaaaaatctgctgtgcacaattttccatgtaccattacaactggttttttgtttttgttttgttgccggtggggagggctgggagggggagggaacttttatttattgtgttcacaaactccatcctttcagcatatccttttaagtttagttctttcttccagttatactatgtactatcagttttgatataactatatatatataaatataaaattatatataaagggttatttgaaaccaatccatggcaaacgctggggcttgatacactgtgaagtgaatacaacattgaacagttacagatctgggacagtcccttctatgaaagtgctgaaatttaattaaaaacaggcttacatgaagtatgttccaatccatgtgggaacttgactctctcatctgtctaaagagtactggacgatataaaaatataaatttttaaaacaagtggacctcaaatttaaaagactgccccccngatagcccggcatttggcaatggaataactgacaaatccacaagtggtttagttgggcagggctttgatcattcaaaagtaacctaaagtagcctcccagaatgccaagtattcgtggtaaattacggttacatgttatcatttgctgttctaacataggcactcatggaaaatatgggtattctgtaacttggaattccatccattttccagacggtctactcatgtctgagggtaaatctaggaaattgtcttaggttttagggattggaaacagtctataaaactgtatttttgggtccatcccaggaaagctagtcccctgtttcctccctttcctaacatgacattggcagtgggtgggtttcctgtaattaaaatttggtttgccctcatgtcccctttgtcctgataaaccttccactctacccgattcaagttgtgaagcattcctttttttccctcctcaaaaccctacctatgatttgttttaactgaacaaaggttatcaacccacacatccaggtcctggacatgggagcttttcagtgtttggagacatttctcaatcccctgctgtggtaggaactccagtggtgaacggcttgcgcgcctgcagccagagttgcagggaaagctcgtacttactgcgagcagcatgtaatcttttttcttcctggacataaagatagcttgagtaaactgttctatttcattctcttcactctttttactgtcttgcaaaaaaaaaaataataataataataatcaaagaccactaataagattccacctctccttattaaaataattttttaaaattttgttttgcttttgtttggatgtggggtctctcttctatttgacttttacatttagatacagagtttgtagtacttcagagacatttcaagcatgagaatttgaggttacctctctttatttgacctttagggactcacgggagggcagcctgatttgtaatgaagcaccacattttggtgttaaaaacctggtttgcttaataatagcagtaatttctgtctgtggaggcaacaaataaaaaaattaacagcttgaattgagtagccaacaggaaaggttcctttcacatttacattaaaactattctgtagtcactaatgtaccataatttaaattcttttctcaaaggtatagattataaagcagtgccatttgttgctgtggtcctattctcaaatgcatggacaatgttcccccctttttaaaataatgcttgtgtctgggatgcaagctttgcttatctttttaaatacatttttaaagtatttattaatgaaccaaaggaaatcagatgctttctataagcatcagaatatataatacatagtgatttgactatgaattttaaatccacattttaatattggtgggatattgcaaagacattccttctaaagttttaatattccttttattaagggtctcagggagggtaaattagtcagccatatttattttccagaggtttaaggaaattgctgtttttaactttttggaaaaaacttaaatgccacccaaactcatgtaggggtggcactgcttattggaacccattaactgttggggatggcactttgttcagacacactgtgtactttttcaaaaactagtttcatgtaaagtgattggaccccatagattagtgggaaaaagctgattaaccagctactcatagggctgctaattcattcatgccaatgttttggtttttcagttttgcctccgtgataaattaaagaatggggaggggtgaaggaaggggaagaagattgctttagaacaagtgggcatgaaattacccatctttgtaggaaaccgcagctaacagtggggagttatctaaggcaatcagatgttacagggccagccctttagctgctgtgggtgtattctgttgggtagtgaggtagtaggtactttatagacttttaattttgggaaattgatgacatccctcagggcatgtattctggaaatggaattcctgtaacttcctgtgttctggcagtatgcccctaccattagtagggcagcgtgtaaaaaccactagtgtaggattataaaggatatacattaaaagaggaccacaaatacttggtatttactggcacagaaagcagggtaaacgaacaaaaagcacagtgttaccgcttgcaagtttccatttgtttttaataccacggcaatctttcacacttcgtgcgtgtgcgcggcacacaggagctttaccctgacttgctctgcttgagtcatgcagttacaaaaaaaaaaggacatcttggacacccacacaatatttctaatccaaaacctttcagtttcaatctggatatttaaaaacattggcagaagcctctgtgagtttagttccactaagatgtttcacctgccttatcaagaccattgctcggtctacttttttaagctaccgtatcttaaattattgaaaatttattaattgctgaatatataataaccttttgcttggatgtaacccgaaaatggtttaagagccaacatttagagtatggacaatgggagctgaacagtttttaatgcgcaagcagttctgttcttgtgtatgacttgtaacccttaatttaccgtgtaaaaggatggttaccattatttcccttaggctttgtttgttggagaccaaatagagaatgcttgttaagtatgtcaaaaacaatcttatctttgtggaatttttggtaaatggtattataccgagctataatttttccatttgccccagaaaagacaggcttgttataacggcttttgggaagtttctggctctgtaaatgtctttaggagctgacagtctgttaggtttgtttttttccttcatgcctaaagtgtcagttggtagttttgagaactggtcaaaaattcacagatcttaaaagttttgagggaaatattatattagacactgctcttagatctagcaaataaaagatgttaatatattcctgttactggcatgtgcacgactatgttattagaagccactttatcattttcctgctttaaatagaaatgtctatttatgaattctgcttgtagttttttcacaaataaaatagtaaaatttacattggaaaaaaaaaaaaaaaaa

SEQ ID NO: 156362 - DNA, 918 bp, Homo sapiens
atgggaaaggagaagactcatatcaacattgtcgtcaatggacacatagattcgggcaagtccacctctactggccatctgatctacaaatgtggtggcatcaacaaaagaagcattaagaaatttgagaagaaggctgctgagatgggaaagggctccttcaagagttttgtctgtgactcgtcctggtatatcccaggacacagagacttcatcacaaacatctttacagggacatctcaggctgactgtgctgtcctggttgttgctgctggtgttggtgaatttgaagctgccctgcttctccaggatgtctacaaaattggtggtattggtactgttcctgatggccaagtggagactgttgctctcaaacctggtgtggtgatcacctttgctccagtcaacactacaactgaagtaaaatctgtcaaaatgcaccatgaagctttgagtgaagctttttctggggacaatgtgggcttccatgtcaagaatgtgtctgtcaaggatattcattgtagtaacaatgctggtaactgcaaaaatgacccaccaatggaagcagctggattcactgctcaggtgatctatcctgaaccatccaggccaaattgccacatggctcacattgcatgcaagtttgctgagctgaaggaaaagattgatcgctcttctggtaaaaagctggaagacggccctaaattcttgaaatctggtgatgttgccatcattgatatggttcctggtaagcccatgtgtgttgagagcttctcagactatccacctctgggttgctttgctgcttgtgatatgagacagacagttgcactgggtgtcatcaaagcagcggacaagaaggcagctggagctggcaaggtcaccaagtatccccagaaagctcagaaggctaaatga

SEQ ID NO: 156363 - DNA, 762 bp, Homo sapiens; identical to SEQ ID NO: 150582

SEQ ID NO: 156364 - DNA, 706 bp, Homo sapiens
ttcgctgtcacgatttcgtggtgtcgtgaaaactacccctaaaagccaaaatgggaaaggaaaagactcatatcaacattgtcgtcattggacacgtagattcgggcaagtccaccactactggccatctgatctataaatgcggtggcatcgacaaaagaaccattgaaaaatttgagaaggaggctgctgagatgggaaagggctccttcaagtatgcctgggtcttggataaactgaaagctgagcgtgaacgtggtatcaccattgatatctccttgtggaaatttgagaccagcaagtactatgtgactatcattgatgccccaggacacagagactttatcaaaaacatgattacagggacatctcaggctgactgtgctgtcctgattgttgctgctggtgttggtgaatttgaagctgtgatcttcaagaatgggcagaacccgagagcatgcccttctggcttacacactgggtgggaaacaactaattgtcggtgttaacaaaatggattccactgagccaccctacagccagaagaaatatgaggaaattgttaacgaagtcagcacttacattaagaaaattggctacaaccccgacacaagagcatttgtgcccaatttctggtttaaatggtgaccacatgctggagccaagggctaacatgccttggtttaagggatggaaaagtcaccct

SEQ ID NO: 156365 - DNA, 1059 bp, Homo sapiens
caatctgaacagccttgcgccctgccttccagggagtccaccaaattgggtggtattggtactgtctcttctgccccgatggaaacctggtttctccaaccccggtatggtggtcacctttgctcccagtccacggtaacaacggaaagtaaaattctgcgaaaatgcacccatgaagctttgaagtgaagctctttctggggaacaattgggggcttcaaatgtcaagaatgtgttctgtcaaggaatgtttcgtccgtggcaaacggttgctgggtgaccagcaaaaaatgaccccacccaatgggaagcaagctggctttcactgctccaggtgattatccttgaaccatcccaggccaaaataaggcgccgggcctatgcccctgtatttggattgcccacacggctccacattgcatgcaaagtttgctgagctgaaggaaaagattgatcgccgtttctggtaaaaagctggaagatggccctaaattcttgaagtctggtgatgctgccattgttgatatggttcctggcaagccccatgtgtgttgagagcttctcagactatccacctttgggtcgctttgctgttcgtgatatgagacagacagttgcggtgggtgtcatcaaagcagtggacaagaaggctgctggagctggcaaggtcaccaagtctgcccagaaagctcagaaggctaaatgaatattatccctaatacctgccacccccactctttatcaggtgtgggaagaacggttctcagaacctgtttgttttcaattggcccatttaaggttaagtagtaaaagattgggttaatgataaccaatgcatcgtaaaaacctttcaaaggaaagggagaatgttttgtgggccccttttgggtttatttttttggcgcggggccgttttaaagttattaagttttttaaaatcccgacttttttaatgggaaccaacttgaccaaaaaatttgtcacaaaaattttgggaacccattaaaaaaggttaaatgagaaaaaaaaaaaaaaaaaaaaaaaaaaagggcggccgct

SEQ ID NO: 156366 - DNA, 477 bp, Homo sapiens; identical to SEQ ID NO: 144632

SEQ ID NO: 156367 - DNA, 1131 bp, Homo sapiens
gagatggagtctcgctctatcgcccaggatggagtgcagtggctcaatctcggctcactgcaaactccgcctcccgggttcacaccattctccggcctcagtctcccgagtagctgggactacaggcacctgccaccacgcccggctaatttttttgtattttcactggagacggggtttcactgtgttagccacgatggtctccatctcctgacctcgtgatctgcccacctcggcctcccaaagtgctgggattacaggcgtgagccaccgcgcctggccaaaatgcagacattttattagggggataaggagggcaaggtaaagcttatggaactgagtgttagtgactttggcatttgtgtagctgagcacagcaagggaggggttaatgcagatggcaagtgcaccaaggagaaggcaggaacactggagcctgcaataagggaggagagaggactggagagtgtggggaataggaagaagaaatttccctttagactaaccgaatatattggggggaggaatagaggggaggtgtgcaggaaccagcaatgagaaggccagggaaaagaaagagctgaaaattgcaggaaagccggaagagttagaacctttttggatacagcagaagaaaccagccggctccacttaccgaccctgcccccccggttccgatgtccttccaagaattgaagtctttcccctggtgatggtcccctgccctgtctttccagcatcccactctgtcttgtcctccctggaagtgtatctcaagtcagccagtggctttcttgatgatgggcggttggaggtggtggttatagtgttgatggatccccttttaggttattttaggggtatatgtccccctgctttgaaccctgaaggccaggtaatgagccatgggccattgtccccagctgaggaccaggtgtctctaaaaacccaaacatcctggagagtatgcgagaacctaccaagaaaaacagtctcattactcatatacagcaggcaaagagacagaaaattaactgaaaagcagtttagagactgggggaaggccggatctctagagccatcctgctgaagtgccctgtgtgtaagtcctaataaactcacctactcacc

SEQ ID NO: 156368 - DNA, 508 bp, Homo sapiens
  misc_feature (1)...(508): n = a,t,c or g
cccccgactggtcctcgaaactccctgaccctgtgnacctgccccccctnggcccccccccaagtgcctgggnattaccgggcatgagcccacccagccccgaccccgatagaaataaattaaggataataaggatcctcaaaaatgccagcctaagttacctacaggttgaagtattcccttaccccaaaatgccttaggaacagaagtgtttcaggttttaaattttttctaattttggaatatgtgcattacacttagtgactgagcatccttaatttgaaaattcaaaatccaaagaacatttccttttagcatcatgttcgtggctcaaaaggtttcaaattctgcagtattttggatttcagtttaggatactcaagctctgttttgtatatagaataataccggaatcaattcagctagcaccaatggctatgtcatcatgacaccaaaaactaagtgaaagatgaggaatttaattaagttcgcacgcgtgggtcgaccc

SEQ ID NO: 156369 - DNA, 572 bp, Homo sapiens
cgagtcaatccaggactacaaacacctgtgccaagacctgagcttctgccagcctgcctcctgacccgccaccccttactgtgccccagacgcacaatgcccgtgaccagtggctgcaggatgccttccacatcagcctctgaagggctggggggcagggggcatgcacccatgcaaaaggctcagaaactccccctccggcaagccctcagacttcggagcctgcgccttcccccctaccgcctcacctcacaggagggccaggcatgtattcctcagaggcgaaactgccaaactctttctcctgtcttgggttggctggcactggggcgggcatctagggtacagcctctgctcatggcactgggcctccagttcttccacatgtgtgcacccccagcttggccaaccctcagccttgcggtggggcccgaagcatcttcccttccgcttgggtctctgggattgggatgagtgcctggctcccatctcctcctcaccttttgttgctatcggcagctgctggctcaggggcatcccacctccgggctctgggttcctctgccctggaa

SEQ ID NO: 156370 - DNA, 1051 bp, Homo sapiens
  misc_feature (1)...(1051): n = a,t,c or g
atccacgacgagctgagccgcgccgcccgcgcctccggacgggccccgccacgccgccggcgccgccaacgcgggacccgcagccggcccgcgtcgtcctgtcaacctcgactcagcgctggccgcgctgcgcaaggagatgttgtctgcaggtggggctgcggcagttggacatgtccttgttgtgccagctgtggggcctgtacgagtcaatccaggactacaaacacctgtgccaagacctgagcttctgccaggacctgtcatcctccctccattcggacagctcctacccaccggatgcgggcctgtctgacgacgaggagcctcccgatgccagcctgcctcctgacccgccaccccttactgtgccccagacgcacaatgcccgtgaccagtggctgcaggatgccttccacatcagcctctgaagggctggggggcagggggcatgcacccattgcaaaaggcttcagaaactccccctccggataagccctcatacttcggagcctgcgcccttcccccctaaccgcctcacctcacaaggaggggccaggcatgtattcctcagaggcgaaactgccaaactcttttctcctgtcttgggttggctggcactggggccgggcatcttagggtacagcctctgctcaatggcaactgggcctccaagttcttccacatgtgtgcacccccagcttggccaacccttcaagccttgcggtggggcccccggggaaaaaaaaaggggncatttcttttccccttccgcttgggttctcttgggattgggatgagtgcctggctcccatctcctcctcaccttttgttgctatcggcaagctgctggctcagagggcatctccacctccgaggctttagggttcctactgccctggaagaggctccagagacccggtcccaaataaccacccaacggccaggagggcagcaagggccccgtgctggatatttaaatttaggggccggtctcccagggcgcgtagataaataaatacactcagcgtcaaaaaaaaaaaaaaaaaaa

SEQ ID NO: 156371 - DNA, 848 bp, Homo sapiens
cagtctcaatgggggcactggggctggagggcaggggtgggaggctccaggggaggggttccctcctgctagctgtggcaggagccacttctctggtgaccttgttgctggcggtgcctatcactgtcctggctgtgctggccttagtgccccaggatcagggaggactgggtttcagaagctgccagaggaggagccagaaacagatctcagccccgggctcccagctgcccacctcataggcgctccgctgaaggggcaggggctaggctgggagacgacgaaggaacaggcgtttctgacgagcgggacgcagttctcggacgccgaggggctggcgctcccgcaggacggcctctattacctctactgtctcgtcggctaccggggccgggcgccccctggcggcggggacccccagggccgctcggtcacgctgcgcagctctctgtaccgggcggggggcgcctacgggccgggcactcccgagctgctgctcgagggcgccgagacggtgactccagtgctggacccggccaggagacaagggtacgggcctctctggtacacgagcgtggggttcggcggcctggtgcagctccggaggggcgagagggtgtacgtcaacatcagtcaccccgatatggtggacttcgcgagagggaagaccttctttggggccgtgatggtggggtgagggaatatgagtgcgtggtgcgagtgcgtgaatattgggggcccggacgcccaggaccccatggcagtgggaaaaatgtaggagactgtttggaaattgattttgaacctgatgaaaataaagaatggaaagcttcagtgctgccgataaa

SEQ ID NO: 156372 - DNA, 910 bp, Homo sapiens
atgggggcactggggctggagggcaggggtgggaggctccaggggaggggttccctcctgctagctgtggcaggagccactatctctggtgaccttgttgctggcggtgcctatcactgtcctggctgtgctggccttagtgccccaggatcagggaggactggtaacggagacggccgaccccggggcacaggcccagcaaggactggggtttcagaagctgccagaggaggagccagaaacagatctcatccccgggctcccaactgcccaccttataggcgctccgctgaaggggcacgggctgaggctgggagacgacgaaggaacagggcgtttctgacgagcggaacccaggtctcggacgccgaggggctggcgctcccgcaggacggcctctattacatctactgtctcgtcggaataaccgggccgggcgccccctggcggcggggacccccagggccgctcggtcacgctgcgcagctctctgtaccgggcggggggcgcatacgggccaggcaactcccgatgctgctgctcgaagggcgccgagacggctactccagtgctggacccggccaggagacaaggtttctggcctctctggtacacgagcgtggggttcggcggcctggtgcagctccggaggggcgagagggtgtacgtccaacatcagtcaaccccgatatggtggacttccgcgagagggaagaccttctttggggccgtgatggtggggtgagggaatatgagtgcgtggtgcgagtgcgtgaatattgggggcccggacgcccaggaccccatggcagtgggaaaaatgtaggagactgtttggaaattgattttgaacctgatgaaaataaagaatggaaaaaaatcagtgctgccgataaaaaaaaaaaaaaaa

SEQ ID NO: 156373 - DNA, 848 bp, Homo sapiens
atggggtttctccatgttggccaggctggtctcaaactcctgacctcaggccattatcaaaagaagaggatgttttcagaaaacgaggaaaatgttaaacgcatgaaaacttcagagcaaattaatgaaaatatttgtgtaagtttggaaaggcaaacagcattcctggaacaggttcctgagtcctttgagcacctgccacctctcccagaaccaccagcaccactacctgaattagtagacaaaacccgagacacacttcctccccagaagcctgagctcaaagtgaaacgggttttcagacccaatggcattgccctgacttggaatataaccaaaatcaatcccaagtgtgctcctgaagaaaagctaccccctcttcctgtgtcatgagaactctaataataagttgatttggaagaagattggagaaattaaagctttaccactccccatggcctgtactttatctcagtttttagcttccaacagatactattttactgtccaatcaaaagatatttttggacgatatggaccattctgtgatataaaatctatccctgggttttctgaaaatcttacgtaaaaggtgtctaataatgatatactacttgttctttcatatttgttaagaccgcaatgttaccttaataatacatgtctttctattaagccctttcatatatttatctcgaaatttgctgtacgtttttgcgtttgggatatttttcttcattaaacttgaattgcttctttttatttttttctttgtataatgcattacaattttaattatacatgagctattttaactaaattcgtttgttcgcgtattaaatattcag

SEQ ID NO: 156374 - DNA, 495 bp, Homo sapiens; identical to SEQ ID NO: 118438

SEQ ID NO: 156375 - DNA, 2066 bp, Homo sapiens
atggcggagctgacggtggaggttcgcggctctaacggggctttctacaagggatttatcaaagatgttcatgaagactcccttacagttgtttttgaaaataattggcaaccagaacgccaggttccatttaatgaagttagattaccaccaccacctgatataaaaaaagaaattagtgaaggagatgaagtagaggtatattcaagagcaaatgaccaagagccatgtgggtggtggttggctaaagttcggatgatgaaaggagaattttatgtcattgaatatgctgcttgtgacgctacttacaatgaaatagtcacatttgaacgacttcggcctgtcaatcaaaataaaactgtcaaaaaaaataccttctttaaatgcacagtggatgttcctgaggatttgagagaggcgtgtgctaatgaaaatgcacataaagattttaagaaagcagtaggagcatgcagaattttttaccatccagaaacaacacagctaatgatactgtctgccagtgaagcaactgtgaagagagtaaacatcttaagtgacatgcatttgcgaagtattcgtacgaagttgatgcttatgtccagaaatgaagaggccactaagcatttagaatgcacaaaacaacttgcagcagcttttcatgaggaatttgttgtgagagaagatttaatgggcctggcaataggaacacatggtagtaacatccagcaagctaggaaggttcctggagttaccgccattgagctagatgaagatactggaacattcagaatctacggagagagtgctgatgctgtaaaaaaggctagaggtttcttggaatttgtggaggattttattcaggttcctaggaatctcgttggaaaagtaattggaaaaaatggcaaagttattcaagaaatagtggacaaatctggtgtggttcgagtgagaattgaaggggacaatgaaaataaattacccagagaagacggtatggttccatttgtatttgttggcactaaagaaagcattggaaatgtgcaggttcttctagagtatcatattgcctatctaaaggaagtagaacagctaagaatggaacgcctacagattgatgaacagctgcgacagattggtatgggtttcagaccttcttccaccagagggcctgaaaaagagaaaggatatgccactgatgaaagtaccgtctcttctgtacaaggttctaggtcttatagcggaagaggcagaggtcgtcggggacctaattacacctccggttatggtacaaattctgagctgtctaacccctctgaaacggaatctgagcgtaaagacgagctgagtgattggtcattggcaggagaagatgatcgagacagccgacatcagcgtgacagcaggagacgcccaggaggaagaggcagaagtgtttcagggggtcgaggtcgtggtggaccacgttggtggcaaatcctccatcagttctgttcaatatagatcaaacattcataattgcagtactcttaaacgaatatttcttgcctctgacatgaatatagtgctcaaagatccagacagcaatccatacagcttacttgataatacagaatcagatcagactgcagacactgatgccagcgaatctcatcacagtactaaccgtcgtaggcggtctcgtagacgaaggactgatgaagatgctgttctgatggatggaatgactgaatctgatacagcttcagttaatgaaaatgggctagatgatagtgaaaaaaaaccccagcgacgcaatcgtagccgcaggcgtcgcttcaggggtcaggcagaacgatagacagccagctatagatttcatttataaagaagttgaaaaagttgtctccctttggcaggcaaaagatgtgattgaagagcatggtccttcagaaaaggcaataaacggcccaactagtgcttctggcgatgacatttctaagctacagcgtactccaggagaagaaaagattaataccttaaaagaagaaaacactcaagaagcagcagtcctgaatggtgtttcataa

SEQ ID NO: 156376 - DNA, 2149 bp, Homo sapiens
atggcggacgtgacggtggaggttcgcggctctaacggggctttctacaagggatttatcaaagatgttcatgaagactcccttacagttgtttttgaaaataattggcaaccagaacgccaggttccatttaatgaagttagattaccaccaccacctgatataaaaaaagaaattagtgaaggagatgaagtagaggtatattcaagagcaaatgaccaagagccatgtgggtggtggttggctaaagttcggatgatgaaaggagaattttatgtcattgaatatgctgcttgtgacgctacttacaatgaaatagtcacatttgaacgacttcggcctgtcaatcaaaataaaactgtcaaaaaaaataccttctttaaatgcacagtggatgttcctgaggatttgagagaggcgtgtgctaatgaaaatgcacataaagattttaagaaagcagtaggagcatgcagaattttttaccatccagaaacaacacagctaatgatactgtctgccagtgaagcaactgtgaagagagtaaacatcttaagtgacatgcatttgcgaagtattcgtacgaagttgatgcttatgtccagaaatgaagaggccactaagcatttagaatgcacaaaacaacttgcagcagcttttcatgaggaatttgttgtgagagaagatttaatgggcctggcaataggaacacatggtagtaacatccagcaagctaggaaggttcctggagttaccgccattgagctagatgaagatactggaacattcagaatctacggagagagtgctgatgctgtaaaaaaggctagaggtttcttggaatttgtggaggattttattcaggttcctaggaatctcgttggaaaagtaattggaaaaaatggcaaagttattcaagaaatagtggacaaatctggtgtggttcgagtgagaattgaaggggacaatgaaaataaattacccagagaagacggtatggttccatttgtatttgttggcactaaagaaagcattggaaatgtgcaggttcttctagagtatcatattgcctatctaaaggaagtagaacagctaagaatggaacgcctacagattgatgaacagctgcgacagattggttctaggtcttatagcggaagaggcagaggtcgtcggggacctaattacacctccggttatggtacaaattctgagctgtctaacccctctgaaacggaatctgagcgtaaagacgagctgagtgattggtcattggcaggagaagatgatcgagacagccgacatcagcgtgacagcaggagacgcccaggaggaagaggcagaagtgtttcagggggtcgaggtcgtggtggaccacgtcggtggcaaatcctccatcagttctgtgctcaaagatccagacagcaatccatacagcttacttgataatacctgaatcagatcagactgcagacactgatgcccagcgaatctcatcacagtactaaccgtcgtaggcggtcatccgtagacgaaggactgattgaagatgctgttctgatggatggaatgactgattctgatacagcttcagttaatgaaaatgggctagtcacagttgcaggattatatttctagagctgagtctcagagcatacaaagaaacctccccaagggaaactttggctaaaaacaagaaagaaatggcaaaagatgtgattgaagagcatggtccttcagaaaaggcaataaacggccccaactagtgcttctggcggatgacatttctaaagctacagcgtactccgaggagaagaaaagattaatcccttaaaagaagaaaacactcaagaagcagcagtcctgaatggtgtttcataaactgaagaagttcctagtttacagttcttttacattacatttacaatagtgcttgtacaagcttgccaaagatagaatatggatcgccagtctttacgatcgcactttcagttcctccatttggaattcaaaaaggggagggatcctgaagaaatcatatgttaaacatactttgacacctactgtgttataaaatatatcatcagatgtgccttgagaatagtatatgtaacattaaaaaaaagttgctggctaaaaaaaaaaaaaaaaa

SEQ ID NO: 156377 - DNA, 1555 bp, Homo sapiens
  misc_feature (1)...(1555): n = a,t,c or g
acggaatctgagcgtaaagacgagctgagtgattggtcattggcaggagaagatgatcgagacagccgacatcagcgtgacagctggagacgcccaggaggaagaggcagaagtgtttcagggggtcgaggtcgtggtggaccacgtggtggcaaatcctccatcagtttctgtgctcaaggatcagcccagcaatccattacagcttacttgataatacagaatcagatcagactgcagacactgatgcaagcgaatctcatccacagtactaaccgtcgtaggcggtctcgtagacgaaggactgatgaagatgctgttctgatggatggaatgacctgaatctgatacagcttcagttaatgaaaatgggctaggcaaaagatgcgattgatagagcatggccccttcaggaaaaggcaataaaccggcccaacttagtgccttctgggcgatgacatttcctaagctacagccgtactccaggagaaagaaaaagattaataccttaaaagaaggaaaacactcaagaagcagcagtcctgaatggtgtttcataaactgaagaagttcctagtttacagttcttttacattacatttacaatagtgcttgtacaagcttgccaaagatagaatatggatcgccagtctttacatcagcactttcagttcctccatttggaattcaaataaggggagggatcctgaagaaatcatatgttaaacatactttgacacctactgtgttataaaatatatcatcagatgtgccttgagaatagtatatgtaacattaaaaaaaagttgctggctataggaaatgttattttgttttcaaaatatggcagagatggggggtggtgggtggggtgggatccctaacgtaatattctttatgaaagcattagctgcttttgttacatttttaatatgcaaccacttcttcacctgaggaaaactagaatgaaatgcagtctaaaatattttgcactgaattgtaatttcttcattagtttagtcctggaaactggtctgttttaatgtgttttttaaatgctgtatgtagaggaaaatctgcagaccactggaatacatttgttaaactctcatctgcagggacactgggcgatacttggcagtgactgttctaccttgaggctttgtttggtttatttattaaagtgcacagtatttaaaaatcaaacatagctttagtcaaaacactaagctgaattagtcatgtccattcagacataacctgaactactgaaaagatcaatttccagaaggtttattctgtataaactacatgttagtcttcagtagaggatctttttttttcccnnnnnnnnnnnnnaaattgggggggtgggggggccaaaaggttttggttggcgggaggaaaaaaaacttggattttcctttgggggaatttttaaaatttttactttttacccccattgggggaaaaaagggggggcctataaaaggcctaagaaaggaacctttggtttttaaaaaggcttttatcctggccaaaaaaaaccttaaaa

SEQ ID NO: 156378 - DNA, 1780 bp, Homo sapiens
agctacaaaactaaatctactcacatatagggccttgaggcctagaatgtcagaattcggcacgaggctctgcctatggggagctgtgtggcctcgggacgtcagctctgtgggttcatttttctgtaccggggggaggaggtgtttgctgggattgatggggaactgtgggtgagtcctgcccatgagaagcaccaggcagagcccggcccggccttgggggccgtgagaccacaggtgaggacgcagccctgtgcggccctggtaacccgcagcctgtccctccccagccaacaacatctgcttctacggcgagtgttcctactactgctccacggagcacgccctgtgcgggaagccagaccagatcgagggcgtcgctggggggctttcctgcccgacctgtccctggccaagaggaagacctggcggaacccttggcggcgttcctaccacaagcgcaagaaggccgagtgggaggtggaccctgactactgcgaggaggtgaagcagacaccgccctacgacagcagccaccgcatcctggacgtcatggacatgacgatcttcgacttcctcatgggaaacatggaccgtcaccactacgagacttttgagaagtttgggaatgaaacgttcatcatccacttagacaatggaagagggtttgggaagtattcgcacgacgagctctccatcctggtgccgctacagcagtgctgcaggatccggaagtccacctacctgcgtctgcagctcctggccaaggaggagtacaagctgagcctgctgatggccgagtctctgcggggggaccaggaggcacccgtgctgtaccagccgcacctggaggccctggaccggcggctccgcgtcgtgctaaaggccgtctgggactgcgtggagaggaacgggctccacagcgtggtggatgacgacctggacactgagcacagagccgcctcggcgaggtagtgtccgccggccggttgcgctgcccgggacggagacagaggggccggacctcccagcaagcgcatgcgcccgtcgtgaattcagtgaattcagaggcaggacgggatcatccggagtcgggagctgctgccacaggaggcgaggctccccaggtctcataggacacattttgtcagtgtttgaccagaaaagcttgggaaggaagcgcgtgtctgtgctcacggacagaggcggccggcgccggaggcattccatcctttctgtagggaaaggagcctttatttactattttgtatttatatttgatgaataagtatataaacagagacgtgtacacagatgccaatcacctaccaaaccaaacacgaggaccgccctccctggttctgggggcccctcaaggccaagctcacccctcaagtgctctcacactcgggacctaattcaagtaaaaaccctttctccttcctggggcctcggctcctggagggctggagggtctcgtctgaggacgggaggaggctctcgctggacgtctggcctgtgcgctggtggacggatgcctacgcggttttggaggacccgatgaccaggcgtcctgcggagtccgcccgctggcctgcagcacccacctcggacttggctgtggacggttggtgcaagtgcatcctgcagggctggctgtgcgcagctgtgggctgacctttgcagagttttgtggaatagtttgcaatgtcataaaagtgcaataaaaggtacagcagatgtgtgtcggcctcacggggcgggtccctcacaaaaaaaa

SEQ ID NO: 156379 - DNA, 475 bp, Homo sapiens; identical to SEQ ID NO: 147950
  misc_feature (1)...(475): n = a,t,c or g

SEQ ID NO: 156380 - DNA, 502 bp, Homo sapiens
  misc_feature (1)...(502): n = a,t,c or g
gggatgtccccncnncagcnccaaccactgatccccntcgactatgatcacgctcagcttggcacgaggtacatcagtgatgggttctttttgtagtgagacatacaaatctgatgttaatgtttgctcttagaagtcatactccatggtcttcaaagaccaaaaaatgaggttttgcttttgtaatcaggnnnnnnnnnnnttaatgaaccttnnnnnnnnnnnnnnnngggttttgagggaaaaaaaagggggttcccccccttttgtatttctttaaagactttcaaaggcctgtttaattggggcacgttnnnnnnnnnnnnnntgtttttattttaaaaagggttggccttgcggaaaagaaaaaggcctttttgaaatttgtttttccaaacccccggggtcttgttggaaggagaacaaaccctttgggggcctcttttggaaaagcctcaccggtttttaggacgagactggctcttttaaaaagaataaaaaa

SEQ ID NO: 156381 - DNA, 4315 bp, Homo sapiens
  misc_feature (1)...(4315): n = a,t,c or g
gatggcggcggcagcagtcgacagcgcgatggaggtggtgccggcgctggcggaggaggccgcgccggaggtagcgggcctcagctgcctcgtcaacctgccgggtgaggtgctggagtacatcctgtgctgcggctcgctgacggccgccgacatcggccgtgtctccagcacctgccggcggctgcgcgagctgtgccagagcagcgggaaggtgtggaaggagcagttccgggtgaggtggccttcccttatgaaacactacagccccaccgactacgtcaattggttggaagagtataaagttcggcaaaaagctgggttagaagcgcggaagattgtagcctcgttctcaaagaggttcttttcagagcacgttccttgtaatggcttcagtgacattgagaaccttgaaggaccagagattttttttgaggatgaactggtgtgtatcctaaatatggaaggaagaaaagctttgacctggaaatactacgcaaaaaaaattctttactacctgcggcaacagaagatcttaaataatcttaaggcctttcttcagcagccagatgactatgagtcgtatcttgaaggtgctgtatatattgaccagtactgcaatcctctctccgacatcagcctcaaagacatccaggcccaaattgacagcatcgtggagcttgtttgcaaaacccttcggggcataaacaggcgccaccccagcttgaccttcatagcaggtgaatcatccatgataatggaaatagaactccagagccaggtgctggatgccatgaactatgtcctttacgaccaactgaagttcaaggggaatcgaatggattactataatgccctcaacttatatatgcatcaggttttgattcgcagaacaggaatcccaatcagcatgtctctgctctatttgacaattgctcggcagttgggagtcccactggagcctgtcaacttcccaagtcacttcttattaaggtggtgccaaggcgcagaaggggcgaccctgggacatctttgactacatctacatagatgcttttgggaaaggcaagcagctgacagggaaagaatgcgagtacttgatcggcgcagcacgtgactgcagcactgtatgggggtggtcaatgtcaagaaggtgttacagagaatggtgggaaacctgttaagcctggggaagcgggaaggcatcgaccagtcataccagctcctgagagactcgctggatctctatctggccaatgtacccggaccaggtgcagcttctcctcctccaagccagggtttactttccacctggggaatctggccagagaagtctttctgtcttgttttgaaggtgcttgacatcctccagcacatccaaaccctaggacccggggcagcacggggcgggtgggctacctgggtgcagcacactctagagcacattttaggcgcaaaaaggaggaggtgggcgtagaggtgaagcttgcgttccgatgagaaagcacagagatgtctgctactccattcgggcttcattatggaaggcataagaggtatgggcttattaactgtgttgattctacggctggggaccccacctggcatggatgggacacgagttggattcccggaacatgaacgttccacagcctgccgcacggccaccaccagcctttctataacgtgctggtggaggacggctcctgtcgatacgcagacccaagaaaactttggaatataacgctgagccctcaagaaatctcacacacctgacgtgggacgcgtatattctcagagatttactctgcactcactacatcccaaaccgcagagctggagatccggtatccagaagatctggagtttgtcctatgaaacggtgcaagaatatttacaagtgcaaaagaaaagagaacatagaatgagtaaagtctagagaggacattgcacctttgctgctgctgctatcttccaagagaacgggactccggaagaagacgtctccagcggagcccttcgggacctgctgcagccagggaaagccacttccaccagtagtgctggttgcctcctacttaagttttaaataccgtgtgctcttccccagctgcaaagacaatgttgctctccgcctacactagtgaattaatctgaaaggcactgtgtcagtggcatggcttgtatgcttgtcctgtggtgacagtttgtgacattctgtcttcatgaggtctcacaagtcgacgctcctgtaaatcattctttgtattcactccattcccctgtctgtctgcatttgcctcagaacatttcccttggctggacagatggggttatgcatttgcaataatttccttctgatttctctgtggaacgtgttcggtcccgagtgaggactgtgtgtctttttaccctgaagttagttgcatattcagaggtaaagttgtgtgctatcttggcagcatcttagaaatggagacattaacaagcttaagggtaattagaatcatttgaatttatttttttctaaatatgtgaaacaccaggatttcaagtgttttatctttttttttttaaatttaaatgggaatataacacagttttcccccttccccatattccctctcttgagtttatggcacatcctctataaatccattagttttcctattttattacataaaattccttttagaaaaggcaaatagcgaactttgtgaatggatttttcccatactcatcctacaattcctcccattttaaatgacctacttttattttttaatttaaaaaatctacttcagtatcatgagtaggtcttacatcagtgatgggttctttttgtagtgagacatacaaatctgatgttaatgtttgctcttagaagtcatactccatggtcttcaaagaccaaaaaaatgaggttttgcttttgtaatcaggaaaaaaaaaaaattaatgaaccttaaaaaaaaaaaaaaaaaggttttgaggggaaaaaaaagtggtttcacacctcttgttattccttaggagtcacttcaaggcctgtttgaatgtggcaggttagaaagagagagaatgtctttcatttgaagagtgttgggactttgtgttgaaagggagatgtgcgtgttgggaatctgcttttccaagccgccgggttcctggacgggcagcaggacggaagcctgttgtgggcgtcttctggggaaagcctgaccgtgtgtttcggacggcactgggctcctttacgaagttctcagtaactgagcccagagtaactgcacgccttttgtgcagctctggagctccaccaactctcggcctgccagttctcaagcgagctaatcttgtcattaatcgatagaagctaacttccgaagttaggacctagttactttgctctcaacatttaaaataatgcagttgctctagtgaatggggcgttaggggcctgtctctgcacctgtctgtccatctgcatgcagtattctcacccatgttgaatgcctgctgcttgtttaccctttggaaaccctggggtgaccaaggtttggaaagccacctgagaccacttcatagcaagggaaggctttaagcagttactagaaagagatggggatttggcccctggctcctccagcctgaatgagctatttaatccactgtccatgttcctcatcagtcaaatccaaagtcaaaggatttgaacctgcatctggaaacgtaaccactcacagcacctggcccgccaaggttgggaggattgtacactactttcatttaaatgtggaattttttgataatacggaattaattaatatgaatgagatgcattaataagaacctgagcatgctgagagttgcaattgttggttttctggtttgattgatttccctttttccttagacacatcaaagtcaagaaagatgggttttaccctttactgaccccagctgtacatatgtatcctagactgtttttaaatgtctttcttcatgaatgctgcatggggcncccaggaagcgtgtatcacctgtgtaagttggtatgttgggcactgtgtatttttcgaaaaacgtgtgttggatcgctgtactctaataaatcataaggttcctttttaaaaattttccaaaacttttctccattttaaaaagccctgttataaacgttgaactttcacaatgttaaaatgttaaatatttggatatagcaacttcttttctcttcaaactgaatgccaagatttttttgtacaatgattaataaatggaacttatccagagaaaccaaaaaaaaaaaaaaaaa

SEQ ID NO: 156382 - DNA, 1054 bp, Homo sapiens
tttttttttctcctgagacagagtctcactgtatcgcccaagctggagtgcagtggcagatgctaggctcactgcaatccccaccaccattctcatgcctcagcctccccagcagctacgattacaggcatgcgccactgcaccgggctaattttcttctattttttaagagatggggtttcagcgtgttggccagccaccgcacccggcctattattgattttttttggccgggcgccgtggcttatgcctgtaatcccagcaccccgggaggccgaggcaggcggatcacttgaggctagaagttcgagaccagcctccttatttcaggtttcttttttttccccctttttccacatgttctaacatgctttctaattaccatacttcttattttttccccccttcatttttgccttccattaattttccttttgcaggtgtggcagtttgctaagtcgcctcctgctagctattttcccctccttccttagtttgagaaccccagtttttagctggacatgatgcagtcctgctatacagtacatcccagccttcctgaaagccaggtattgtcatatgattagcccaatgagatacaaaggaggtttgatgtatgatatctgagaaatgtcctaaaaaggaaggggtaggtcaagctgggtttaatattgccatggagctgctaccgtcagcaatggattggactgcctaccgtcagaaattcttttcagaaagatgtaagcctccatcttgcttaactaccgctaatttgcagatttttcttaccctgccagcaagcctttcctaactgacgtagtatgtttcaaagttatacattcaattttccgtttctgttagttgttccattaacttattaggatctctatttttatttttccccataaattacataaacttacaattgttcacctttctcatcctcaagaatagtagttctggacattctcatctctctctgctctatactaattcctcacctatgttggaattacccagaatttatctctggaatattatagatactagttgc

SEQ ID NO: 156383 - DNA, 1146 bp, Homo sapiens
tttttttttttttggtagagacaagatctcactatgttgcccaggctggtctcaaattgctgggctcaagggatcctgccgtcttggcctcctgaagtgctgagactacaggcgtgacgaccggagccagacattatcttacattcaatgaaacagtaactttctggtgctgatgctacagttaacttaatttttgttacctttctgcgacttaaaatgtttctttcaaagtaccaatgtaaactcccttggaaaggctatcctaccagattaaccagatatctatgttacttacataactccccagactcaagcttgacttaagcaaacaaacctttagttttgtttagtctatctctttagaaacaggttaatgtctaattcaaagcaacagatcatggattaagaaactgattaaagcaaaatcaacaaataaaaccccaatacacttaaaactacaaattctgagaagaaaggaaccagctgttatcaagctatacagctatatagacgcaggttcaatataagaccctcctcccccaacccctccccgcggtttctccataggagcaattagtgtaatatataaaggagcaagacccatagcttccctgcaggtaagcaggttgcagtcatgtggaaagtgacatcacaggcaaaggtgctgcagcacttgcttgacgtgcaggtgtttcacttacttactgtctctgtggtatctactcttcaaatagtttgagaattggttggaaagtgatgctattcttgaatccttgttactaatcttctatcattttgacgcagacttcctttaaaggcattccattttcatttgccttcaaaagcattttcacacgcctcttggtagtaagattttcaccgagctttagaagaacagctccatcccaaggctggacggccgcatgccacagtggggcttcatcagtactgtgctggctgcaaatggtcgctgaagcagtacagcgctccacggctctgcggccagtcggcgtggctccaaaccctggccctgccatacactcgctttgtgacccaggttaattgctcccacgcctcggattctgcatctgagactgggaagaacagtatttccttccttcttcggtggtgtgaagattcactgac

SEQ ID NO: 156384 - DNA, 558 bp, Homo sapiens
tttttttttttttttttgagacagagactcacactgtcgcccgggctggagtacaatgttgccatctcgcttcactgcaacccctgcctgctgggttcaagccattctccatgccgcagcctcccatgtagcttcttaagatgtgaagatttttaaattaagatgactcttgggatgaaccatcttgtgttggttaaagactttaactggacacaattttaaaaaaacctttttaaacttttaatttccaggtcaaatggcacatgccgtaggtttgttaatgtaggtaaactagtgtcacagggatttgttgtgcagattatttcaccacccagctattaagcctagtacccattaattgtttttccctgatcttctggcttcctcccaccatccaccctcccagagggccccagtgtctgttgtttccctctatgtgttcatgtgttctcataatttagctcccatttgtaaatgagaacatgcagtatttggttttctgttcctgcattagtttgttaaggataaagacctccatccagctccatccatgttcct

SEQ ID NO: 156385 - DNA, 363 bp, Homo sapiens
gacgagaacaaaccccaggagaagcggcccagggctgtgaccgcgtacagcccgaggacgaaaagaagggggagaagatctacctgtacacgcacctgaagcaacagcccatctgggagaagtggtgccacatgacccaggaggagcgcgacgacagcctccggttcaacgagaacatcaccttcgggcagctgggcacattcacgcacaacatgctggcctttggactgaacaagaagctgtgcaatgacttcctgaagaagcaggctgtgattggcaacctggatgaagagcaatacaagctgcttagtgaccacattgagcaaatggccactgagtaggccccagaggtcgcactccgca

SEQ ID NO: 156386 - DNA, 1050 bp, Homo sapiens; identical to SEQ ID NO: 145880

SEQ ID NO: 156387 - DNA, 963 bp, Homo sapiens; identical to SEQ ID NO: 145881

SEQ ID NO: 156388 - DNA, 4313 bp, Homo sapiens
cggaccccccgagggcagcgctgcggggccgttttccggccctcctgacgcgacactgcccctctccgagagctgagaaggaaaagaggagcttgcggaggtgcggctgcaggccgttgttggtcgagttggcgggtcccgcgggccaggccgtggaggtgttacctcattttgaaagtcttgggaaacaggaaaaaattcctaacaaaatgtcagcttttcgaaatcattgtccacatttggattcagttggtgaaataacaaaagaagatttgatacaaaaatcccttggtacttgtcaggattgtaaagtccaaggaccaaatctttgggcatgtctggagaatagatgttcatatgttggctgtggtgaatcacaagtagatcacagcaccatacattctcaggagacaaagcattatctaactgtgaaccttaccactcttcgagtatggtgttatgcttgcagcaaagaagtatttttggataggaaattaggaactcagccttcattgcctcatgtaagacaacctcaccaaatacaagaaaacagtgtccaggattttaaaatacccagtaatacaacattaaaaactcctctggttgccgtatttgatgatctggatatagaagcggatgaagaagatgaacttagggccagaggtcttacaggtttgaaaaatattggaaatacttgttacatgaatgcagctttgcaggctctttctaattgcccacctttgacacagttttttcttgattgtggaggactagctcgaacagataagaaacctgccatttgtaaaagttatctcaaactaatgacagagctgtggtataaaagcaggccaggatctgttgtgcctactactctgtttcaaggaattaaaactgtaaatccaacatttcgggggtattctcagcaggatgctcaagaattccttcgatgtttaatggatttgcttcatgaagaattgaaagagcaagtcatggaagtagaagaagatccgcaaaccataaccactgaggagacaatggaagaagacaagagccagtcggatgtagattttcagtcttgtgaatcttgtagcaacagtgatagagcagaaaatgaaaatggctctagatgcttttctgaagataataatgaaacaacaatgttaattcaggatgatgaaaacaattcagaaatgtcaaaggattggcaaaaagagaagatgtgcaataagattaataaagtaaattctgaaggcgaatttgataaagatagagactctatatctgaaacagtcgacttaaacaaccaggaaactgtcaaagtgcaaatacacagcagagcttcagaatatatcactgatgtccattcgaatgacctgtctacaccacagatccttccatcaaatgaaggtgttaatccacgtttatcggcaagccctcctaaatcaggcaatttgtggccaggattggcaccaccacacaaaaaagctcagtctgcatctccaaagagaaaaaaacagcacaagaaatacagaagtgttatttcagacatatttgatggaacaatcattagttcagtgcagtgtctgacttgtgacagggtgtctgtaaccctcgagacctttcaagatctgtccttgccaattcctggcaaggaagaccttgctaagctgcattcatcaagtcatccaacttctatagtcaaagcaggatcatgtggcgaagcatatgctccacaagggtggatagcttttttcatggaatatgtgaagaggtttgttgtctcatgtgtccctagctggttttggggtccagtagtaaccttgcaagattgtcttgctgccttctttgccagagatgaactaaaaggtgacaatatgtacagttgtgaaaaatgcaaaaagttgagaaatggagtgaagttttgtaaagtacaaaactttcctgagattttgtgcatccaccttaaaagattcagacatgaactaatgttttccaccaaaatcagtacccatgtttcatttccgctagaaggcttggatcttcagccatttcttgctaaggatagtccagctcaaattgtgacatatgatcttctgtcagtcatttgccatcatggaactgcaagtagtggacactatatagcctactgccgaaacaatctaaataatctctggtatgaatttgatgatcagagtgtcactgaagtttcagaatctactgtacaaaatgcagaagcttacgttcttttctataggaagagcagcgaagaggcacaaaaagagaggagaaggatatcaaatttattgaacataatggaaccaagcctccttcagttttatatttctcgacagtggcttaataaatttaagacctttgccgaacctggccctatttcaaataatgactttctttgtattcatggaggtgttcctccaagaaaagctggttatattgaagacctggttttgatgctgcctcagaacatttgggataacctatatagcaggtatggtggaggaccagctgtcaaccatctgtacatttgtcatacttgccaaattgaggcggagaaaattgaaaaaagaagaaaaactgaattggaaatttttattcggcttaacagagcgttccaaaaagaggactctccagctactttttattgcatcagtatgcagtggtttagagaatgggaaagttttgtgaagggtaaagatggagatcctccaggtcctattgacaatactaagattgcagtcactaaatgtggtaatgtgatgcttaggcaaggagcagattctggccagatttctgaagaaacatggaattttctgcagtctatttatggtggagggcctgaagttatcctgcgacctccggttgttcatgttgatccagatatacttcaagcagaagaaaaaattgaagtagaaactcggtctttgtaatttttaggatgtagagagttctaatgaggaatcattttcatgtgccctgacatgtacacatgcgaaaacattcctaaaagcgtgtttatttgctttattttttttcatcatttatcccatttatttcttcttagtgggcattatggaagaatatattaaaatgtgtaatataccacaggttggtatatttagttttaaatacttaccataaagtctttcagtgtaatttttttttgagacagagtcttgctttgtcacccaggctggagtgctgtggtgttacctcagctcactgcagcctccacctcctgggttcaagcgattctcctgcctcagcctctcgagtagctgggattacaggcacctgccaccatgcccggctaatttttgtattttagtagagatggggtttcaccatgttggccaggctagtctcaaactcctgacctcaggtgatccacccacctcggcctcccaaagtgctgggattacaggtgtgagccacagcgcctggcccagtgtaatatttttgaaagaggagggacaattgtgaaatcagtaggttatctttaatctttacactacatgcagatccatagtatcctttgtagtgttgtaaatacttttgctttgaaaactttttcattgtcctaaatcaccctgactctgaccagtctttcagttctccaaaagcccaatttaattgtatagttttgtcatggcttcatataataaagagcctattttaagttgaaagtagtagtcagaaaattgttaatttcctaaagctcaggaaactagggtgtcactttttttgcactgcagcatatacactaactagcttattaaaatttacaaaaatgtctttttgaatgtatcaaggatatatttaggtttgagtgggaatttgtcagcagatatcagtaacttattgccgcttatattgtaccaatggttaaaccttccaattcccgtaccccccggttagtattaatgtccagtgacctaaaaaaccttagagttagttttagggccaccttttaatttggagagccatgaaagtgtggaatgtgtccacctacgattgttgataaagctgaggcccactgccaacttgattttttaaatgaaatagataaagtcctttttgaataatatagtatgcactgcctatttgccttgattatgtaatgtcaaaagtttaactatattccaagtacaaaaacatactggattacattgaggatgttgaatagcattcatgatggctttgttttggtttggggcagctgtcaccagataaagcaatgttgctaaaattagctcaataaaaatagtataataaatgtaaaaaaaaaaaaaaaaagg

SEQ ID NO: 156389 - DNA, 7078 bp, Homo sapiens
ttttttttttttcttttttaaaagttttattttagttttaattgacacataataattgtataccaaatagcaatttttaaaaatagggagacccaagagttaaaaacacaaagtttttccactgttctttgtaaaatttctcatactgaggaaactgtttttataaagcaaccatgtatcgttgccattacagtgtactggcatacttattaggacaattgacagggaaaaacaacttttgggcacaaggaatgccaatttattccttttttgggacacataaacacaaaatatccctggcagggccaaaaaaaattggcaaaatttaaacgaccgatcatccttatctccaacatgaggggtacaacccctcccttaatagtttgggaaggtacctcgtattggctgggggccatacatccagtccaaatttaataaaatacattttaaaacattaccaggtctaataatatagaaacaaaaatcacaccattagtcaaatgaacaaatgcaaacattttcagccactaaacgtagaaaggagcatgaatatgtcaatagcaaggcataagaaaatggttaatcaataacaagatctttcctttaattttacaaggaaaacttcttggagttgcaacagtattgatacaatgccctcagcctccactttcttaaaatgaaagcagagctaccaccttgctattgagcaagaaaatatcacagcacattcacaaaaggtcgttaggacagggtggagagggtgagccttgttaaacagtggattatattttcccacttgaagggtaggcagctttgccaggtaggcaagctctgatagaggctggggcacccagaacccttaaaacaacagacccatatagaaacatgtctgcttgaaaaatccatcacctttggaaagcagcaaaatagaattttacagtaagaatgaaatatgttcctgctgccccagaaacgctggctgcattaaagccagctagttcactttataaaccattcaggattcaacagctaagaacaccaccaccaaaacataattggttcaacatttgggtcatcaccactctcttaatgtcccccccccctttttttttttgagacagagtttcgctcttgttgcccaggctggagtaatagctcactgcaccgtccacctcctgggttcaagcaattctcctgcctcagcctcccgagtagctgggattacaggcacctgccaccacgcccggctgatttttgtgtttttagtagagacagggtttcgccatgttggccaggctggtcttgaactcctgacctcaggtgagccacccgcctcggcctcccaaagtgttgggattacaggcgtgagccactgcccccagccccagcttgatcttgaacctcctgtgtgtgggcagagagacatggccctgctactgcttgaacggcttccggagacagtgacttgtttcctttttccctctgaactatgccgtagggccaggtgagctgctgtgaaggactcattcttggtagccggcagttactggcaacttgtgagcttggtgggctcctactaacgcacctgggacaccaggctgctgggctcccctctaggcagcctcccctccaggcagcctcaccagcagctcccctgagccatggagaccccagaggtccccgtgggctcgctaatcgactttgggcctgaggcacccacctcttctcccctggaggcaccaccccctgtgctgcaggacggcgatggctccctgggggacggtgcatcagagagtgagaccactgagtctgcggacagtgagaatgacatgggcgagtcgccctcgcacccgtcctgggaccaagaccgccgttcctcctccaacgagtccttctcctccaaccagagcaccgagtctacccaggatgaagagaccctggcactcagggacttcatgcgtggctacgtggagaagatcttctctggaggggaggacttggatcaggaggagaaagccaagtttggagagtactgcagcagtgaaaatggaaaaggccgggagtggtttgctcgatacgtgagtgcccagcgctgcaactccaagtgtgtctcagaggcaaccttctaccgcctggtgcagtcttttgcagtggtgctgttcgagtgtcatcagatggatgactttgggcctgccaagaacctcatgaccatgtgcttcacctactaccacatcggaaaaccacagctgctgcccccggagtcccgggagaagcccgcgggcagcatcgactcctacctgaaatccgcaaacagctggctggccgaaaagaaggacatcgccgagcggctgctgaagaacacctcggccaggactgagaatgtcaagggcttcttcggggggctggagaccaagctgaaggggcccctggccaggaggaacgaggaagacgagaacaaaccccaggagaagcggcccagggctgtgaccgcgtacagccccgaggacgaaaagaagggggagaagatctacctgtacacgcacctgaagcaacagcccatctggcacactctgaggttctggaatgcagccttttttgacgctgtccattgtgagaggacaaagcgatctcccactaccagaggggatgctggagaggaggaggagaagagggagaagtggtgccacatgacccaggaggagcgcgacgacagcctccggttcaacgagaacatcaccttcgggcagctgggcacattcacgcacaacatgctggcctttggactgaacaagaagctgtgcaatgacttcctgaagaagcaggctgtgattggcaacctggatgaagagcaatacaagctgcttagtgaccacattgagcaaatggccactgagtaggccccagaggtcgcactccgcaggaggactgaggccatgtgccattctcccgggcccagcgcccggccgtcaccccacccgatgacctgcatgaagccagcagcacccagagccactcctgctgccctagaactagcggttagaagaatccgctgttcctccctcatctcctctgcctgtgtctgcgacccccatccatgtgccaaagtgtcccttgggtcacacagctaaagccgaggtgaccagttgtaccccgagtgccaggcttgtgagatgagaccaagagggaggaggggaaggactccatgggccatcgtgggccaagggctggcgagggtgggggtgggcaagggatgcaggcaggacagccatgaggtggggctgcagccggcacacccagtggtggagggccggcgctgccactcacggtgggtggccgtgggccaccttccctgcaatgggtgcacacgcggctcccatccagccctctcagcgtggggctgtggctggtcctcactattccccagtctcccgctgtggggcaggaacaggaagtgacgggaaccttgaggaggaaacgcctgtgttagggagagagtgggtgcggtgtagaggatgctcttggccggctggagcaagacctggctcccaccagagggacgtgtgtgtgcctgcagacggcccgggagctgtgtgtctccgccagagtcacagcagtgccgaggtgtccgcggcagaccacacagaccgtctgaaatgcgcccgcctggcggacagctcccttctgaagcagagaagcctccatggtcacgaagcagcgttgtgctgtgtgtccctcgcaagaagcacaggaaagagaagtttctttagtagccactagacaaccaccctttctgaaagcaaacagtgctgctctttattccagacaaggcaggaaagtctgagttgggagtgacagtggctggagagaagcagatctgtgcaacgtgcagggcaagccagtggcgtggcctctgcctctaagcgctgagcattgggccccttccccaccagacctttgtagctcctccagcctctgcagagactcccttcacctcgcacttactgcctgggaaccacggcccttctcttctgtgggtctgcaccaggtactccaggccagcccatgggcccggggcctgaccccaacacctgcatgctgggtccagagccttctgtttcaccgtgcgtggacactgctaggccgcctggggtcccctgcctcctgcctgtcgctgccgtggtccctgactgcgaaataggcccgcggggctctccctcctcctgccatcctcccctcccgcccttcctggctacctcctctgacatgcggtcagataagtcccgtcttgtttgtgagtaccacagaaacgcctgagagttcacttacggggccactgcttggaaggtttccctccggggaatgcctccctggaaaatgttccagagacgaaacattctctagagacaccagtctgtgctgcagattggttggatcacagaatgtgtgtctggggcattatctgaaacgtggtgtcatctgatgcatttggaccatatgctgccagactgcagaacggggaagccggggctcagggcccctgactgcatggtgcatgagtgatctcagcctagcgatgccgctggccagaccgtgaccatgctgccagtgtgctcgccatgagctgggtcagggctggggagttgtgcaggctggggtgacccttcccccatcattgggccccaacgggcatgtctccaccgaatccatttagagaaatgtcagagcgagggttgtgtggacacccctcgctctgatgccaactgcagataatacacacctcctgcagcgtccagccacggctccagggcactgctctcctccttgcaccggtgaaactcaggccacactcaagggctgactgtccaggcgctcccttcagccgcctcgtcgtcagcgttcttagtcatgcattattcgtgttagctgaaatgcattcagactttgttctgcggtgcccacaggacttacccctgtatgtacaggatttttgtatgaaagttttgtttgattctgagactctcttgggaacgctggagagcttgtgcacagcctctggaaggaaaggcagcgctgacttcgttgggcttttttccaagcactttaacttcagaaatggtcttgacacttttttctccacatagactcttgaaatagccatttcaggggaggaaagggttggggttttctttgtttgtttgtttgtttccccctttactacctgttcttgtagatctagctcctcagagttggaggaaggctgacagagaaggtctcctctgtgctccatccacacaggatgccggagagacagccccttgtgctgtgagcagagcaggcagtggctctggaggctgcctgtggtctccttccagctgtggctgacagtggctctggccagggttgcttggagaaggctcagtgtgcctgggacagggcttaccacctgccaccaaggtttcctctcttcccccaggacctgggcagagcaggcatgagctgggctgtggtgcagagcaagcagacccagccacactgctcaaaggtccctgcgtggggaggtgtcacaccaggggcacacccagggccacctgggtgtaggagagctctggtggcccctccgtaaactcaggaagtgtcaggtgatttcctagggagaggttcccagtcccagcaggcagaatgcccaaaaccaggagcacgaaggcctgtcatccatggggccattgcaggcaccctgccgcccgaccttgagggctgtgccaatcctagtgaaccaaaatgcaaacaactcacacaagtgaaaagctccctgctttgaaaacaggacatgttgacaggcagcatggtatgtttttagcctttgttacagttttagcaacattgatgtctaagaggggccgtggtaatagattgcatctgccctgtgcatgcgcatgtttaaccacaggccagagaactcaattctgatgtcgtaagttctctgtaagtgaaatggggtagactgtatgattttcctattgccaaaagaaagaaagggggccaaacagctctgaaatttccaaaaaatggctagagggagagtccagtttctgagctctgtacccaaattaaaatcctgatgttcaggttaatccaagcaacacgcattgggtttaaaaccagcaccgaggcccagtgggggaatcacagacatcaccaagtctcgtcttctttccttcctgtgagttgaaaccaaacaggcctctcgctcactcctcccagcccagtaatgctgaggagttcagttgtgaggaaagaaggctggagctgtgagattcgcttttccctaggctgttccgcgtgggttaccttattcaccctgggagcacttggtattccagacccctggacatgaggaatgcaggttcacactgtaaagagtttgtggaaaggtttcagtcttaactggggttccttagctggaagccagggctggaagttacaggcctgaccttcctgggtcccactatctgttggcattttttttttttttttttagacggagtctcactcttttttgcccaggctggagtgaaagtggtgcgatcttggctcatcgcaacctccatctcctgggttcaagcaattctcctgcctcagcttcctgagtagttgggattacaggcatgcaccaccataccgtggctaatcttttttttttttttttttttttgtatttttagtagagacgggggtttcaccatgttgggccaggcttggtcttgaacgcccgacctcaggtgatccacccacctcgggcctcccaaagtgctagggaccacagccgtcagccaccacgcccagcctctttgcttatttatttatttatttatttatttttatttatttttttgagactgagtttcgctcttggcccccaggctagagtgcagtggcacaatctcagctcactgcaacctccgcctcctgggttcaagcaattctcctgcctcagcctcccgagtagctgggactacaggtggccgccaccacacccagccaattttgtatttttacttcgctaccttaggtagcgaag

SEQ ID NO: 156390 - DNA, 388 bp, Homo sapiens
gtttgctaccccgacagagactgtggggagtccctggtggcagcgagctacaggcagccagtaccccatcagtgtggctggttccatcctctcaagcctgcctgcacccagacactgtcgagtgtgtcttcagaaaaactcctaaaattccccaaaagcacagtggctccccgagagccacctccctcaccttcttacaggggcaggttcctcttccggttccaccctcctcagcacggagctcaggggccatccccacctcctcttggccgcaagcacagaccttcccacacaggctcagcagctctgcgggcctgtcccccacctggagctgcaggcctccactcctggggacagctgtgaccatggctctgcaaagcagccttgt

SEQ ID NO: 156391 - DNA, 596 bp, Homo sapiens
  misc_feature (1)...(596): n = a,t,c or g
gcaaagagccggtcgtctacccctggatgcgcaaagttcacgtgagcacggtaacccccaattacgccggcggggagcccaagcgctttcggaccgcctacacgcgccagcaggtcttggagctggagaaggaatttcactacaaccgctacctgacacggcgccggagggtggagatcgcccacgcgctctgcctctccgagcgccagatcaagatctggttccagaaccggcgcatgaagtggaaaaaagaccacaagttgcccaacaccaagatccgctcgggtggtgcggcaggctcagccggagggccccctggccggcccaatggaggcccccgcgcgttntagtgcccccgcacgcgggagccacgaacctcggggtgggggtgggcagtgagtgcaggggatggggtggggggacaggagggggccctggggcctgggccccggaaaaatctatctgccctcccccacactttatatacgaataaacgcagaagagggggaggggaagctttatttatagaaatgacaatagagggccacggggaggccccccccagaagcaagattcaaatctcttgctttctttct

SEQ ID NO: 156392 - DNA, 1240 bp, Homo sapiens
  misc_feature (1)...(1240): n = a,t,c or g
atgagttcttttttgatcaactcaaactatgtcgaccccaagttccctccatgcgaggaatattcacagagcgattacctacccagcgaccactcgcccgggtactacgccggcggccagaggcgagagagcagcttccagccggaggcgggcttcgggcggcgcgcggcgtgcaccgtgcagcgctacgcggcctgccgggaccctgggcccccgccgcctccgccaccacccccgccgcccccgccaccgcccggtctgtcccctcgggctcctgcgccgccacccgccggggccctcctcccggagcccggccagcgctgcgaggcggtcagcagcagccccccgccgcctccctgcgcccagaaccccctgcaccccagcccgtcccactccgcgtgcaaagagcccgtcgtctacccctggatgcgcaaagttcacgtgagcacggggagatacagtcttagtgaagttggaagttggggaggggtggaggaggtggaggaggagaaggaggaggagtnaaaccccaattacgccggcggggagcccaagcgctctcggaccgcctacacgcgccagcaggtcttggagctggagaaggaatttcactacaaccgctacctgacacggcgccggagggtggagatcgcccacgcgctctgcctctccgagcgccagatcaagatctggttccagaaccggcgcatgaagtggaaaaaaggaccacaaagttgcccaacaccaagatccactcgggtggtgcggcaggctcagccggagggccccctggccggcccaatggaggcccccgcgcgctatagtgcccccgcacgcgggagccacgaacctcggggtgggggtgggcagtcagtgcagagtatatgggtggggggacaggagggggccctggggcctgggccccggaaaaatctatttgccctcccccacactttatatacgaataaacgcagaagagggggaggggaagctttatttatagaaatgacaatagagggccacggggaggccccccccagaagcaagattcaaatctcttgctttctttcttaaaaaaaaagaaaaagaaaaagcaagaagaaggaagaaagaaaaagacagaaagagaaataggaggaggctgcagctcctcgttttcagctttggcgaagatggatccacgtttcatctttaatcacgccaggtccaggcccatctgtcttgtttcctcttgccgccg

SEQ ID NO: 156393 - DNA, 1164 bp, Homo sapiens
tttcgaggatctccttggggacaatctgcccttcataaaaaccttcctttatcaaagacacctttgagttctttttggtagcacttggctcaagagcctcatctccaagtgggtctggtgctgcccttttccacagtgtggtgggggtctgggcagtcttgacatgacagtctgctgtccaagcatctcaaagccattgtcagtgggcatcagtctggccattgaagaaaggagggttaccttgttgaagttgccatccaaagttggttttccttgtttcctcgagttagcaaggaaggacctgggaggactagatgacccagtttggggcacagtttgtttggcttggtgtcctctcgactcaaacggtgaaagagggggtatgaccaacatctttagggggctgagaggctactgaactcctcttccagcttatttctggttaagctaatacacaggtgtgatacggagtagatgacttttccctgctctgaatgtttagttttatttttttctctaacttgcattgattctgcttcgtttttgccgtttgccgcttctgttttggtctctgtctgtctctgtgtctctctctgtctctctctctcactctatctgtgtctttggaggctaagctaagactgcccccatctaacctccttcccccctctctgtggggtgtctctctttctctttttttttcccctttttcttcttcatacagagctcgctgcccaaatcattcaagaggaagatctccgttgtctctaccaagggggtgccagctggaaacagtgacacagaggggggccagcctggtcggaaacgacgctggggagccagcacagccaccacacagaagaaaccttccatcagtatcaccactgaatcactaaagagcctcatccccgacatcaaacccctggcggggcaggaggctgttgtggatcttcatgctgatgactctcgcatctctgaggatgagacagagcgtaatggcgatgatgggacccatgacaaggggctgaaaatatgccggacagtcactcaggtagtacctgcagagggccaggagaatgggcagagggaagaagaggaagaagagaaggaacctgaagcagaacctcctgtaccttcccaggtgtcagtagaggtggccttgcc

SEQ ID NO: 156394 - DNA, 4034 bp, Homo sapiens
atgtggagacggaaacatccgaggacatccggaggaacccggggagttctgagtggtaatcgaggggtagagtatggcagtgggcggggtcatctcggtacgttcgaagggcgttggcggaaattaccgaagatgcccgaagccgtcgggacggacccgagtacctcacgcaagatggcggagctggaggaggtgactctggacgggaagcctcttcaggcgctgcgggtgaccgacctgaaggccgcactggagcagcgaggcctagccaagagcgggcagaagagtgccctggtcaagcggctcaaaggggctctaatgctagaaaatttacagaaacactcaacaccccatgctgcattccagccaaattcccagattggtgaggaaatgagccagaacagtttcataaaacagtatctggaaaagcagcaggagctacttaggcagcgtctggaacgtgaagctcgagaagctgcagaacttgaagaagcttcagctgagtcggaggacgagatgatccatcctgagggagtggcttccctgctgcctcctgactttcagagcagcctggagagaccagagctggagctcagcagacattcgcccagaaaaagctcctcaatttctgaagagaaaggtgactctgatgatgagaaaccaaggaaaggagaaagacgatcatctagggtcagacaggcaagagcagctaaactgtctgagggcagccaacctgctgaggaggaagaggatcaagaaacaccttccagaaacctaagggtcagagcagatcgaaatttgaaaacagaggaggaagaagaggaggaggaggaggaggaagaagatgatgaagaagaggaaggtgatgatgagggacaaaaatctagggaggcaccaatcctgaaagagtttaaggaagaaggggaagagatacctagagtaaaaccagaggagatgatggatgagagacccaaaacaagatcccaggaacaggaggtgttagagagaggagggagatttacaagatcccaggaagaggctagaaaaagtcatctggccagacagcagcaggagaaggaaatgaaaacaacatctccccttgaggaggaagaaagagaaataaaatcttcacaaggcttaaaggaaaaatcgaagtctccttcccctcctcgactgactgaagatcgaaagaaggcctcacttgtagcgctgccagagcaaactgccagcgaggaggagactcctccacctttactaacaaaggaagcatcttctccaccacctcatccacagctccatagcgaagaagaaatagagcccatggaaggcccagccccccctgtcctcattcagttatctcctcctaatacagatgctgacaccagggagctattagtatctcagcatactgtccagttggtaggaggcctgtctcctttgtcaagtccttcagacaccaaagcagaatctccagcagagaaagtgccagaggagagtgtcctgcctctggttcagaaaagcacactggctgactactcagcccagaaggatcttgaacctgagtcagacagatctgctcagcccctccctctaaaaattgaggaattagcactggccaaaggaatcactgaagaatgtctgaaacagccatctttggaacagaaggaaggcagaagagcttctcatacccttctcccaagccacagattgaaacagtcagctgattcatcctctagccggtcctcctcatcttcctcctccagttctagatcaagatctcgctctcctgacagttcaggttctcggtctcattcaccgctcagatccaagcagagagatgtagcccaggcacgtactcatgccaaccctcgtggtagacccaagatgggctccagatcaacatcagagtccagatcaaggtcacgttcacgttctcgttcagcatcaagcaacagcagaaaatctctgagccctggagtctccagggacagcagcaccagctatactgaaaccaaagatccctcttctggtcaggaggttgcaactccaccagtgccacaactgcaggtctgtgagccaaaggagaggacttccacctcctcatcctctgtccaagcaaggcgtctgagtcagcctgaatcagctgaaaagcatgtgacccagaggttacagcctgagcgggggagcccaaagaagtgtgaagctgaagaggcagagccaccagctgccacacagccccaaacctcagagactcagacctctcatctgccagaatcagaaagaattcatcacactgttgaggagaaggaggaagtgaccatggacacaagtgaaaacagacctgaaaatgatgttccagaacctcccatgcctattgcagaccaagtcagcaatgatgaccgcccggagggcagtgttgaagatgaggagaagaaagagagctcgctgcccaaatcattcaagaggaagatctccgttgtctcagctaccaagggggtgccagctggaaacagtgacacagaggggggccagcctggtcggaaacgacgctggggagccagcacagccaccacacagaagaaaccttccatcagtatcaccactgaatcactaaagagcctcatccccgacatcaaacccctggcggggcaggaggctgttgtggatcttcatgctagatgactctcgcatctctggaggatggagacagagcgttaatggcgatagatggggacccatgacaaaggggcttgaaaatatgccggacagtcactcaggtagtacctgcagagggccaggagaatgggcagagggaagaagaggaagaagagaaggaacctgaagcagaacctcctgtacctccccaggtgtcagtagaggtggccttgcccccacctgcagagcatgaagtaaagaaagtgactttaggagataccttaactcgacgttccattagccagcagaagtccggagtttccattaccattgatgacccagtccgaactgcccaggtgccctccccaccccggggcaagattagcaacattgtccatatctccaatttggtccgtcctttcactttaggccagctaaaggagttgttggggcgcacaggaaccttggtggaagaggccttctggattgacaagatcaaatctcattgctttgtaacgtactcaacagtagaggaagctgttgccacccgcacagctctgcacggggtcaaatggccccagtccaatcccaaattcctttgtgctgactatgccgagcaagatgagctggattatcaccgaggcctcttggtggaccgtccctctgaaactaagacagaggagcagggaataccacggcccctgcaccccccacccccacccccggtccagccaccacagcacccccgggcagagcagcgggagcaggaacgggcagtgcgggaacagtgggcagaacgggaacgggaaatggagcggcgggagcggactcgatcagagcgtgaatgggatcgggacaaagttcgagaagggccccgttcccgatcaaggtcccgtgaccgccgccgcaaggaacgtgcgaagtctaaagaaaagaagagtgagaagaaagagaaagcccaggaggaaccacctgccaagctgctggatgaccttttccgaaagaccaaggcagctccctgcatctattggctcccactgactgacagccagatcgttcagaaagaggcagagcgggccgaacgggccaaggagcgggagaagcggcgaaaggagcaagaagaagaagagcaaaaggagcgggagaaggaagccgagcgggaacggaaccgacagctggagcgagagaaacgtcgggagcacagtcgggagagggacagggagagagagagagaaagggagcgggacaggggggaccgagatcgggatagggaaagggaccgagaacgaggcagggaaagggatcgcagggacaccaagcgccacagcagaagccggagtcggagcacacctgtgcgggaccggggtgggcgccgctag

SEQ ID NO: 156395 - DNA, 5982 bp, Homo sapiens
gaaaaagctcctcaatttctgaagagaaaggtgactctgatgatgagaaaccaaggaaaggagaaagacgatcatctagggtcagacaggcaagagcagctaaactgtctgagggcagccaacctgctgaggaggaagaggatcaagaaacaccttccagaaacctaagggtcagagcagatcgaaatttgaaaacagaggaggaagaagaggaggaggaggaggaggaagaagatgatgaagaagaggaaggtgatgatgagggacaaaaatctagggaggcaccaatcctgaaagagtttaaggaagaaggggaagagatacctagagtaaaaccagaggagatgatggatgagagacccaaaacaagatcccaggaacaggaggtgttagagagaggagggagatttacaagatcccaggaagaggctagaaaaagtcatctggccagacagcagcaggagaaggaaatgaaaacaacatctccccttgaggaggaagaaagagaaataaaatcttcacaaggcttaaaggaaaaatcgaagtctccttcccctcctcgactgactgaagatcgaaagaaggcctcacttgtagcgctgccagagcaaactgccagcgaggaggagactcctccacctttactaacaaaggaagcatcttctccaccacctcatccacagctccatagcgaagaagaaatagagcccatggaaggcccagcccccgctgtcctcattcagttatctcctcctaatacagatgctgacaccagggagctattagtatctcagcatactgtccagttggtaggaggcctgtctcctttgtcaagtccttcagacaccaaagcagaatctccagcagagaaagtgccagaggagagtgtcctgcctctggttcagaaaagcacactggctgactactcagcccagaaggatcttgaacctgagtcagacagatctgctcagcccctccctctaaaaattgaggaattagcactggccaaaggaatcactgaagaatgtctgaaacagccatctttggaacagaaggaaggcagaagagcttctcatacccttctcccaagccacagattgaaacagtcagctgattcatcctctagccggtcctcctcatcttcctcctccagttctagatcaagatctcgctctcctgacagttcaggttctcggtctcattcaccgctcagatccaagcagagagatgtagcccaggcacgtactcatgccaaccctcgtggtagacccaagatgggctccagatcaacatcagagtccagatcaaggtcacgttcacgttctcgttcagcatcaagcaacagcagaaaatctctgagccctggagtctccagggacagcagcaccagctatactgaaaccaaagatccctcttctggtcaggaggttgcaactccaccagtgccacaactgcaggtctgtgagccaaaggagaggacttccacctcctcatcctctgtccaagcaaggcgtctgagtcagcctgaatcagctgaaaagcatgtgacccagaggttacagcctgagcgggggagcccaaagaagtgtgaagctgaagaggcagagccaccagctgccacacagccccaaacctcagagactcagacctctcatctgccagaatcagaaagaattcatcacactgtctcccaccccccgcccagcacccccaacccccaaccattttctccatgctggtgtctccagatcctgaggatcagcaggcctttacttattaagcagttgattaaacacagtgaggagaaggaggaagtgaccatggacacaagtgaaaacagacctgaaaatgatgttccagaacctcccatgcctattgcagaccaagtcagcaatgatgaccgcccggagggcagtgttgaagatgaggagaagaaagagctggagtccctgaggagatgccagccacaactctccgaagagaagtattctgaccttgctgctgaatgtctgccaggtcctggggtattcacctacccccaggctaccttcatcagaggctccatgatcccactcgcagctaccaagggggtgccagctggaaacagtgacacagaggggggccagcctggtcggaaaccgacgctgggggacccagcacagcccaccacacagaagaaaccttccatcagtatcaccactgaatcactaaagagcctcatccccgacatcaaacccctggcggggcaggaggctgttgtggatcttcatgctgatgactctcgcatctctgaggatgagacagagcgtaatggcgatgatgggacccatgacaaggggctgaaaatatgccggacagtcactcaggtagtacctgcagagggccaggagaatgggcagagggaagaagaggaagaagagaaggaacctgaagcagaacctcctgtacctccccaggtgtcagtagaggtggccttgcccccacctgcagagcatgaagtaaaagaaagtgactttaggagataccttgaacttcgacgttccattagccagcagaagtccggagtttccattaccattgatgacccagtccgaactgcccaggtgcccttcccaccccggggcaagatttagcaacattgtccatatctccaatttggtccgtcctttcactttaggccagctaaaggagttgttggggcgcacaggaaccttggtggaagaggccttctggattgacaagatcaaatctcattgctttgtaacgtactcaacagtagaggaagctgttgccacccgcacagctctgcacggggtcaaatggccccagtccaatcccaaattcctttgtgctgactatgccgagcaagatgagctggattatcaccgaggcctcttggtggaccgtccctctgaaactaagacagaggagcagggaataccacggcccctgcaccccccacccccacccccggtccagccaccacagcacccccgggcagagcagcgggagcaggaacgggcagtgcgggaacagtgggcagaacgggaacgggaaatggagcggcgggagcggactcgatcagagcgtgaatgggatcgggacaaagttcgagaagggccccgttcccgatcaaggtcccgtgaccgccgccgcaaggaacgtgcgaagtctaaagaaaagaagagtgagaagaaagagaaagcccaggaggaaccacctgccaagctgctggatgaccttttccgaaagaccaaggcagctccctgcatctattggctcccactgactgacagccagatcgttcagaaagaggcagagcgggccgaacgggccaaggagcgggagaagcggcgaaaggagcaagaagaagaagagcaaaaggagcgggagaaggaagccgagcgggaacggaaccgacagctggagcgagagaaacgtcgggagcacagtcgggagagggacagggagagagagagagaaagggagcgggacaggggggaccgagatcgggatagggaaagggaccgagaacgaggcagggaaagggatcgcagggacaccaagcgccacagcagaagccggagtcggagcacacctgtgcgggaccgggacctgcagcggagcgcggcgcccgctccaatcggctcggggctgtgccccgggacccggcgacaagctcgactgtggcgcttcccccggcctgggcccctcgcagttccagggtcccgggaacacccagggcctgctctgctgcggactcgaaggagctgggtctggaaccagttctttgtcattgaggaatatgctggtccagagcctgttctcattggcaagctgcactcggatgttgaccggggagagggccgcaccaagtacctgttgaccggggagggggcaggcaccgtatttgtgattgatgaggccacaggcaatattcatgttaccaagagccttgaccgggaggaaaaggcgcaatatgtgctactggcccaagccgtggaccgagcctccaaccggcccctggagcccccatcagagttcatcatcaaagtgcaagacatcaacgacaatccacccatttttccccttgggccctaccatgccaccgtgcccgagatgtccaatgtcgggacatcagtgatccaggtgactgctcacgatgctgatgaccccagctatgggaacagtgccaagctggtgtacactgttctggatggactgcctttcttctctgtggacccccagactggagtggtgcgtacagccatccccaacatggaccgggagacacaggaggagttcttggtggtgatccaggccaaggacatgggcggccacatgggggggctgtcaggcagcactacggtgactgtcacgctcagcgatgtcaacgacaacccccccaagttcccacagagcctataccagttctccgtggtggagacagctggacctggcacactggtgggccggctccgggcccaggacccagacctgggggacaacgccctgatggcatacagcatcctggatggggaggggtctgaggccttcagcatcagcacagacttgcagggtcgagacgggctcctcactgtccgcaagcccctagactttgagagccagcgctcctactccttccgtgtcgaggccaccaacacgctcattgacccagcctatctgcggcgagggcccttcaaggatgtggcctctgtgcgtgtggcagtgcaagatgccccagagccacctgccttcacccaggctgcctaccacctgacagtgcctgagaacaaggccccggggaccctggtaggccagatctccgcggctgacctggactcccctgccagcccaatcagatactccatcctcccccactcagatccggagcgttgcttctctatccagcccgaggaaggcaccatccatacagcagcacccctggatcgcgaggctcgcgcctggcacaacctcactgtgctggctacagagctcgacagttctgcacaggcctcgcgcgtgcaagtggccatccagaccctggatgagaatgacaatgctccccagctggctgagccctacgatacttttgtgtgtgactctgcagctcctggccagctgattcaggtcatccgggccctggacagagatgaagttggcaacagtagccatgtctcctttcaaggtcctctgggccctgatgccaactttactgtccaggacaaccgagatggctccgccagcctgctgctgccctcccgccctgctccaccccgccatgccccctacttggttcccatagaactgtgggactgggggcagccggcgctgagcagcactgccacagtgactgttagtgtgtgccgctgccagcctgacggctctgtggcatcctgctggcctgaggctcacctctcagctgctgggctcagcaccggcgccctgcttgccatcatcacctgtgtgggtgccctgcttgccctggtggtgctcttcgtggccctgcggcggcagaagcaagaagcactgatggtactggaggaggaggacgtccgagagaacatcatcacctacgacgacgagggcggcggcgaggaggacaccgaggccttcgacatcacggccttgcagaacccggacggggcggcccccccggcgcccggccctcccgcgcgccgagacgtgttgccccgggcccgggtgtcgcgccagcccagaccccccggccccgccgacgtggcgcagctcctggcgctgcggctccgcgaggcggacgaggaccccggcgtacccccgtacgactcggtgcaggtgtacggctacgagggccgcggctcctcttgcggctccctcagctccctgggctccggcagcgaagccggcggcgcccccggccccgcggagccgctggacgactggggtccgctcttccgcaccctggccgagctgtatggggccaaggagcccccggccccctga

SEQ ID NO: 156396 - DNA, 942 bp, Homo sapiens
  misc_feature (1)...(942): n = a,t,c or g
atagctcanctgtaacttctcccatactctaccaatcctcctgcctcagcatccagactggctgtgattgcaggtgtgcaccaccacacccagctacattttttttttggtagagacagggtctcactgtgttacccagtctggtctcaaactcccggcctcaagcaatcctcccactggcctcacaatgttgggattacaggtataagccactgcacacggccttactatgctatcaattccatatatggaaaggtgttttccctttcagagctctttaaagctctgcagaagatttacatttgtttataggagctaaggagaaatcaggggcatgggaaattgagtgtgtaataaaaattaaactcttcatgttatataatcatgcataacttctatcttcattctctgaagttgcctagagcaccatcacagctaggaagcttccatcatgaattaccttatttccaaaagcaagtactcaaataattgtctcaagagaggaaggacaaaaactgttacaagctgaaatatttggggatttgtttgacttgactagggaaccccacaagttttccataataaatgccctgatttaagcccctgtgccctaacagtttaaaaccttaaatgcctaatgttaattgccttccccagttggttgacccttataagaaaacactgtgtggtattttaatgtggtaaacatgtgaatgaatgcctgtggctcagttaatcactccccacaactttgagctgtgatgttttactggtggaaggaactttaacaggtcttcgctcttgtcattagatatcaaaagaactgaaattagttggaattgtaagcagtgaatagatgtgttgttagaatgattccatcacgttatacattgtttaaaatgctaataaagtaacttgctttgtaagaaaaaaaaaaaaaaa

SEQ ID NO: 156397 - DNA, 1477 bp, Homo sapiens
atgaaatttcttctggacatcctcctgcttctcccgttactgatcgtctgctccctagagtccttcgtgaagctttttattcctaagaggagaaaatcagtcaccggcgaaatcgtgctgattacaggagctgggcatggaattgggagactgactgcctatgaatttgctaaacttaaaagcaagctggttctctgggatataaataagcatggactggaggaaacagctgccaaatgcaagggactgggtgccaaggttcatacctttgtggtagactgcagcaaccgagaagatatttacagctctgcaaagaaggtgaaggcagaaattggagatgttagtattttagtaaataatgctggtgtagtctatacatcagatttgtttgctacacaagatcctcagattgaaaagactttttgaagttaatgtacttgcacatttctgggactacaaaggcatttcttcctgcaatgacgaagaataaccatggccatattgtcactgtggcttcggcagctggacatgtctcggtccccttcttactggcttactgttcaagcaagtttgctgctgttggatttcataaaactttgacagatgaactggctgccttacaaataactggagtcatatcttttatgtctgtgtcctaatttcgtaaacactggcttcatcaaaaatccaagtacaagtttgggacccacttcctcatgttccagagtgggtcccaaacttgtacctgaggaagtggtaaacaggctgatgcatgggattctgactgagcagaagatgatttttattccatcttctatagcttttttaacaacattggaaaggatccttcctgagcgtttcctggcagttttaaaacgaaaaatcagtgttaagatttgaagcagttattggatataaaatgaaaccgcattaagcacctagttttctgaaaactgatttaccacgtttaggttgacgtcatctaatactgccacaagtttaatgtgtgaacttctggtattttctaaatatcccccatttttttattatcatttttgaggctttggcagtcttcatttactaccacttgttctttagccaaaagctgattacatatgatataaacagagaaatacctttagaggtgactttaaggaaaatgaagaaaaagaaccaaaatgactttattaaaataatttccaagattatttgtggctcacctgaaggctttgcaaaatttgtaccataaccggttatttaacatatatttttatttttgattgcacttaaattttgtataatttgtgtttctttttctgttctacataaaatcagaaacttcaagctctctaaataaaatgaaggactatatctagtggtatttcacaatgaatatcatgaactctcaatgggtaggtttcatcctacccattgccactctggttcctgagagatacctcacatttcaatgccaaac

SEQ ID NO: 156398 - DNA, 1837 bp, Homo sapiens
  misc_feature (1)...(1837): n = a,t,c or g
attcatacaggagagaacccctatgaatgccatgaatgtgggaaagccttcagtcggaaataccagcttatttcacaccagagaactcatgcaggagagaagccttatgaatgcaccgactgtggaaaggcttttggtttaaagtcacagcttattatacaccagagaactcatacaggggagaaaccatttgaatgtagtgagtgtcagaaagcctttaatacaaagtcaaacctgattgtacatcagagaactcatacaggagagaaaccctatagttgtaatgaatgtggaaaagcctttacgttcaaatcacagctcattgtacataaaggagtgcacactggagtaaaaccctatggatgcagtcaatgtgcaaaaacctttagtttgaagtcccagctcattgtacatcagagaagtcacacaggagtaaaaccatatggatgcagtgagtgtgggaaagccttcaggagcaagtcataccttattatacatatgagaactcatacaggagagaaaccacatgagtgcagggaatgcgggaaatcctttagtttcaattcacaactcattgtgcatcagagaattcacacaggagaaaatccctatgaatgcagtgaatgtgggaaagcctttaataggaaagaccagctcatttcacatcagcgaactcatgcaggggaaaagccttatgggtgcagtgaatgtgggaaagcttttagcagcaagtcatacctaattatacacatgagaactcattcaggtgaaaaaccatatgaatgtaatgaatgtgggaaagccttcatttggaaatcactactcattgtacatgagcgaactcatgcaggggtcaacccttattaaatgcagtcaatgtgagaaatccttcagtggggaaattacgccttctttgttacaccagagaatgcacacaacagagaaaccatatgaatgcagtgagtgtggaaaagccttcattaggaattctcaactcattgtacatcaaagaactcattcaggagagaaaccctatgggtgcaatgaatgtgggaaaaccttctctcaaaaatcaattctcagtgcacatcagagaacacatacaggagagaagccttgtaagtgcactgaatgtgggaaagccttttgttggaagtcacagctcattatgcatcagagaactcatgtagatgacaaacattgataattttacgaaactctgaaaagtggattcacaagagatagaaacaatcatatataaagagaaactctgtaagtggaatcatcttgtcatcttccagaaaactcatactgaatagaaactttatgaatgcacagcatatggaaaggcatccacagaaagctgttctttacatgcaaaaagatagtagacaataccacggggaaaacctgaatttaggtancccactctgaaaatttttagccaggcaagtcataccctttttttaaaaagttccataccaggtgaggaaccatgttaaacgttgtaaagtcattttacctaacataagattcacaaagaggaaacttcatgaaccagatgaatatagaatagacttctttgaaattcatagtttacagaattttaatgagagaaattattgagctaatgaatggcagaattaacaaaattacaaacattttatgtatcggaagcatataccttggagggaccatgctatgagggaaagtgtaaatctagaaatgagaaacccctagggaaaaaatatatataggagtgaacatcttatgaatgtaccaaataaaccacagctggactgttaacctcaccttagaagcttcattctaaaaaaaa

SEQ ID NO: 156399 - DNA, 1387 bp, Homo sapiens
ggcacgagggcataacacaattaaggtgttcccaaaactggaaatccaaagcatccgagtgatgctctgaatcatgcgccgtgtggaaggaatgtgctggcaggcgcaaatcgccggctgagtgttccactgaaattaaactcaagtgctgacttctcgttttttacctccccaccccttccctcaagggtggtctccgccagctggacatgtccttgctctgccaactgtacagcctctacgagtcgattcaggagtacaagggggcatgccaggcagcctccagcccaaactggacttacgctctggagaacgggttcttcgatgaagaggaggaatattttccggagcaaaactccctgcacgacaggagggaccgaggccctcctcgggacttgtcactgcctgtctcctccctctccagcagcgactggattctggagtccatctagagggtcttgggagggatgtgactgttgggaagcccttcctactggacacgctgtcatcatttgctgcttctcttgcaagaaagcacctccgttgtggacggtcctcgggcacaggggatgagcgctaccagtttcatttgtaggcagggagttctccgcggatgcatggtggcagtctgctttgatggcagcagtttctgcttaggtgacctagaggtcctcagcagtatcctccacacctatttattgaggtgcacctgctggggattcataatgagaatataacaagaggatctcggtgaaaggccttagtgggtgttttgtgtgaggtggcttgtagctagctacttccttacaagaatggtagaagtattccaatcctgctttgtgttaggggttcttgccttccagtttggggatgtattaaaaccacccttttcactgcttcccttcctccaatatgctctgcagcttttcttgctgtttaaacctcgtcgcctcagctttatttatttgtaagctggcattactaactggcccagtgattcggtgaaagctttttactgaaaaagttaacatttctaagtcatcccaatcaactgggcttttttcaaccaaaattttatatcattcctttgtctatcagatacgagaggaaggaagataatacgaagacatgttgaatagtgaaaaaaaaaaaaaaagaacacaaaaactggggcaagccaatgtgatgtatcactcactgtaagatggcaaatgttttcatttttaagattccgaatgtaaactagtgtgctagaaagcaaaccacccgccactcaaaccagtaattaccttaagccttaatatatttattaaaatactttatgagaacattacactttgtaggttaaaaatgaggataaaatgctaaactatcaaacctcgtgccg

SEQ ID NO: 156400 - DNA, 459 bp, Homo sapiens
  misc_feature (1)...(459): n = a,t,c or g
gacagtcagtcaccatctcctgcactggaaccagcagttatgtctcctggtaccaacaccacccaggcaaagcccccaaactcatgatttttgatgtcagtaagcggccctcaggggtccctgatcgcttctctgcctccgagtctggcaacacggcctccctgaccatctctgggctccaggctgacgatgaggctgattattattgttgctcgtatgtaggcaactacattcgggttttcggcggagggaccaagctgaccgtcctaggtcagcccaaggctgccccctcggtcactctgttcccgccctcctctgaggagcttcaagccaacaaggccacactggtgtgtctcataagtgacttctacccgggagccgtgacagtggcctggaaggcagatagcagccccgtcaaggcgggagtggagaccaccacaccctccaaacanagcaaca

SEQ ID NO: 156401 - DNA, 414 bp, Homo sapiens
tctccactcccgccttgacggggctgctatctgccttccaggccactgtcacggctcccgggtagaagtcacttatgagacacaccagtgtggccttgttggcttgaagctcctcagaggagggcgggaacagagtgaccgagggggcagccttgggctgacctaggacggtcagcttggtccccccgccgaacaacggaccacgcaggccgtcatcccatgttgcgcagtaataatgagcctcatcctcagactggagcccacggatggtcagggaggctgaggtgccagacttggagccggagaatcggtcactgccccctgagggcctctgaccattgctatggatgatgagtttgggggccgttccgggaaactgctgataccagtctacaggactactcccgacgttgg

SEQ ID NO: 156402 - DNA, 659 bp, Homo sapiens
  misc_feature (1)...(659): n = a,t,c or g
tcaggcgtcaggctcagatagctgctggccgcgtacttgttgttgctttgtttggagggtgtggtggtctccactcccgccttgacggggctgctatctgcttccaggccactgtcacggctcccgggtagaagtcacttatgagacacaccagtgtggccttgttggcttgaagctcctcagaggagggcgggaacagagtgaccgagggggcagccttgggctgacctaggacggtcaacttggtccctccgccgaagaccacagaggtaccactgctgtctgcagattgacagtgatagtcaccctcgtcttctgcctggactccactgatggtcaatgtggctgttgtccctgagctgtaggctgagaatcggtcagggatcccggagggcctctcagtgtctttatatatcaccaatacaggggcctgccctggcttctggtggtaccaataagtatattgctttggcaaaacatctgcagagcaggtgatcctggccgtctgtcctggggacactgacaccaagggtggttgtgtcagctcataggaggcctcagaacctgtgcagagactccccgagggggagaagtagagggatccaagaaatggtgagacacccagaccggacgcgtgggtcgccgnnnctgcgataata

SEQ ID NO: 156403 - DNA, 679 bp, Homo sapiens
agctcccttcatgcgtgacccggcagcggtagcttctgtgggctttcactgctcgggcgtcaggctcaggtagctgctggccgcatacttgttgttgctttgtttggagggtttggtggtctccactcccaccttgacggggctgccatctgccttccaggccactgtcacggctcccgggtagaagtcacttacgagacacaccagtgtggccttgttggcttgaagctcctcagaggagggtgggaacagagtgaccgagggggcagccttgggctgaccgaggacggtcaggtgggtgcctcctccgaagacagcatcattagttggccaaaacatgcagtaatagtcagcctcatcctccgcctggagcccggagatgagtaaaatcgctgtattctctgaaacatccttggatccagagaagcggctggggaccccagagccctggcccttatctgagtctgagtagtagtacaggagatacctgggaggcctccctgccttctgctggtaccagtaaatgttgtatgccccaacattcatgtcagtgggaaaggtgcaggtgagtgtggcggaatctccaggagatgcggaggaggaaggtggctgagtcagcacaggctgggagagggaacctgtgcagtgagagaggagcaagagagaattccaccacagt

SEQ ID NO: 156404 - DNA, 653 bp, Homo sapiens
tcaggcgtcaggctcagataactgctggccgcgtacttgttgttgctttgtttggagggtgtggtggtctccactcccgccttgacggggctgctatctgccttccaggccactgtcacggctcccgggtagaagtcacttatgagacacaccagtgtggccttgttggcttgaagctcctcagaggagggcgggaacagagtgaccgagggggcagccttgggctgacctaggacggtcagcttggtccctccgccgaacaccccctgatcactaccactatcccacacctgacagtaatagtcggcctcatccccggcctcgaccctggcgatggtcagggtggccgtgttcccagagctggagccagagaatcgctcagggatcccagcgggccggtccgcatcataatagatgaccaacacaggggcccggcctggcttctgctggtaccactgcacacttttatctccaattttttctcccccacaggtaatcctggccgtctttcctggggccactgacactgagggcggctgagtcagcacatacgaggtcacagagcctgtgcagtgagagaggaggccgaggaggagaacggtccaggccatggctgaggcaccaccagtgctggaattccgacacactaggat

SEQ ID NO: 156405 - DNA, 378 bp, Homo sapiens
agaggagggtgggaacagagtgaccgagggggcagccttgggctgaccgaggacggtcagctgggtgcctcctccgaacacaggaccatgcaggctgtcatcccatgctgcacagtaataatcagcctcatcctcagactggagtccactgatggccagggaggctgaggtgccagacttggagccagagaatcggtcagcgacccctgagggccgctgattattactatagatgaggagtttgggggcccttcctgggacctgctggtaccagtttacaatattaattccgatgttggagttgcttccagaacaagagatggtgaccctctgcccgggggtcccagacgctgagggcggctgagtcaacacagactg

SEQ ID NO: 156406 - DNA, 567 bp, Homo sapiens
cactctcctcgctcactgcacagggtcctgggcccagtctgtgctgacgcagccgccctcagtgtctggggccccagggcagagggtcaccatctcctgcactgggagcagctccaccatcggggcaggttatgatgtacactggtaccagcagcttccaggaacagcccccaaactcctcatctatggtaacagcaatcggccctcaggggtccctgaccgattctctggctccaagtctggcacctcagcctccctggccatcactgggctccaggctgaggatgaggctgattattactgccagtcctatgacagcagcctgagtgggtattgggtgttcggcggagggaccaagctgaccgtcctaggtcagcccaaggctgccccctcggtcactctgttcccgccctcctctgaggagcttcaagccaacaaggccacactggtgtgtctcataagtgacttctacccgggagccgtgacagtggcctggaaggcagatagcagccccgtcaaggcgggagtggagaccaccacaccctccaaacaaagcaaccctgtatt

SEQ ID NO: 156407 - DNA, 546 bp, Homo sapiens
cgcgtacttgttgttgctttgtttggagggtgtggtggtctccactcccgccttgacggggctgctatctgccttccaggccactgtcacggctcccgggtagaagtcacttatgagacacaccagtgtggccttgttggcttgaagctcctcagaggagggcgggaacagaatgaccgagggggcagccttgggctgacctaggacggacagcttggtccctccgccgaacatccaagtgggactactacgtcctccatatgaacagcaataataatcagcctcggcctcagtctggagcccataaattgtcagggaggccgtggtggcacacttggatccatagaaatctataataaacccctgagggccgattatcgacctcataaatcatgagctggggggctttgcctgggtactgttggtaccaggagacatagttataaccaccaacgtcattgctggttccagtgcaggagatggtgatcgactgtccaggagacccagacacggaggcaggctgagtcaggacagactgggcccagg

SEQ ID NO: 156408 - DNA, 691 bp, Homo sapiens
  misc_feature (1)...(691): n = a,t,c or g
ccctcccaggggggcccgggacaatggtagcttttgggggacttcccacggtccaggggtcgggttcagggagctcttgcccncgtccttgttggtgcttgtttggaagggtgtggtggtctccactcccgccttgacggggctgctatctgccttccaggccactgtcacggctcccgggtagaagtcacttatgagacacaccagtgtggccttgttggcttgaagctccctcagaggagggcgggaacagagtgaccgagggggcagccttgggctggacctaggacggtcagcttggtccctccgccgaataccacacgataaggaccactggtgtctgctgattgacagtaatagtcagcctcgtcttctgcctggacgccactgatggtcaacgagactgttgtctcctgaggtggagccagagaatcgctcagggatccctgagggcctctcactgtctttatatatcagcaggataggggcctggcctgccttctgctggtaccaataaacatattgctttggcaatgcatctccagagcaggtgatcctggccgtctgtcctggggacactgacacaccagggtggctgtgtcaattcataagaggtctcagagcctgtgcagagagtgaggagggggagaagtagcgggatccaggccatggtgagacacccagagttctg

SEQ ID NO: 156409 - DNA, 1705 bp, Homo sapiens
gctgggcacagagggaggagggcattccggggcaagggccaggggcaaagaggctccaggcttggagcagggttttcaggctgggayaagagatggtgggtgaagggtgtctctgttagggcagagatagagggtgtaactggagtcccagccagagacaactccatccaggcaggaggcagggaggtggggggctatgctttgaggagaagggggaggaatgaaagggcagagggactggtgttcagtgatcagacttctcctatccgggcctctttcaccaggagacaccccgggaggctatgtgcctctccctcagggccactttctcactgggtgccaggattcccccacccaacactgagaacccaggggaggcctccaattatgtgtgagataagaaaagaagagagggagcaggatttctcgttgacgatgaggatatttattgagaagggctggatgacttgggatgggggcagagacccctcccctgggaacctgcagctccaggcccctgtgggtggggtgagggtcgggggcctaaaagcattctgcaggggccactgtcttctccacggtgctcccttcatgcgtgacccggcagctgtagcttctgtgggacttccactgctcgggcgtcaggctcaggtagctgctggccgcatacttgttgttgctttgtttggagggtttggtggtctccaatcccaccttgacagggctgccatatgccttccaagccacatgtacgggtccccgggtaaaaatacatttcaaaaaaaaccatgtgggccttgttggcttgaagctcctcagaggagggtgggaacagagtgaccgagggggcagccttgggctgaccgaggacggtcagctgggtgcctcctccgaacacagcacacagtgacacagccccacacacaaacccctcctgacacacccgacccgttccccgctgcagcagcttgggcgcccaggtccagtggccctgggtccagagggtcagggtccagtctgtgcctgcttcagagatagatgtgggggtagagggcagggtcttgttgttgctctgtttggagggtgtggtggtctccactcccgcgttgacggggctgccatctgccttccaggccacttttacagctcccgggtagaagtcactgatcaggcacaccagtgtggccttgttggcttgaagctcctcagaggagggcgggaacagagtgaccgagggggcagccttgggctgaccgaggacggtcaccttggtgccactgccgaacacattacactgtgatataaccagggcagcaggaagcacaacagagacgtgggtaagaatgaagatgtctggttccttctgaagactatttccttgttctggaacattctggcagctgtagcttctgtgggacttccactgctcgggcgtcaggctcaggtagctgctggccgcatagttgttgttgctctgtgtggagggtgtggttgtctctatgcccttggtgactagggtgccattttccttcagcatggccttgttggcttggagctcctcagaggagggcgggaacagagtgaccaagggggtggccttgagcggacctgtgagtttccattcccagacctttccacaagttcctggtgatggcaccaccatggacttctcacccgataaactgggcacctggattttcctcat

SEQ ID NO: 156410 - DNA, 393 bp, Homo sapiens
  misc_feature (1)...(393): n = a,t,c or g
atttttannnnnnnnnnnggcagcagagttttattgtaaaataagagatcgatataaaaatgggatataaaaagggagaaggaggggaagggtggggtgaaaatgcagatgtgcttgcagaatgtaaaagatgttggcccttccnnnnnnnnnnnnnnnnnnnnnnnnnnnnnnnnnnnnnnnnnnnnnnnnnnnnnnnnnnnnnnnnnnnnnnnnnnnnnnnnnnnnnnnnnnnnnnnnnnnnnnnnnnnnnnnnnnnnnnnnnnnnnnnnnnnnnnnnnnnnnnnnnnnnnnnnnnnnnnnnnnnnnnnnnnnnnnnnnnnnnnnnnnnnnnnnnnnnnnnnnnaaggaagaaaaaggctgcagtaagccaagatcacgcggacgcgtggg

SEQ ID NO: 156411 - DNA, 387 bp, Homo sapiens
  misc_feature (1)...(387): n = a,t,c or g
cgcggccgcgtcgacttttgatctatagctaagtcaggcaacaaacaatagctgttgagttttaccttcagcaatgttgtgaataagaataaataagagtgctgtgaataaaataagagaataaaataaaacaaattttatccatcagataaaattctaatttggatactaaaggatgtgtgtgtctgggtatnnnnnnnnnnnnnnnnnnnnnnnnnnnnnnnnnnnnnnnnnnnnnnnnnnnnnnnnnnnnnnnnnnnnnnnggaagggtcaacatcttttacattctgcaagcacatctgcattttcaccccacccttcccctccttctccctttttatatcccatttttatatcgatctcttattttacaataaaactttgct

SEQ ID NO: 156412 - DNA, 2540 bp, Homo sapiens
gtctagagccaccgtccagggagcaggtagctgctgggctccggggacactttgcgttcgggctgggagcgtgctttccacgacggtgacacgcttccctggattggcagccagactgccttccgggtcactgccatggaggagccgcagtcagatcctagcgtcgagccccctctgagtcaggaaacattttcagacctatggaaactacttcctgaaaacaacgttctgtcccccttgccgtcccaagcaatggatgatttgatgctgtccccggacgatattgaacaatggttcactgaagacccaggtccagatgaagctcccagaatgccagaggctgctccccgcgtggcccctgcaccagcagctcctacaccggcggcccctgcaccagccccctcctggcccctgtcatcttctgtcccttcccagaaaacctaccagggcagctacggtttccgtctgggcttcttgcattctgggacagccaagtctgtgacttgcacgtactcccctgccctcaacaagatgttttgccaactggccaagacctgccctgtgcagctgtgggttgattccacacccccgcccggcacccgcgtccgcgccatggccatctacaagcagtcacagcacatgacggaggttgtgaggcgctgcccccaccatgagcgctgctcagatagcgatggtctggcccctcctcagcatcttatccgagtggaaggaaatttgcgtgtggagtatttggatgacagaaacacttttcgacatagtgtggtggtgccctatgagccgcctgaggttggctctgactgtaccaccatccactacaactacatgtgtaacagttcctgcatgggcggcatgaaccggaggcccatcctcaccatcatcacactggaagactccagtggtaatctactgggacggaacagctttgaggtgcgtgtttgtgcctgtcctgggagagaccggcgcacagaggaagagaatctccgcaagaaaggggagcctcaccacgagctgcccccagggagcactaagcgagcactgcccaacaacaccagctcctctccccagccaaagaagaaaccactggatggagaatatttcacccttcagatccgtgggcgtgagcgcttcgagatgttccgagagctgaatgaggccttggaactcaaggatgcccaggctgggaaggagccaggggggagcagggctcactccagccacctgaagtccaaaaagggtcagtctacctcccgccataaaaaactcatgttcaagacagaagggcctgactcagactgacattctccacttcttgttccccactgacagcctccctcccccatctctccctcccctgccattttgggttttgggtctttgaacccttgcttgcaataggtgtgcgtcagaagcacccaggacttccatttgctttgtcccggggctccactgaacaagttggcctgcactggtgttttgttgtggggaggaggatggggagtaggacataccagcttagattttaaggtttttactgtgagggatgtttgggagatgtaagaaatgttcttgcagttaagggttagtttacaatcagccacattctaggtaggtaggggcccacttcaccgtactaaccagggaagctgtccctcactgttgaattttctctaacttcaaggcccatatctgtgaaatgctggcatttgcacctacctcacagagtgcattgtgagggttaatgaaataatgtacatctggccttgaaaccaccttttattacatggggtctaaaacttgacccccttgagggtgcctgttccctctccctctccctgttggctggtgggttggtagtttctacagttgggcagctggttaggtagagggagttgtcaagtttcccgtgggccaggccaaccccgttctgacaaccttctggttgaaccgaaggacctaaaaggaaatctcacccatttcacaaccctgggaggatttcatctcttgtatatgatgatctggatccaccccccaataaatttatgctcagggtccaatttcttttttcttttttttttttttttttctttttctttgagactgggtctcgctttgttgccccaggctggagtggagtggcgtgatcttggcttactgcagcctttgccctccccggctcgagcagtcctgcctcaagctccgggagtagctgggaccgcaggttcatgccaccatggccagccaacttttgcatgttttgtagagatggggtctcacagtgttgcccaggctggtctcaaactcctgggctcaggcgatccacctgtctcagcctcccagagtgctgggattacaattgtgagccaccacgtccagctggaagggtcaacatcttttacattctgcaagcacatctgcattttcaccccacccttcccctccttctccctttttatatcccatttttatatcgatctcttattttacaataaaactttgctgccaaaaaaaaaaaaaaaaaa

SEQ ID NO: 156413 - DNA, 393 bp, Homo sapiens
gctgaagtagcggaattaaaggctgaaaaggagaattctgaggctcaggtggaaaatgcccaaagaatacaggtggagagattaaaacaagaatgccgaaattttagaagccaagctgaaaaagcgcaactagaagctgaaaagacattggaagagaaacagatacagtggttggaagaaaagcataagcttcatgagcgtatcacagacagagaagaaaagtacaatcaagctaaggagaaactgcagcgagctgcaattgcccagaaaaagagaaaatctcttcatgaaaacaaattgaaaagactacaagagaaagtagaagtcttggaggcaaagaaagaagaattggaaacagaaaatcaggtcttaaatagacaaaatgttcctttt

SEQ ID NO: 156414 - DNA, 2276 bp, Homo sapiens
  misc_feature (1)...(2276): n = a,t,c or g
atgagagaacgttttaggaatctagatgaagaggtagaaaagtatagagctgtatataataagcttcgctatgaacatacatttctcaagtcagaatttgaacaccagaaggaagagtatgcacgtattttagatgaaggaaaaataaaatatgaatcagagattgcaagactggaggaagataaagaagaactacgtaaccaggtgcttaatgttgatctcacaaaagacagcaaacgagtggaacaacttgctcgagaaaaagtctatttgtgtcaaaaattaaaaggtttagaggctgaagtagcggaattaaaggctgaaaaggagaattctgaggctcaggtggaaaatgcccaaagaatacaggtgcggcagttggctgagatgcaggctacagtcagatccctggaggctgaaaaacaatcagctaatttacgggcagaacgtttggaaaaagnagcctacaatcaagcagtgaacaaaatacctttttaattaataaattgcataaagctgaacgagaaataaatacattgtccagtaaagtaaaagaacttaaacattcaaacaaactggaaataacagacatcaaactggagacagcaagagctaagagtgagctagacagagaaaggaataagattcatagtgaactggatttatttacatttagacaatgaaattctcaaagcagctgttgaacatcacaaagtgctcttagtaaaaaaggatcgtgaattaatacgtaaagtacaagctgccaaagaagaaggttatcaaaaacttgtggtattacaagatgaaaagttagaactcgagaacagattagcagatttggagaaaatgaaagtggaacatgatgtctggaggcaatctgaaaaggatcagtatgaagagaaattgcgggcttcacagatggcagaagagatcaccaggaaggagcttcagagtgttaggttaaaacttcagcaacaaattgtgactattgaaaatgcagagaaggaaaaaaatgaaaattctgacctaaaacagcaaatcagtagtttgcagatccaagtgacttcacttgcacagtcagagaatgacttgctgaattcaaaccaaatgctgaaggaaatggtggagagattaaaacaagaatgccgaaattttagaagccaagctgaaaaagcgcaactagaagctgaaaagacattggaagagaaacagatacagtggttggaagaaaagcataagcttcatgagcgtatcacagacagagaagaaaagtacaatcaagctaaggagaaactgcagcgagctgcaattgcccagaaaaagagaaaatctcttcatgaaaacaaattgaaaagactacaagagaaagtagaagtcttggaggcaaagaaagaagaattggaaacagaaaatcaggtccttaaatagacaaaatgttccttttgaagactatacaaggcttcaaaaaagactaaaagatatacagagaagacataatgaatttcgaagtctaattttggttcctaacatgcctccaacagcatctatcaatcctggttagctttcagtcatcagccatgggttccaagcatggaactaccatttcctcctcatatgcaggaggaacaacatcaaagggaactctctctacttcgcaaaagactagaagaactggaaacaacacaaagaaaacaactagaggaacttggatcttccggagaatgatgttcttggagaacaggcagatcaaaagaggtgaagttggtgactcagtaaaacttgacattttaacctgtggcatttagatactttttactgtttgccaaaacacttgaatgtgcctcaagaaaaggtaccctactacatgctgtattgtatggactgtccgggattttaagattatcccaagtgaagcattaaaaagagaaattctccagagatatttagaatatttgacaatggtttgagaatgtaaaacaaaaaggaactagttagagtcaagttttaaaatttttactttgttgaatttttttttttggcattttgagtgaaatataactatcattaattctctcttcatctttgagatgcttggccataacagggtccatacacatcttctggtttactatatacaaaaactgtagttgaaaaaagatgacaatttaaaagtcagcctaaagaatgtaaaggtatctatatacaaaaggctaccttttctaaaatctgtgtgcacataattaaagagcttaatttttttttaaaaaaaaaaaaaa

SEQ ID NO: 156415 - DNA, 4868 bp, Homo sapiens
caactataagactttgattattatctgcgcactcttcactttggtcacagtacttttgtggaataagtgttccagtgacaaagcaatccagtttccacggcgttcgagtagtggcttcagagtggatgggtttgaaaaaagagcagcagcatctgagagtaacaactatatgaaccacgtggccaaacaacagtctgaggaagcattccctcaggaacagcagaaagcaccccctgttgttgggggcttcaatagcaatgtgggaagtaaggtgttagggctcaaatatgaagaaattgactgtctcataaatgatgaacacacaattaaagggagacgagaggggaacgaagtctttcttccattcacttgggttgagaaatattttgatgtttatggaaaggtggttcagtatgatggctatgatcggtttgaattctctcatagctattccaaagtctatgcacagagagccccctatcaccccgatggtgtgtttatgtcttttgaaggctacaatgtggaagtccgagacagagtcaagtgcataagtggggttgaaggtgtgccattatctacacaatggggacctcaaggctatttctatccaatccagattgcacagtatggattaagtcattacagcaagaatctaactgagaaacctcctcacatagaggtatatgaaacagcagaagacagagacaaaaacaagcctaatgactggactgtgccaaagggctgctttatggcgaatgtggctgataagtctagattcaccaatgtcaaacagtttattgcaccagaaaccagtgaaggtgtatccttgcaactgggaaacacaaaagattttattatttcatttgacctcaagttcttgacaaatggaagtgtgtccgtggttctagagaccacagaaaagaatcagctcttcactatacattatgtctcaaatgctcagctaattgcttttaaagaaagagatatatactatggcattgggcccagaacttcatggagcacagttaccagggacctggtcactgacctcaggaaaggagtgggtctttcaaacacaaaagctgtcaagccaaccaaaataatgcccaagaaggtggttaggttgattgcaaaaggtaagggattcctcgacaacattaccatctctaccacagcccacatggctgcattttttgctgctagtgattggctagtaaggaaccaggatgagaaaggtggctggccaattatggtgacccgtaagttaggggaagggttcaagtctttagagccaggatggtattctgccatggcccaagggcaagccatttctacattagtcagggcctatctgttaacaaaagaccatatattcctcaattcagctttaagggcaacagccccttataagtttctatctgagcagcatggagttaaagctgtgtttatgaataaacatgactggtatgaagaatatccaaccacacctagctcttttgttttaaatggctttatgtattctttaattgggctgtatgacttaaaagaaactgcaggggaaaaactcggaaaagaagcaaggtccttgtatgagcgtggcatggaatctcttaaagccatgctgcgccttgtatgacactggctcacgaaccatctatgacctccgtcacttcatgcttggcatcgctcctaacctggctcgctgggactatcataccacccacatcaatcagttgcagctactcagtaccattgatgagtccccaatcttcaaagaatttgtcaagaggtggaaaagctaccttaaaggcagcagggcaaagcacaactagagctcacaaccaaaactgcacttcagcctctgctgtacacagaaactacaggctctgtctcaggagagcataggcacattttaaaaggttatgtactaggtttttgtggattctatcaaagtgataagtgatccttaaaaccagccttctaaaataattgcattccatgggttgggtatttagaaatgtaggtggcatttagaacacaatgtttaatcaatgggctgaacaaagatgcttcactttgccttgcccatcaccctatacagtttcgcagatagtctagtcactctatgtgagaaagataatggtaagtagttgctactggccaactgtctagcacttacctgaaaacttagtatggagctcttttaaaatgtgattatttatatttatgttgaaagcggactttaaaaaaaaataatgtgctgtaacacagtaaatatgtacttgtagcctggatagcagactgtgttcaactttttaaaaagatgtttcctttctaaagattaatttcttgggagcaaatgagtatttgctgcatttgttcaatttgttgtatatggtgaatatttaattatggtttacttgaaacgtgtaaattaaaaacacaatcagtgttcaggcttcagttatataatgtaagcacaactaaaatgaaacttgttgactgcacaagaaattacaaaaatgtttctgttttgaaacttgatctacaatcagtaaaagtttgataatcagtatatcccttcccaacccccattgtgacagtttctttttgtcactgtctaggaattttgtattttatttcagactataccttgggagttttgtatattttgaggagagatatttttggggacattattttggaaacttattacaaatctaaatttgggaaagggagctagtagcctttaaggccaccaccatattttacttttttaggatttttccccctttaaataaaaatattagatcaaatactatatgcaagaaatcatagcaaagtttttttttcctaccaagatcattcttgatcatcagcttcccaaactagtaagtctgtgcatcattgggggtttttttttaatttaattttaaattatcccagctattagatagaagggatgttactgcacttatgtgtaatcagatctttatttaggtatacatatcctcctataccgcacataaatagatttcagagcccccatacaatgggcagtgtctgctatagggcttcaggcattaaataaaaccgagggttgttgattttgctgtgacagtacactaaatcaatactatatcttatacagtttgaaaatatgataccctacactttcaggggaccgagtctgacaaacacaatacatttatctgtgacctatatcaagtacacatttaggagccaggtaggttacctgcttacacactatattttaattgaattcaaactatcaagcactacttagaaactggaaaacatatatatgttagcatcaaagggggcagaagcaaagaagatacagatctgcaggtgaagacattggactggccatagaaaagtaagcttgaactcccacttgatgtgaccacactcttcttaattttgttcacagtaaaaacactttttttgagttattaggcttacccctagcttttgacctttgcatttcatatatggtagagggctcagcaagaatatctgggctcccctaatttttattcccagggccgagggtcaaaataaactttctccagtctggggaaccttttttacttccccatatttgttattatttaggatgggttcatacgtctgctttgtttgcatactggtcttcacattatgaggactcgatgataacagtatgggtactgcttctgtgacaaatatcgtgcctttaacaatgtgggctgtccttttccactggaaggaagggaaaggacgttttggatctaggaaataggcgttgtgatttccttgctgttggttttacactgccttcccacattgcaacaggcaagttggatttcttgtggatcccaggaattttctaagagggatggagttggaatctataggcagcattgttcaggtacaggaccagtggttctcaaactttaaaatgcctcaccatcacttgggagcttattgaaatgcagatcccagagtcagtaaatctgcctgtgaagtatgatagtctgcatttgtaatgagcattcaagtgattctgatgcaggtgagctgggggcatacagggaggaacactgccctagactatccattgcatttttgcctctaaacaactacagaattttctagggttttaaattatgtaaaatgtttacttattctgagcttagagagaatggggagggtatttttaaattttattgttttatttctttaagtttttctttgctttaagattataggtattaggtttgtttttgcttttccgcttatcttgagttcactttgatgttaaatctattgctacttccagttgtaaaacccagcccaaaagtttctggatgaaggtcaagtttgaccttttaggagttattgtacataaaggcttcatccacgaaccatccagccgcacagaagcaagtgcaaaaatggacacaagcacaactctcccagacgtggctcccttctccctttctccagtgcaagactctccactgaaagctgctactctcatcctccttgtggttgccttttccttgtttccccttcccattgtaacatgtgggttataatcccccatatgttaaatatgccaataaagtgtttacaggatgtcccttcctgaagggtagtccctttgtaaagctgtacagactttggcaggtttaaggcacaatgtgcacatgttagttttatatacagcaaaacttgattttttgcagatggaaaggtattttgtttctatacaaagtaaatggattgtttgtgcttaatgtaaagccgctttataaaactgtaaaataaagtttttttcttaaaaagaatatacctggaaa

SEQ ID NO: 156416 - DNA, 442 bp, Homo sapiens
tttaatatcaggaacacacgatcgattgattgattgttgagacaaggcctggctctgttgcccaggctggagtgcagtggcacaatctcagcttactgcaacctctgcctcccaggctcaaaccatcctcctgatctcagtctcccaagtagctgggactacaggtgtgcaccaccacgcccagctaatttttgtattttgggtagagacagggttttgccatgttgcccagtatggtctcgaattcctggggtcaagcaatcctcccgccttgacctcaccaagtgccgggattacaggagtgagccactgcatctgggcacaagtattttaaaaaggtcctcggatgggattaaacaaaccgtggtccatccataccatggactactacttagcaataaaaaggaatagactattgaaatacacaagagtttggagaatt

SEQ ID NO: 156417 - DNA, 395 bp, Homo sapiens
ggccggcagggggacctgctgctggaagagcagcggcccgagccggggccatggcgaagctgctgagctgcgtcctaggcccccggctctacaaaatctaccgggagagggactctgaaagggccccggccagcgtccctgagacgccaacggcagtcactgccccccattccagctcctgggttacttgagtttgtccaaagtggtgccgttttctcactatgctgggacattgctgctacttctggcaggtgtggcctgcctccgaagcattggccgctggaccaacccccagtaccggcagttcatcaccatcttggaagcaacacatcggaaccagtcttcagaaaacaagaggcagcttgccaactacaactttgacttccggagctggg

SEQ ID NO: 156418 - DNA, 414 bp, Homo sapiens; identical to SEQ ID NO: 124566

SEQ ID NO: 156419 - DNA, 784 bp, Homo sapiens
aattgatcgccttgaggacctgcaccgaaagtcccggaacgacccacgcgtccgcggacgcgtgggaggcgaagctgctgagctgcgtcctatgcccccgtctctacaaaatctaccgggagagggactctgaaggggcccctatcagcgagactgagacgccaactgcagacactgccccccattccagctcctgggatacgtactatcagccccgtgccctggagaaacatgctgacagcatcctggcactggcttcaatattctggcccatctcttattactcctgtaccttcgccttcttctacttgtacaggaaaggttacttgagtttgtccaaagtggtgccgttttctcactatgctgggacattgctgctacttctggcaggtgtggcctgcctccggaggcattggccgcctggaccaacccccagtaccggcagttcatcaccatcttggaagcaacacatcgggaaccaagtcttcagaaaaccaagaggcagcttgccaactacaactttgacttccggagctggccagtcgacttccactgggaagaacccagcagccggaaggagtctcgagggggccccttcccgccggggtgtggccctgcttcgcccagagcccctgcaccgggggacagcagacaccctcctcaaccgggttaagaagctgccttgtcagatcaccagctacctggtggcgcacaccctatggcgccggatgctgtatccaggctctgtgtacctgctgcagaaggccctcatgcctgtgctgct

SEQ ID NO: 156420 - DNA, 1037 bp, Homo sapiens
ggccttttcttctactttatttcatattcccaccacgataacgactcctttaatttaaactaaaaaccatacagggttcctgaaagggtggcaaaaaagaaaggaaaagacaaagactgcaggacaggtgggggagggaatcagcgaatcgtcttgactgggctcttgaagttgctggcggcttggagctgcagctggtaggccatcggatggatcttgaaaccgtagagcctgggcacaaactggttggcaggtctcttgggccggtactcgggatgcaccatgaagagcatgtgagggtaaccagtgccgtaagaggcgcccatccgtgatgatggtgtcttgatgacttgggtgtgtacacatccatgcacttggggcagtagaagcttcaccatggcttcacctgggatgtctgaaaggcccaatgggaaaccattggctggttcctcaacagtaacacacgaggacagtaacccaaagtctcccttgctggtacttttcccaaacatctgggcgaagcccacggttggtaaaggaatgtaacgggccgtggatccaatccataaagcatctcggctgcctgctcaatcaaggtcactctggttggggttgtcttccaagttcttcatcaggctcccaggtccaagatcatgtctagagcttgtcgatagtgagggacctgctcattgagtccagtaagattaaatttgtcctggatgtagtcttcaatccacttcacagaagaattcattgccacggagcccacagaaccaggaaatccaggacacctcctctgagctgctcatcttcacgtcagcggctggacggggaccaggactggggtggggtagggaagttgctacttccagggaacggcggcgaccgctacagcgcaggccgcggacccgaccgcggcaggcgaagtggggtggggggagtggaaattagggagggtggggaagagggcaacacgcaagcgccaagggtcaggtgccgcggtggatgccgggacacggagtccccggtagagaaag

SEQ ID NO: 156421 - DNA, 1826 bp, Homo sapiens
atgagcagctcagaggaggtgtcctggatttcctggttctgtgggctccgtggcaatgaattcttctgtgaagtggatgaagactacatccaggacaaatttaatcttactggactcaatgagcaggtccctcactatcgacaagctctagacatgatcttggacctggagcctggcattggccgctggaccaacccccagtaccggcagttcatcaccatcttggaagcaacacatcggaaccagtcttcagaaaacaagaggcagctttgtttactatttctttgacttccggagctggccagtcgacttccactgggaagaacccagcagccggaaggagtctcgagggggcccttcccgccggggtgtggccctgcttcgcccagagcccctgcaccgggggacagcagacaccctcctcaaccgggttaagaagctgccttgtcagatcaccagctacctggtggcgcacaccctagggcgccggatgctgtatccaggctctgtgtacctgctgcagaaagccctcatgcctgtgctggtgcagggccaggccccgactggtggaaaaatggtaatggtccgccgggcaaagcttgctggcctgtgatggcaatgagattgacaccatgtttgtggaccggcgggggacagctgagccccagggacagaagctggtgatctgctgtgaggggaatgctgggttttatgaggtgggctgcgtctccacgcccctggaagctggatattcagtcctgggctggaatcatccaggctttgctggaagcacgggggtgccattcccgcagaatgaggctaatgccatggatgtggtggaccagtttgccatccaccgcctgttcttccatccccaggacatcatcatctacgcgcgtggccatcggaggcttcactgccacgtgggcagccatgtcctacccagatgttagtgccatgatcctggatgcctcctttgatgacctggtgcccttggccttgaaggtcatgccagacagctggaggggcctggtgaccaggaccgtgaggcagcatctcaatctaaacaacgcggagcagctgtgcagataccagggtcctgtactgctgatccggaagacccaggatggaaatcttacccccacggttccttaaggacatatgttcaaaccgagccaattgcctcctggttaaagctctgcaagcatcggtatcccgggggtgatggcagaggagggtcttctagtggcgaggcagtggttggaggcctcctcacagctggaggaagcctcaatttatagccgatggggaggtggaagaggactggtgtctggtctgtcctccggctcctacccaggcagaacacggggccgactttccctgggagcgtgggggaggacatgagtgcaagatggaacggcggcaagctgggcctttgtttcctgggctcgggaaagcatcctgccacaactttggagggcccactcactgcacccccactccccagcccccagaacttccccagatgcccctggcaccctctagggacccaactgggactcattatggaagaatggggtgagaggagacatgaggaaagacccttcttatttgtgattcttctgtgtttcatgtttgctgtttataagttttgtgggaaagttgggggaccattcccccttctcaccactgttcctcttgcacgtttcccctcattcatgtggctgtacttaaccttctccaacatacatcctgcattacatgaaatgggttaattcctaataattaataaaaaggtattttttctacaaaaaaaaaaaaaaaaa

SEQ ID NO: 156422 - DNA, 445 bp, Homo sapiens
gtgacctcaaaaaacacgaagtcaagcatttaattgacaaactggaagagaagttccggctgaacaggcgagaactgattgcctttgaattcccggtgttagtggccttggaattcgccctccacttgcccgagcacgaagtcatgccccactacagacggctggtccagagttcctagcactggccccgaggacagccaagggcatttcttctcagcttggtggagcagcacttacttactactggaaatgaaaaaaagtagaactcagaataccagacttttcttcctctcgacatagtttggggagaaagcagtactagaaactttccaaggagtcttgggtgtgtagccaagaggagcccagtctttctccccggcattcacaaactttgcaagcgtggtccagggccttctccagatctgttccaacttggagtgtgaag

SEQ ID NO: 156423 - DNA, 2553 bp, Homo sapiens
  misc_feature (1)...(2553): n = a,t,c or g
atgatcgcgcctttggggctgggtgtgctggctcgggaccagtacaggcaggcagcactggctgactgggacttgaagttggacggaggaagacaatcaactggtgcagtgagtttgaaagagatcattggtctggaaggtgtggagctgggtgctgatgggaagactgtttcctatacccaatttctgttacccacaaatgcctttggagcccggagaaataccatagactccacctcctctttctcccagttccgtaacctgagccaccgcagcctctccataggccgggcaagcggcacccaggggagcctcgacacaggtagtgacctgggagactttatggactatgacccaaatctcttggatgacccccagtggccttgtggcaaacacaaacgcgttctgatcttcccttcctacatgctgtgcacacagcttccctgcagccaggcattcaagtgctcgacagtgcattcaagtgacctctcgctccatgagcggaatgagcacccttgcaaaaaacacaactgcctgctgcaggaaggccacagtccccttcaggctcctggattccgccgagcccttgttgtagctccaatgcaagttttcccgttgctcatggctttgggagttacaacagtgattgactacgtgaagccctcggaatctcaagaaggacatgaacaagttcttcaaggagaagtttcctcacattaagctgacactcaacaaaattaggactctgaaacgagagaatgcggaagcttgcgcaggaggactgtgcccttgaggagcccacggtgcccatggccttcggtctactttgaaaagctcgccctcaaggggaaactcaacaaacagaaccggaagctgtgtgctggggcatgtgtgctcgttagcagccagcanaaatttggaagtgacctcaaaaaacacgaagtcaagcatttaattgacaaactgggaagagaagttccggctgaacagggcgagaactggatttgccttttgaattccccggtgttagtggccttggaattcgccctccacttgcccgagcacgaagtcatgccccactacagacgggctggtccagagttcctagcactggccccgagggacagccaagggcaatttcttctcagcttggtggagcagcacttacttactactcggaaatgaaaaaaagtagaactcagaataccagacttttcttcctctcgacatagtttggggagaagcagtactagaaactttccaaggagtcttgggttgtgtagccaagaggagccatgagctatggactcctcaagcacgggaagaggaggtgtgtgctgagaacagagaggccctgccctctgtccactagcgagaatccctagctgccccagcccagtctttctccccgggcattcacaaactttgcaagcgtggtccagggccttctccagatcttgttccaactttggagtgtgaagggctttgagcatacgggggaagagagtcttgcagaagttggggggaaaacttttaaaagataccctcatctgtgtcaaagagtgttgccaatgctattttttgtattcagcatttggaagtgcactttccccggggggccgttttgggtgttttgaatgttgcaagtgtctgaggagatacttgcattcagccctagacccccagagccagtcccgccctttacagagcagcccttagcctggggnccatgggtcaggctgaccttcaacaattatttctagatgatttctggataagaatttgctctcttcggtaccagacagttttgacatcctccacccttaggaaaatgactgacattgttttgtttactgctcctaacccaccaaggggataaagaaggcgagttctgagtgttggatgagtcagtcgcgtggaaggacgtggagcgtggcgctctcgtaacttcctgccgtctgccaccccgccacgtgtatttaaccctcgcactttctcccactgtggaagattgggcctgggcgccgcccccacagtgtgtaatccctgtccctcctaaggttagagtgccatccagaagcacatttacctgtgcctatcctatatcctcctatataaaagtgttttattaaaaacccaggaatagggagcacgacggcatggattgggtgttttgaggcgttttgccagctggggacaaacctgccgtttggaagctgtggttaagctgactaaaggaaggcggtgggctttttctgaacattcccacgtgcccagggctgttcatgcaagaattttaaatggtgacttgtcctgggcttactgggacagtctgtaatgaggcatgtcaccacactggcgcctcaaaagctgcaagagagaggcaccagctgaagttcccctgactgaagagagcctgtggccatgtaaaaagagaattaaactcttgttgctttacgtatacaaaaagcaatatgagttcatttctatttcttaacattaccacgcgccccggtctgatcatgctagattttaatggcgacttgtcctggt

SEQ ID NO: 156424 - DNA, 478 bp, Homo sapiens; identical to SEQ ID NO: 135318
  misc_feature (1)...(478): n = a,t,c or g

SEQ ID NO: 156425 - DNA, 1725 bp, Homo sapiens
  misc_feature (1)...(1725): n = a,t,c or g
tgcatttgattttaatggatttttttggcatatgtaattttttctttttaagtaagtaaacttaagcacttgttaaagcctgaaaaaactaaaagcagtagagaattacccttatacagatggcaagatatggacaactaagtgagaaggtaagcttagacagccttgaggaactttactgttacctgctttatcaaaacatggcttcaaaaggtcagctgcatcttcactggattacagaattcttgctgactctcagaagaaattgttggagagaatagtcatacctactttaaaagagaataaatagcctttcctaaattcctctgcttcgctcctttcctggcgttgctctggaaccttgttggtgtctgtgacccaatgactgttagggtcagctagctttatattgcccctgcactggaagcaaggtttgtcagtaacaccaattaaaatactaccagtgtaagtaggaaggtgtgttttgcagatgaggaaggtgctaaggatgccttgcttatgttctctgtgttgctgtaataccatgagggggtatgttgtggcaaacctggcctttgagatcaagacgaaccccacctgccctgagaagccgtctgctaccaccacagcctacccgaattggtcctgtcccctaaacccctcacactgagaactgcttgtgtgggagagagctggttgggttgatcttttccgagtgtgacttacctccttcaaggggatgtttaagcttctcgggcaagaaagtggtgtgtctattcctgacaccaaacaccgtggtatatgtggttgtcacactcagctagtgatgataaaggtgttcttaaatatgttagctttcagttttcctgaggaagcaattttatggatacttccccctccttctcaagtgaggaatagcagagcaaattttatttgggaacttaaaccaatagttataaccaatagtttcaaaccctccctgccctcacccanctgccttcccttccctgagctcctttcccccacaccctcaaaaagaggtaccaaagtgattccccatcctggcagagggtaaattcctttggtttaaaaaagtacctgtttttccttatccttttctggttctccctaggtatcaggaaccaaggttttaattagaaatcccttaaaaaagttaaggcccaaacaaacagaaaagacaacaacagtgaaagtaagtgtccccagatgcttgtggcaaatgaaaagatggatacttttaaggattaatgttgagtatacatctaccacacatatttttcagcccagagacatttccccttttgtcaaacccgtgaaagtttggggagaaaggctgaatcctgttgggggagggttcctaatttttataggccccttgactcccattcccacccttttagttcacgcctaagttgcctttaaagacacaaatgtcttgcctaaaattggtagaaatcttttctcggaaaatctgagttatgctttattagaaatgttctgacactcatttaattttcctcccagttcaacagaagaaaagtaatggactctgatgaagatgacgattattgaactacaagtgctcacagactagaacttaacggaacaagtctaggacagaagttaagatctgattatttactttgtttattgtctatatgccttttaaaaaaataaacttgttatgcaaaataaaaaaaaaaa

SEQ ID NO: 156426 - DNA, 980 bp, Homo sapiens
ggcaatcccctcttctttttggaactgcactggaacccatcacttagaatccaagcttgtgaccgcatttaccgagtagggccagcagaaaggatgtttccatacccagatttgtttgtgggggaacggtagaagaaagtatcttacacttccaagaaaaaaagatagatttggcaaaacaatttctatcagggtctggagaatctgtcaccaagctcaccttgtctgacctcagagtccttattggcatctaccctcctgtggatagggtctcagaatagcaccattgctgctgatgatgggagaaccagttactaccttctctaacacaggctccatcctatctcttcatctcttcttgccagggatgttgcacctgtaaccatctttttatgggtggagcagagagtcaatccctgcagccaccctgcagccagccatctctgcagttctctcagtgcaggcagttcttcctctcaggctgaagatcaaaggagatgctttgtacatgaacagatgctgagtatctgttatcattgtattggttagtgtcagtgtatcatttagtatttgtatcactgtacccatttagtgttggatatcactcagtcatttaatattggttatcaccatacagcttaatatttgtatcatttggttcatgtattcgtttagtatttctaattataacatttcctatttgtaggatttgtataatatttgggtcatttttaatagtatttgtatttttacaaatttgcagtatttgtagcatttagtatcattgtttcatttagtatttggtacaattctaataaaatactaatccagtccaatactaatccaatccaatactaataatactattggtacaatccaatactaataatactattggtacaatccaatactaataatactaacagtagtattgatacaatctaataaataatgtgtttgacactgtagcagaaaaaaaa

SEQ ID NO: 156427 - DNA, 1417 bp, Homo sapiens
attcggaacgaggagtcagtggacagttttaatgactgtttgtcctgctgcaggtgaatgtgtcaggaaatgagctttgccttatgacatcccatttggagagcaccagagggcatgctgcggaacgaatgaatcagttaaaaatggttttaaagaaaatgcaagaggctccagagtcagctacagttatatttgcaggagatacaaatctaagggatcgagaggttaccagatgtggtggtttacccaacaacattgtggatgtctgggagtttttgggcaaacctaaacattgccacgtatacattgggatacacaaactgaactcctaatcttgggaataactgcctgcttgtaaacttcgttttgatcgaatatttttcagaagcagcagcagaagagggacacattattccccgaagtttggaccttcttggattagaaaaactggactgtggtagatttcctagtgatcactggggtcttctgtgcaacttaggatataatattgtaaaatgctttttcaagtgtggggttttgcccctgattgttgcaaatacaatttccaccttctgggaaaggtaggtttgctgtggagggaaataatgtactaggatccattgtcacagaaaaaccaactatgatttatggttgtgttttcagaattcaacattaaagatttaatgtttatttaaacgaacacattcctgcattcaggatgtgaggccatttaataaaaagggcacaaagccctgtcagagagttttcaacgggtggctaaaagcttgccagctgggattcccaaacaggtcccccattggtctctgagctaatgtttatatttttccattcaggcaccgaaatagttaatatttaaaataagtcttcaaaagaaaacataagagattattgagttcttgggactggatcctttatttcataagttcagatcatcttaaatgaaaatgccatgattatctgcagttaagtagatgaccagcctatcccacatccagacctggatttttgtccagcccaattaccataattgggaaagcctataattgaaacccttatggccttaaaaatcccttaactcccttttgattccatgtttgtagtcatgttgtcaacagaggcaaagttaagcttgatgatggttaaaatcgggtttgatagcacccatgggacatttttctaccaaaaataaatgcatgaagagacatagccttttagttttgctaattgtgaaatgggaaatgctttacaggaagtaaatgcaaattacttttaagtgtgctttaaagaaaaatattttccccacaagagaaatttaaataaagaattttatttgtttatggtttgttttagtatgtttttgtgtccatgatgagattaaattttttatctgcttcct

SEQ ID NO: 156428 - DNA, 532 bp, Homo sapiens
  misc_feature (1)...(532): n = a,t,c or g
ccgtntggcccccgttcccggnaaaacgttcgtcaacatcacgccagctaagtggntgtcctgntggcaangaccgntcaagttttacgtgaatggnctgacacttggggcccagaaatgttcggtgatccgggactcactgctgcaggatggggaatttagcatggatcttcgtacccaagagcaaccgcgctagtcctgctgatgggcaaagaaggtgtccacggtggtttgatcaacaagaaatgttatgaaatggccttcccacttcaggcgttcccagtactgacctcgtctgtcccttccccttcaccgctccccacagctttgcacccctttccnnnccatacacacacaaaccattttattttttgggccattaccccataccccttattgctgccaaaaccacatgggctgggggccagggctggatggacagacacctccccctacccatatccctcccgtgtgtggttggaaaacttttgttttttggggttttttttttctgaataaaaaagattctact

SEQ ID NO: 156429 - DNA, 1160 bp, Homo sapiens
  misc_feature (1)...(1160): n = a,t,c or g
gatttttaaaattgcatttgcaaagttcggtgtctgggctggcgagtgggggagggagggaatggggagcaggaagtggagtgcgagggctgctgcacagcgagcggagccgcggtccggacggcagcgcgtgccccgagctctccgcctccccccggcccgccagccgaggcagctcgagcccagtccgcggccgccagcagcagcgcccgagagcagccccagtagcagcgccatggccgtgttggaaccgcctacatcgacaacctcatggcggacgggaccctgcgtgacaggcgccatagtgcgctatcaagactctgaacctccagtctgggcacgccgtccccgggaaaacggttcgtcaacatccacgccagcttgaggtgggttgtccttggttggcaaagacccggtcaagttttttacggtgaatgggcttgacactttgggggggccagaaaatgttcggtgatccggggactcacttgcttgcaggatggggaattttagcaatggatcttcgttaccaagagccacccggtggggcccccacctttcaatgttcactgttcaccaagactgaacaaagacggctaagtcctggctgatggggcaaaggaaggtgtccacggtgggttgaccaaacaagaaatgttatgaaatggcctcccacctttcggggtttcccagtactgaccatcgtctgtcccttccccttcaccgctccccaacagcttttgcacccctttcctccccatacacacaccacccatttttattttttgggccattaccccataccccttattgctgccaaaaccacatggggctggggggccagggcttgatgggacagacaccttcccctacccatattccctcccgtgtgtggtatggaaaacttttgttttttggggttttttttttttctgaataaaaaagattctcctacccnnnnnnnnnnnnnnnnnnnnnngggggggcccttttaaaaaaacccctgggggggccaaaattaaccgggggagggaaagaaaaaatttttccctaaaaggggggccaaaaaaaacccacctgggaaattttggaaaaaaacctttctttggggggggaaaaaaatgggccaaaccccccaaaaaaaattaaagccttaaggg

SEQ ID NO: 156430 - DNA, 407 bp, Homo sapiens
  misc_feature (1)...(407): n = a,t,c or g
gggccaccaggcatgggcgcccaaggctggcggatttttcagnnnnnnnnnnnnatnnnnnnnnnnnnnnnnnnnnnnnnnnnnnnnnnnnnnnnnnnnnnnnnnnnnnnnnnnnnnnnnnnnnnnnnnnnnnnnnnnnnnnnnnnnnnnnnnnnnnnnnnnnnnnnnnnnaggaaaaccttcttctttttaaaatgctctctatataaacaaaaactgtggtggataagtgtggccatacacagaagtctctctagaaaggtaatcctatcaagcgtttttataaaaaagcaaagtgatttttatcagcttccttttttcaataaaagctgttttaaggaagtattcagtatttctgtatattcaatggaaacaaacacatggaatctgtactactcatatacaat

SEQ ID NO: 156431 - DNA, 1787 bp, Homo sapiens
gaatcttcctgcctcagcctcccaagtagctgggaccacaggcatgggcgaccatggctggctgatttttcagtttttttttttatagaaacagtctcacaatgttgcctaggctcggtctcaaactcctggcctcaagcaatccttccgccttggcctcccaaagtgctgggattacaggcgtgagccactgtgcatggccaggaaaaccttcttctttttaaaatgctctctatataaacaaaaactgtggtggataagtgtggccatacacagaagtctctctagaaaggtaatcctatcaagcgtttttataaaaaaagcaaaagtgatttttaatcagcttccttttttcaataaaaggctgttttaagggaggtattcagtatttctggtatattcaatggggaacaaacacaggggatctgtactactcatatacaatgacattaggaaagggtttagctaaattcttgtgtggcaaaatcacaaggtttatcgtttatcaaggaagacctttcatgtacattatcagagtgtgcacctgaattaccaagggctttacctttcatggggagaaaaggacagattccctgccttattcatttgcctctagattttgagatctaaatgccgggttccactttaagggtgctaccatgatgaggcaactgttacttatttgcagtcctaaatgaattgccagctggggaagtcaccaagcaggtttccttgagctctgggcttgccaaaaacacaactcagggaaaccaatcaagtacgtttttcttctcttctctttttaaaaggattgctaatccttaaggataaattataattttaatgaaagtcctttttttcaatactaagaaacaacaagtgttccagaaaggaaatctgtctcatcatgtgttactttctgttactttcaaattagcagtcactcaatgcaagaacttatcaagttcgatttctctcatttatgctagcttcctcatgaataacataattgcttttacaaaaaaatgtagttttcaaaagaaattaaaatataagatttaacaaagaaattatttctcaaaactttttttaaaaaggccctcataatcggatcctcaaataccgtgtgcaaaaccagaggatttaaaatgtttcttaagatctcatcagcccctttctaacattttctctctcctcttgccccgtatcctacacaatggactgtgtatggatgaaaattttctctgaaagaataaataagttttcttttgattaaagacaagtggaaactttatactcaaactcagaaaactagagcataatgaatcattcccagatcaattttaaaaatagatttattcaagaatgacatttctctcaaaaaaaatgttaaattgtagacatatagctgccttcattgctaaactgtgcaaacatcaaggatgactttcggtgtatctctgtcaccgtgtttattgaatctataaaaacaacaagcatctctcctctcccttaagctcaccaggcttttctttgaagtcacctctctcccccaccaatctttgactactaaattcagagatggtcctttgctgtttgaagctctgaattactacttatagacagtatttcttctcagtcaattcctacccacaaaccatccatcttaagcggcatcagtacctcctcctcaatcacttttcacacatgttctaccctagaagtcagctacgtatagaaggtaataatacatgaataggaactggtttcctctaggctgtatgtac

SEQ ID NO: 156432 - DNA, 621 bp, Homo sapiens; identical to SEQ ID NO: 152537

SEQ ID NO: 156433 - DNA, 798 bp, Homo sapiens
catcctgtccggttttttgtacatagagggccccatgtgatttctccttggaagtggtgagccagtggtacgagctggtggtgtttacagcaagcatggagatctatggctctgctgtggcagataaactggacaatagcagaagcattcttaagaggagatattacagacagcactgcactttggagttgggcagctacatcaaggacctctctgtggtccacagtgacctctccagcattgtgatcctggataactccccagggggcttacaggagccatccagacaatgccatccccatcaaatcctggttcagtgaccccagcgacacagcccttctcaacctgctcccaatgctggatgccctcaggttcaccgctgatgttcgttccgtgctgagccgaaaccttcacccaacatcggcctctgactgggaccacaggcggaaccctaggagagccgaatcagtgtttgtgaaagaggcaggactggcccagagtgacagacatacggtgatccaggaggctcaaagagaagccaagtcagctttgttgtgatttgattttttttaaaaaactcttgtacaaaactgatctaattcttcactcctgctccaagggctgggctgtgggtgggatactgggattttgggccactggattttccctaaatttgtcccccctttactctccctctatttttctctccttagactccctcagacctgtaaccagctttgtgtcttttttccttttctctcttttaaaccatgcattataactttgaaaccaaaaaaa

SEQ ID NO: 156434 - DNA, 1484 bp, Homo sapiens
  misc_feature (1)...(1484): n = a,t,c or g
gtggaattcggcggagctgggccgcgggggccccggggccggcggtgccggggtcatcgggatgatgcggacgcagtgtctgctggggctgcgcacgttcgtggccttcgccgccaagctctggagcttcttcatttaccttctgcggaggcagatccgcacggtaattcagtaccaaactgttcgatatgatatcctccccttatctcctgtgtcccggaatcggctagcccaggtgaagaggaagatcctggtgctggatctggatgagacacttattcactcccaccatgatggggtcctgaggcccacagtccggcctggtacgcctcctgacttcatcctcaaggtggtaatagacaaacatcctgtccggttttttgtacataagaggccccatgtggatttcttcctgggaagtgggtgagccagtggtacgagctggtggtgtttacagcaagcatgggagatctatgggctctgctgtgggcagattaaactgggacaatagcagaagcattctttaaggagggagatatttacagacagcctgcacctttggagttggggcagctacatcaagggacctctctgttggttccacagtgacctctccaagcattgtgatcctgggataactccccaggggcttacaggagccatccagggtacgggggaaggtgacaatgccatccccatcaaatcctgggtttcagtgaccccaagccgacacagcccttctcaacctgctcccaatgctggatgccctcaggttcaccgctgatgttcgttcccgtgctgagccgaaaccttcaccaacatcggctctggtgacaagctgctccccctccacctgagttggggtggggggggaaaagggagggcgagcccttgggaatgccgtctgatgccctgtccaaatgtgaggatctgccgtggcagggtctgcccctcccacccctctctgcccctggggancccctacactccacttgggagtctggatggacacatgggcccaggggctctgaaacaaccctcactcctttaactttcgtgttcacactcccatggaaacccccagactgggaacacaggcgggaagccctaggagagcccgaatcaggggttggtgaagaggcaggactggcccagagtgacagacatacgggtgatcccaggaggctcaaagagaagccaagtcagctttgttgtgatttgattttttttaaaaaaactcttgtaccaaacttgatctaaattcttcactcctgctccaaagggctgggctgtgggtgggatactggggatttttgggccactgggattttccctaaatttgtccccccctttactctccctctatttttctcgtccttagacgtccctcagacgctgtaaccaggctttgtgtcttttttcccttttctctcttttaccccatgcattataactttgaaaccaaaaaaaaaaaaaaaaaaagc

SEQ ID NO: 156435 - DNA, 465 bp, Homo sapiens
  misc_feature (1)...(465): n = a,t,c or g
tgaggcagagtctcgctctgtcccccaggctggagtgcagcggcccgatcttggctggctgcatgctccacctcccaggttcatgccattttcctgcttcagcctcacaagtagctgggacgacacacgcccgccaccacacccagctaattttttgcatttttagtagagaatggtctgtgttagccaggatggtctcgatctcctgaccttgtgatccgcctgccttggcctcccaaagtgctgggattacaggcgtgacaaccngcacctggcctattcagggaaggtttcaagcagaaagatgaactgagttggcttttggaagangattcacaaggacttcccacaggcagaattgaaataagggcattctagatggacaaagggcacagattgagcagcaatgggggacagtgttgactgggggacgctgaggggctgctgtggctggaatggagggct

SEQ ID NO: 156436 - DNA, 1468 bp, Homo sapiens
accatttatttaaaagatcttcctcctcccactaaattgcagtaggactttagtaataaatcagaggacagtatatgtgggggcctgtctcttcctctctattctgttccatgggctatcttgtttttgggtttttttcttttattttttttttttgtgatgaagtcttgctcttgtcaaccaggctggagtgcaatggcacaatctcgggttcactgcaacctctgcctcccgggttcaagccattcccctgtctcagcctcccgagtagctgggactacaggtgcccgcaacaaggcccggctaatttttttgtatttttttttagtagagatggggtttcaccacattagccaggatggtctcgatctcctgacctcgtgatccgcccgccttggcctcccaaagtgctgggattacaggcgtgacaacctgcgcctggccagaccattttagaattgggaaattttagtgagaaaaaatgcactgtaaatatgctttagttttaattcagttgggatgcactacctagcgaaaattgagaaactatatacttctcagagaaatatctgacatctattgtcattccattgctattttttttccccagagacttccataatttaaaataaaatcctagatccaagttcttgttttttggcataaatacttaatctattttaaatttataaaatctgagcttctaggatccagcttgtgtcaaccctttatttagcatatataactataaatcacttattacagatgctaaatagatcaccttttacagatgctgaaaatgtttggggatatgtttgttgacaagggtaaatgggaaatgaggaaactttattacttcagttttcaggatatatgggatctaggatcccaaataaatggattaatcttcattggtttctcaaattcaggttgaaatacaaattaatagcctttattgattttacttttatgagtcattgtagacatctataaatataaacagggcctgtacccaaaggatgccagaatactaggtatttttatttatcgtaaacataccacgagtgctgttgccactaccatctatttgtttgtaaataaaaagtgtttgttttcaaagccatctttaaatagttctttaaaaataggtcttttttttatattttggaaaaggcattgtttttaaagtaaagataaaatgggtaaagtcccctaattgtatttacctgtaatatccttataacatgcagatgaatgctttataagttaaatatgatgtattttttcatacttctggattatactataattcatatgaaatcttgatattagtccccacacggaaaaagtgaactgcagttgatatttggtgtttaagatagcaccattgtttaaataccgcctatgtactcccaaatgaataaaacataattccccgtcctctgagagcaaaaaaaagtcgacgcgg

SEQ ID NO: 156437 - DNA, 1498 bp, Homo sapiens; identical to SEQ ID NO: 110966

SEQ ID NO: 156438 - DNA, 484 bp, Homo sapiens
agctctgatgacgatttggatgaatatacccttagaaaaaatgtggcagttaactgtagtactgaatggaagtggcttgtagacagagcacgagttggcagccgatggacttggcttcaagctcagatttcagacctagaatgcaaaatccaacaactaacagacattcacaggcaaattcgtgcctccaaggggatagtggtcctagaagaatgtcagcttccaaaagatattttgaaaaaacaaatgcaatttgcagaccaagcagcttcactaaacattctagggaatcctcaggttccccaggagtgtcaagatcctgtaccggaacaagattttgaaatgtcaccaagcagccctactttacttcttcgaaacatcgaaaaacaggtaaagtcaaagtaaggatatcagtggtatgaaatgacttttcattgattttgtaaactattcaaataaacatcattatatgtgaaaaaaaaaa

SEQ ID NO: 156439 - DNA, 1852 bp, Homo sapiens
ttaatcttttaaaaggccctgataggtctggcctcttccatagttctcttgcctcatcttgcatgatgctttcccttgtctcatcttgcatgatgctttcccttgttctctgtgttctgtaactggatctctggtcctcagtcgagttcctctacgaggaacacaccagaaatctgccatcgccacctccacaaaaattgctctcagcaatatgaaatcctcaaacatcatactgatgcttactttaagaagcagcagctgtttttcgatgtttcgaagaagtaaagtagggctgcttggtgacatttcaaaatcttgttccggtacaggatcttgacactcctggggaacctgaggattccctagaatgtttagtgaagctgcttggtctgcaaattgcatttgttttttcaaaatatcttttggaagctgacattcttctaggaccactatccccctggtccagaggggagcccactgtcctgaagggagagactcaggactggcagcattcaccaaaagctgactgaagaagccttgggcctttagtaaacattggccgtagacaggcagtacttgctgtggccctggggcagtggtggccatgggaagggactgctctacaactgtctgatcttcaacaaacactgccacattttttctaagggtatattcatccaaatcgtcatcagagctgctatcagttgcatcggaatccaaaccctcttcaacatgagacaacagccctgtagcagaaaatgcaaatctttggatttccgcagctgtacaccgtgcaaagccattttttgcatcatcccacaatttattctctgcagtcaatgtgttaacttctggcttaatttcagtgcatttaggtaaactattacccaaaattgtggtaggttcatgaaatgtcttcattttggggagttgatgtttcatagacaatttcatctgctgaccatagtgcttaacaacatgctttgccaggagcatctgcaaatgtttctgagttcttctagcctggctaagtaaaattttctgtttgcttacacaatgaagtaaacgagcatgtacttcctcctctttttcagcagctgaagaactaacaggcacatttgagtggccaggtacaattttgttttgagtacagtgcaataaaccctttttaatctcagcatcagtaactttatccaaaagtgcattctcttgataccatttacagttttgtagttgtactttatctacattagtgtctttggttatatttgaatccagaataatttgtacatctttcatgcactggctcgtggtatctgatagaggctcctttttgatgaactcttcagaatgagaaagacagattttactgagctgaatgttgctgccattatacagtatgtttttcagcttattgcaactgggctcccctaatttcttttgtttataattctcattgtgtttatttaatgtagaattagctctcattaaaaaaacagtctggtaatgttttgaagactgaggggagccaaaatgttttaaattcacaaaattagtattaagagtaggttcaggagttggaaatccaagcatctgagaaaaggtgtctccctttagcttttcatctacagttctgggactttccatgtagagcatcttgtcagactccatggtacttggcaaagatgaaaagctgataccctttgctgttgcctccctcagagctggggtcatggcgattcctgtagataagtattggaaacctgctggggcgccctggctcccctccgccgccgcaccttcggtccggccgtggtgggggctgctgaggtgatctctagctgccacgaaa

SEQ ID NO: 156440 - DNA, 384 bp, Homo sapiens
  misc_feature (1)...(384): n = a,t,c or g
ccctcttctcaaatnnnnnnnnnnnnnnnnnnnnnnnnnnnnnnnnnnnnnnnnnnnnnnnnnnnnntacagggaagcccaccaagtaaggaaccaaggcctgccaatggctgtgtaagtgacccgtttcagaaatatccnnnnnnnnnnnnnnnnnnnnnnnnnnnnnnnnnnnnnnnnnnnnnnnnnnnnnnnnnnnnnnnnnnnnnnnnnnnnnnnnnnnnnnnnnnnnnnnnnnnnnnnnnnnnnnnnnnnnnnnnnnnnnnnnnnnnnnnnnnnnnnnnnnnnnnnnnnnnnnnnnnnnnnnnnnnnnnnnnnnnnnnnnnnnnnnnnnnnnnnnnnnnnnnnnnnnnnnnnnnnnaagcctgggtgaatgaaaccttg

SEQ ID NO: 156441 - DNA, 1416 bp, Homo sapiens
  misc_feature (1)...(1416): n = a,t,c or g
gctttcctgtcttctctgtgaatataatccatatattagactgttcacaatgtaccaaaggacactgagggcacattcaatttcttttttttttccagcttttcccttactgtgcttctactgtgctttttctcctgcagtgtataatgtgctgtcaggcttatcatgaaaatttcttatttcggttgtatcttaatctttagaagttccacttggttttctgttgtatctttcctttatcttattatattcatgctttcctttaagtaatagagttcttctttgccatcgagatccatttctatcatttctggatctgtttctattgcctgctttttctcctgattatgtacagtttttgtttctttgatgccacacaattttctattagacattagacattgtgaatgttacactgtaaatgcctggatttttttttttttttttttttttttgagacaaggtttcattcacccaggcttgaggcttgagtgcagtggcatgatctcagcttactgcagcctcaacctcctggactcaggtgagaggaactacaggtacatgccaccatgcctggctagttttcatattttctgtagagacagggtttcaccatgttgcccagcctgatcttcaactcctgcctgcctcggcctcccaaagtgctaagattacaggtgtgagccgccatgcctggcctggaggatatttctgaaacgggtcacttacacagccattggcaggccttggttccttacttggtgggcttccctgtaaggctgcttgagtgttctcttgacatgacagctggcttcctccagagtgagtaatttgagaagaggcaaggtggggggccataatgccttttatgacctagtcttagaaaatgacaacactttcatctccacaatgtcctactggctacacaggtaaaaccctattcaatgcaggaaggnnnnnnnnnnnnnnnnnnnnnnnatttgagaagaggcaaggtggggggccataatgccttttatgacctagtcttagaaaatgacaacactttcatctccacaatgtcctactggctacacaggtaaaaccctatnnnnnnnnnnnnnnnnnnnnnnnnnnnnnnnnnnnnnnnnnnnnnnnnnnnnnnnnnnnnnnnnnnnnnnnnnnngacacaatgagtaaactttccctacatataaataagaaagtgacagaaaaataattttgctcctgagaaaaattttctaatgaatacacatatatttgttcaaattctcaagttatttgactctgccaaattttcctctttctttataggtcacgttatcatactccagagattggaaaggggagatatttatttagtaagttggagactatagattaatttcttaccccacgcgtccgcccacgcgtccg

SEQ ID NO: 156442 - DNA, 658 bp, Homo sapiens
ctttggcgggaaggccccaagtggaaccagctcgcctgaatgaatctaccactttcgtgtcggtatctcgacccaccatagcctgtggtatggttggcaccatagtaagattctacatcaagtcaccaccacctctttaagtatgcagctgaccccagggataagcactggctgggctgagcagcatcacatgcgggcaacagggggccaagatggcctacctcctcatcgaggaggacattccgggaccttgcggcccagtgatgattacagaggatgccctggatctgaagctagagggaattgaaatccctttgtccctaccctcctggatggtggagaagatgagaaagtatatggagacactacggacagagaatgagcatcgtgctgttgaagcaccttccacagacctgaggccgggtccccctggccacacttggcagccttccttccaaaagccctcttcctacaacgtggctgaggccaccgctgggactgctcctagatggatctcagcgggcattaagctgtgcctgagcgagtttgtagtgactcgactgcacagcacccccagactagcatgtggttctatatttgtaaagttattgggataagaaacaattaaacagtttgtagtaaacacaaaaagtcgacg

SEQ ID NO: 156443 - DNA, 1256 bp, Homo sapiens
gtcggcgacaactcaatcgacagctggaaaaacgcgggccgtgtctttaaagacagcgataagttcgacgccaacgatccgatcctgaaagatcagacgcaagaatggtccggttctgcaacctttacatctgacggaaaaatccgtttattctacactgactattccggtaaacattacggcaaacaaagcctgacaacagcgcaggtaaatgtgtcaaaatctgatgacacactcaaaatcaacggagtggaagatcacaaaacgatttttgacggagacggaaaaacatatcagaacgttcagcagtttatcgatgaaggcaattatacatccggcgacaaccatacgctgagagaccctcactacgttgaagacaaaggccataaataccttgtattcgaagccaacacgggaacagaaaacggataccaaggcgaagaatctttatttaacaaagcgtactacggcggcggcacgaacttcttccgtaaagaaagccagaagcttcagcagagcgctaaaaaacgcgatgctgagttagcgaacggcgccctcggtatcatagagttaaataatgattacacattgaaaaaagtaatgaagccgctgatcacttcaaacacggtgaatgaaggcaaggaggagcctggaagacctgcaggggaggtctccatgggatgccttgcttctgagaagggaggcaaaagcagcaggtcaccagaagaccctgagaaacttccgatagccaagcctaataatgcctatgaatttggtcagattataaatgctctcagtaccaggaaggataaagaagcctgtgcacatcttttagccatcactgcaccaaaagatttgccgatgtttttaagtaacaaacttgaaggggatacattccttctcctcattcagtctctgaaaaataatcttattgaaaaagatccctcattggtgtatcagcatcttttatacctgagtaaagcagaaaggtttaagggattttgccgatttcggaaccaccatcaaacaggattttcgcctgctggggcaaaccagcgtggaccgcttgctgcaactctctcagggccaggcggtgaagggcaatcagctgttgcccgtctcactggtgaaaagaaaaaccaccctggcgcccaatacgcaaaccgcctctccccgcgcgttggccgattcattaatgcagctggcacgacaggtttcccgactggaaagcgggcagtgagcgcaacgcaattaat

SEQ ID NO: 156444 - DNA, 2481 bp, Homo sapiens
ggggcggccggcaaggggcgcgccgcagcggggccagaccccggaggccggcgcggacaagcgagccacggcgggcctctgcggcggcggcggcgggcggcggcgccaccgggcatccgggcggcgggcagggcgcggagaaccctgccggcctgaagagccagggccaacgagctgttccgaagcgggcagttgcccgaggcggccggcaagtactcggcggcaatcgcgctcctggagccagcaggaagtgaaattgcagatgatctaagtatcttatattcaaatagagcagcatgttacctaaaagaaggaaactgcagtggctgcattcaagattgtaacagggctctggaacttcatccattctctatgaaacctcttctgaggcgggcgatggcctatgaaactctagagcagtatgggaaagcttatgtggattataaaacagtgttgcagatagactgtggactccagctagcaaatgacagtgttaacaggctatcaagaattttaatggagctggatggaccaaattggcgggagaagctgtcacttattcctgctgtgcctgcttctgtgccactgcaagcttggcatccggcaaaagagatgatctcaaaacaagcaggagactccagcagccatcgccagcagggcatcacagatgaaaaaacatttaaagcccttaaggaagaaggaaatcaatgtgtaaatgacaaaaactataaagacgccctcagtaaatacagcgaatgcttaaagattaacaataaggaatgtgccatatatacaaacagagctctctgttacttgaagctgtgccagtttgaagaagcaaagcaggactgtgatcaggcacttcagctagctgatgggaacgtgaaagccttctatagacgagctctggctcataaaggactcaagaattatcagaaaagcttaattgatctcaataaagttatcctactagatccaagtattattgaggcaaagatggaactggaagaggtaactagactccttaatcttaaggataagacagcaccattcaacaaagaaaaggagagaaggaaaattgagattcaagaggtgaatgaaggcaaggaggagcctggaagacctgcaggggaggtctccacgggatgccttgcttctgagaagggaggcaaaagcagcagggtcaccagaagaccctgagaaacttccgatagccaagcctaataatgcctatgaatttggtcagattataaatgctctcagtaccaggaaggataaagaagcctgtgcacatcttttagccatcactgcaccaaaagatttgccgatgtttttaagtaacaaacttgaaggggatacattccttctcctcattcagtctctgaaaaataatcttattgaaaaagatccctcattggtgtatcagcatcttttatacctgagtaaagcagaaaggtttaagatgatgttgacactaattagcaagggccaaaaggagctaattgaacagctgtttgaggacctttcagacacaccaaacaaccattttactttagaagatatacaggccctaaaaaggcagtatgagctttaaatcaagataattgttagatttcttccatgcatgtatgtgttccaggaatgttaatgagatggtattgtaaaagagttgcatggataaaacttgggcctagaaaagtttggtctgcactataaaacattttacttattttcctacatagaacatgtatattctacaatctgctttttattagttgtaaatattttcttatgtaccagaaccaaataagtatatttagaacttgttaaaaatacattttaatttatgatatacatattattttaattacttgttaaaattttgagttaagttgcatttctttgggctatgaaggagtcctcttaagtttgatagaaatgaatttcttgtaacattcttttttaaaagtggaagtcattaacagtgattattatatcacttatatcctgctaagatacacataaatccccatttggtactagtacctgtggattaccagtccggttaaaatgaaatgcaacactggaagtcttataaccatgaaatgattattaaattgtttattaatttagagctataagaggaacttattttttctaatacggaagcattgcctaataattaagaacaaaaattgccaaaaatttctaccactttttactagattttaaaaagctactttcttttatattgcctatataagcaaaaaaccaaccactgtattaaagcaaactaagcctgcatttatatctgaattattacctccatattttaccaaacatttgaatgtcccccttcccccttttttgttttctgcttttatgactgtatttattcctttactgtaaaagaatatgaagaactcatacatgttgaaagctcctttgttgactgggtcaaagtgaaggaatttcaatctc

SEQ ID NO: 156445 - DNA, 454 bp, Homo sapiens
atggccgagggcgaaattacaacattcaccgccctcaccgaaaagtttaatctgcctcccgggaattacaagaagcccaaactcctctactgcagcaacgggggccacttcctgaggattcttccggatggcacagtggatgggacaagggacaggagccgaccagcacattcagctgcaactcagtgcggaaagcgtgggggaggtgtatataaagagtaccgagactggccagtactttggcaatggacaccgacgggcttttatacggctcacagacaccaaatgaggaatgtttgttcctggaaaggctggaggagaaaccattacaacacctatatatccaagaagcatgcagagaagaattggtttgttggcctcaagcggtcctcggactcactatggccagaaagcaatcttgtttctccccctgccagtctcttctgattaataa

SEQ ID NO: 156446 - DNA, 153 bp, Homo sapiens
tttaatctgcctccagggaattacaagaagcccaaactcctctactgtagcaacgggggccacttcctgaggatccttccggatggcacagtggatgggacaaggatggacaccgacgggcttttatacggctcacagacaccaaatgaggaa

SEQ ID NO: 156447 - DNA, 531 bp, Homo sapiens
atggctgaaggggaaatcaccaccttcacagccctgaccgagaagtttaatctgcctccagggaattacaagaagcccaaactcctctactgtagcaacgggggccacttcctgaggatccttccggatggcacagtggatgggacaagggacaggagcgaccagcacagtggtcttaattattcatggaccatgcaccagaggttgcaggctctaagaacaaatgaccacttcgctggtgctcacgctgtaccctcagatgcacaggtaatggggatggacgctggcgtttacacgaggaaaccaatacctacctccaccaccatcacattgcaaacgaccaaaagcacatatgttcatgatgctttgttcagagctggcccgaaaatgaatccatatgagagtcacgtgacaggagctggctatgagacttacttaagacagcaatgggaatgtccccaggttaataaactagagcatgttcaaaacagagcagggaactaccaacctcttccttctaagaagatctga

SEQ ID NO: 156448 - DNA, 513 bp, Homo sapiens
cagcagactcttgggggattccttagtgagtgagttcactgctcaaagaagggctttgccacttctgcagggaagccagccacgggccagcagtcttgaaagcgccacaagcagcagctgctgagccatggctgaaggggaaatcaccaccttcacagccctgaccgagaagtttaatctgcctccagggaattacaagaagcccaaactcctctactgtagcaacgggggccacttcctgaggatccttccggatggcacagtggatgggacaagggacaggagcgaccagcacacagacaccaaatgaggaatgtttgttcctggaaaggctggaggagaaccattacaacacctatatatccaagaagcatgcagagaagaattggtttgttggcctcaagaagaatgggagctgcaaacgcggtcctcggactcactatggccagaaagcaatcttgtttctccccctgccagtctcttataattccagagatctgttctgggaaggag

SEQ ID NO: 156449 - DNA, 4025 bp, Homo sapiens
  misc_feature (1)...(4025): n = a,t,c or g
atggctgaaggggaaatcaccaccttcacagccctgaccgagaagtttaatctgcctccagggaattacaagaagcccaaactcctctactgtagcaacgggggccacttcctgaggatccttccggatggcacagtggatgggacaagggacaggagcgaccagcacagtggtcttaattattcatggaccatgcaccagaggttgcaggctctaagaacaaatgaccacttcgctggtgctcacgctgtaccctcagatgcacaggtaatggggatggatgctggcgtttacacgagctcaaaaacaattgcagcttttgttattgtgttgctgtatcactcccaggttcatttgtctgtatccctaatcatgcagaagccccaagtgcagggaccatggctggcgctgagccagcagctgcaagaggatgtaggtctggaaaactggaatgaagtcacactagagagctggacaccaagccagctacacaagccgctcagcctggttcagctgcaagctcagtgcggaaagcgtgggggaggtgtatataaagagtaccgagactggccagtactttggccatggacacccgacgggcttttatacggctcacagacaccaaatgagggaatgttttgttcctgggagggctggaggagaaccattacaacacctatatatccaagatagcatgcagagaagaattggtttgttggcctcaagaagaatgggagctgcaaacgcggtcctcggactcactatggccagaaagcaatcttgtttctccccctgccagtctcttctgattaaagagatctgttctgggtgttgaccactccagagaagtttcgaggggtcctcacctgggttgaccccaaaaatgttcccttgaccattgggctgcgctaacccccagcccacagagcctgaatttgtaaggcaacttgcttctaaatgcccagttcacttctttgcagagcctttttacccctggcacagttttaggaccagaggggaccaaattgcttctaggagtcaactgggctgggccagtctgggtctgggtttggatctccaattgcctcttgcaggctgagtccctccatgcaaaagtggggctaaatgaagtgtgttaaggggtcggctaagtgggacattagtaactgcacactatttccctctactgagtaaaccctatctgtgattcccccaaacatctggcatggctcccttttgtccttcctgtgccctgcaaatattagcaaagaagcttcatgccaggttaggaaggcagcattccatgaccagaaacagggacaaagaaatccccccttcagaacagaggcatttaaaatggaaaagagagattggattttggtgggtaacttagaaggatggcatctccatgtagaataaatgaagaaagggaggcccagccgcaggaaggcagaataaatccttgggagtcattaccacgcctttgacctttcccaagggttactcagcagcagagagccctgggtgacttcaggtggagagcactagaagtggtttcctgataacaagcaaggatatcagagctgggaaattcatgtggatctggggactgagtgttggagttgcagagaaagaaagggaaactggctgaaggggatgccgttaaaagagggatgatttcagaaggagaaggaaaaagawagtaatgccacacattrtgcttggcccctggtaagcagaggctttggggtcctagcccagtgcttctccaacactgaagtgcttgcagatcatctggggacctggtttgattggagattctgattcagtgggttgggggcagagtttctgcagttccatcaggtcccccccaggtgcaggtgctgacaatactgctgccttacccgccatacattaaggagcagggtcctggtcctaaagagttattcaaatgaaggtggttcgacgccccgaacctcacctgacctcaactaacccttaaaaatgcacacctcatgagtctacctgagcattcaggcagcactgacaatagttatgcctgtactaaggagcatgattttaagatgctttggcccaatgcctataaaatgcccatttcgaagatatacaaaaacatacttcaaaaatgttaaacccttaccaacagcttttcccaggagaccgtttgtattaccattacttgtataaatacacttcctgcttaaacttgacccaggtggctagcaaattagaaacaccattccatcctctaacatatgatacctgatgcccatgtaaaggcctttaataagtcattgaaatttactgtgagactgtatgttttaattgccatttaaaaatatatagcttgaaagcagttaaactgattagtattcaggcactgagaatgatagtaataggatacaatgtataagctactcacttatctgatacttatttacctataaaatgagatttttgttttccactgtgctattacaaattttcttttgaaagtaggaactcttaagtcaatggtaattgtgaataaaaattgatgagagtgttagctcctgtttcatatgaaattgaaggtaattgttaactaaaaacaattccttaggtaactggaactgtcatatttaggaatgggaagggaaaatgacagtttgtgaaagttcaaagcaatagtgcaattgaagaattgacctaagtaagctgacattatggttaataatagtattttagatttgtgcagcaaaataatttcataacttttttgtttttgttacttggataagatcaatctgttttattttagtaaatctttgcaggccaagttaggggaaaatgcagtgtggccttaacgtctctttagtatgaagatttggccagaaaaagatacccagagaggaaatctaagataattataatggtccatactttttattgtatgaatcaaactcaaggcataacattgggccaagggaaaattaaataccattgctaacttgtggaatgggaagtctgtggatttcgggagatgccaaagcattgtagtaaaaacaccaatgtgacctcgaccatctcagcccaggatatcattcatatatctgtttcaatgactattaaggtgcctactgtgtgctaggcactgtactggatactggggaccttgtctgtctggtttgctgctgtatcttctcccagggcattatatttatgatgaaagatgctgtggattcaattctttcagtccaggaataaacacagactttgtaggttcctgctgaataaagcaaatcccagaaacccagatttttggaagaatcagcaacccccagcataaaataaacccctatcaaaatgtcagaggacatggcaaggtaaacttagcattttcaactttagaaccgggtcagcttcagggggactgctttcaaaatcagccaaagagcctgtcagatcttccttagaagggaagaggttggtagttcccctgctctgttttgaacatgctctaggtttattaacctggggaccattccccattgctgtcttaagtaagtctcattagcccagctccctgtcacccgtgacctcctcatatggatccattttccgggccccagcctctgaaaccaaagccatccatgaaccatatgtgccttttgggcccgntttgccaatgtgatggtggtgaaggtaggtattggtttcccttggaaggcatgataagaaagattcacaatggcccaacagtgtgtatgaacaaaaaaactgatttggagcatcagcctagtactgaaggtccttgcctttgtgtcagaggcaaaggaacccaaggcgccaagtcctcagccttgagtgtactgctgacaactaaactcacaggctgcaaagccagacctctgatgaagatgcctgttatttcacatcactgtctttttgtgtatcatagtctgcacctttacaaatattaataaatgttccgaataataggtgaaaaaaaaaaaaagaaaaaa

SEQ ID NO: 156450 - DNA, 1472 bp, Homo sapiens
atggagtcgatgtttagcagccctgccgaggcggcgctgcagcgagagaccggggtgccaggactgcttactcctcttccggacctggacggagtgtacgagctggagcgagtcgctggatttgtccgcgacctggggtgtgaacgagttgccttgcagttccctgaccagctattgggagatgctgtggctgtggctgcacgactggaggagacgacagggtcaaagatgttcattctgggtgacacagcctacggcagctgctgcgtggatgtgctgggtgctgagcaagctggagctcaggctctcatacattttggccctgcctgcttaagccctccagcccgcccactgcccgttgccttcgtgctttcgtcaacgttctgtggccttggaactctgtgtcaagacctttggggcccaaaacccagaccccaaagcgcctgtggtgctgctgagtgagccggcctgtgcccatgccctggaggctttggctactctcctgcgcccacggtacctggacctgctagtctccagcccagcttttccccaaccagtgggttccctgagtccagagcctatgcccctagagcgttttgggcgccgcttcccccttgccccagggaggcgtctagaagagtatggtgccttctatgtagggggctctaaggccagccctgacccagaccttgacccagacctgagtcggctgctcttggggtgggcaccaggtcaacccttctcctcctgctgtccagatacagggaagactcaggatgagggtgcccgggctggagggctaagggcacgaagacgatatctggtagagagggccagagatgcccgcgtggtagggctgctggcaggcacactgggtgtagcccaacaccgtgaggcactggcccacttgcggaacctgactcaggctgctggcaagcgtagctatgtgttggccctggggcggcccacccctgccaagcttgccaacttccctgaggtggatgtctttgtgctattagcctgtcctctgggtgctctagcccccccagttatctggtaggttattccagcctatactggcaccatgtgagctggaagctgcctgcaaccctgcctggccacctccaggcctggctccccacctcacacattatgcggacttattgcctggctctcccttccacgtggctctcccaccacctgagtcagagctgtgggaaaccccagacgtgtcactcattactggagatctccgacccccacctgcctggaagtcatcaaatgatcatggaagcttggctctgaccccacggccccagctggagctggctgagagcagtcctgcagcctcattccttagttcccggagctggcaagggctggagccccgcctgggtcagacgccagtgacagaagctgtgagtggaagacgagggattgccatcgcctatgaggatgagggaagcggctga

SEQ ID NO: 156451 - DNA, 423 bp, Homo sapiens
  misc_feature (1)...(423): n = a,t,c or g
cccacgcgtccgcccacgcgtccgaggacgcatgggcaggaatgccctctgcttgatcctgtggattttctactgttcagaaccagggccggggaccctctgagaagggtgnnnnnnnnnnnnnaataaaaatctcatttttttctccattaagccccaaccccctccttgccttgctttccaccccagggaccccccaggagggagcaaacggccgctattttgggacccatttaagggccccccaattttggcccccatcctttccttaacccaaattttttttcgctggagctgttttttcccaaaaagccgcatcgcccaaggttgggccctttcttaacttgccacacgaaaggttttacctttttaagaaatgggggcctgccaggccaaagggggaatcggacttttttttaataa

SEQ ID NO: 156452 - DNA, 920 bp, Homo sapiens
gtgtttgtggcttgatcgtcccccaggaagacatgccattttgtgattctggcatctgtccggacatcatcatgaacccacacggcttcccatcacgaatgacggtggggaagctcattgagctgctggctggcaaggccggtgtgctggacggcagattccactacggcactgcgtttggaggcagtaaagtgaaggatgtgtgtgaggacctcgttcgccatggttataactacttggggaaagactatgttacatccggcatcacaggtgagcccttagaagcatacatctattttggccccgtgtactatcagaagctgaaacacatggtgctagataaaatgcatgcccgggcccggggcccacgagccgtccttaccagaataataacacatttgtctaataacttgtttcaaaggcaacccactgaaggacggtctcgtgatggtggcttgcgtctcggggaaatggaacgtgactgtttaatcggttatggagccagtatgcttttgctagagagactaatgatttcaagtgatgcctttgaggttgatgtctgtgggcagtgtggacttctggggtattctggctggtgccattactgcaagtcatcctgccacgtgtcttccctccgtattccgtatgcctgcaagctgctcttccaggaactacagtctatgaacatcatccccagcactgccaggactggcagtgtacaactgtacaacttcatcaggcaagggttaggaaaggcaaaccctgagtttcctttcgaagagagtttggaaactaggaccaagtgcagaacccataggattttgcaaaagcgatttgtgaaagctgccctgtttaacaatgatgggcggaaggaaggtggtggacttagtgagcacacttccctggaacaaccattttag

SEQ ID NO: 156453 - DNA, 952 bp, Homo sapiens
gtggcttgcgtctcgggaaaattggacgtgacttgtttaatcggttatggagccagtatgcttttgctagagagactaatgatttcaagtgatgcctttgaggttgatgtctgtgggcagtgtggacttctggggtattctggctggtgccattactgcaagtcatcctgccacgtgtcttccctcccgtattccgtatgcctgcaagctgctcttccaggaactacagtctatgaacatcatccccaggttaaaactgtccaagtacaacgaatgaggatggaaaaaatgattattaaagagaacaagtgatacatccaatgcaacggaaagcagaagggatttaggactacgtctcctcctgtgaagaattcccttgcgtattctctctctaaaacaaccaaaaaaaaatggagaggctttttatatactctaagactggctaaacaaccttgatcattgagcctcgagccatgggagagatgcctgcccctgtggactgccaaggctgcttgattccacagatggatgtgaccctaaaggataaataagcctattaccttatgtgcctgatctcttgacattcactcattagaagaccttactccttcaagcaaatgtttggggtcaaatttacccatatcttctggctaaccatattcaagattcttctgaaacttggaggatgtaaagaatccatttgatttggtcagcctggcttttgtcgtggtggctggctcggataaattttcccaaccaattaaatcttgcctttacacaccccaaactttgtaattttagtcttggtgaaatataatgaatttgttcctaccttgtcaagcaagaatgtcgtcttctcctatggactcaattgctattattttaaacctgcatgattgtaccatgcaatactattcgttaaatatctgaatctaaaaaaaaaaaaaaaaaa

SEQ ID NO: 156454 - DNA, 679 bp, Homo sapiens
aaccggtttacgcagtttcggcttagtgaaacaaaagaaatcaccaatccgtatgccatgcgtttatacgaatccctgtgtcagtatcgtaagccggatggctcaggcatcgtctctctgaaaatcgactggatcatagagcgttaccagctgcctcaaagttaccagcgtatgcctgacttccgccgccgcttcctgcagatgatgatgcagtatctgtactacggaggaacagaatccatggagatccccaccactgacatcctggaggtgagactcgggagagggggagggggcctgggcaagggtgcccagcggctcggtctcccattcacccccttcagagggaaggtggctcttcctctccatctgacaggaagagcagttcccagaaagaggaactgtgcacaccactgagcccagcctcagtgcgtgtcccagcggggatggttaggcccaggagtatcagaaggtagtggggcctgagggtggaggcagcagggcacacggcactcgggagctttctgttcggtgctgtctgggccactggtctggccatgggtccccaagacctgctctgcctccctaccagctgctgtcagctgccagcctgttccagctggatgccctgcagaggcactgcgagatcctgtgctcccagaccctcagcatggagagt

SEQ ID NO: 156455 - DNA, 2064 bp, Homo sapiens
atgacagcctccataaggaggtatcacacgtgtgctacagatggagaaccagactcgagtgtgcttgtcggaggggatggtgacctgaccctgctggtggcagccctgggtttggacctgggtctgcccttcatgctgctgccgcccctcatggagtggatgcgcgtggccatcacctacgcagagcaccgccgcagcctcaccgtggacagcggcgacatccggcaggcagcccggctgctgctgcctgacccgaacactgtttcagttccttccgggaggctggatgcccgagcagctactgaaaaattcaaccaggacctgggtttccgcatgctcaactgtgggaggacggacctcatcaaccaagccatcgaggccttgggtccggatggggttaacaccatggatgaccagggtatgacgccactgatgtacgcctgcgctgctggggacgaagcgatggtccagatgttgattgatgctggggcaaacttggacatccaggttccaagcaactcccccaggcacccttccatccaccccgacagccggcactggacctcactgacattcgctgtgctgcatggacacatctctgtggtccagttgctgctggatgctggtgcccatgtcgagggctcggcagtgaacggcggcgaggacagctatgcggagacgcccctgcagctggcctctgcggcagggaactatgagctggtcagtttgttgctgagccgaggcgccgaccccctcctcagcatgctggaggcccacggcatgggctcctccctccacgaggacatgaactgcttcagccactcagctgcccacggccacagaggtatatggggattggtgaccctgggacccctggcctgcctggaggaggaagaccatgaaactccgagccctcgggtaccccagagcagcccgtcggggcaggagggcactgggggacagctcaggaacgtcctgaggaagctcctgacgcagccacagcaggctaaagcggacgtgctgtccctggaggagatcctggccgagggtgtggaggaaagtgatgcgtcgagccagggcagtggcagcgaggggcccgtgcggctgagccggacccgcaccaaggccctacaggaggccatgtactacagcgctgagcacggctacgtggacatcaccatggagctgagggcactgggagtcccctggaagctgcacatctggatcgagtctctgaggacctcgttctcgcagtcgcggtactcggtggtgcagagcctcctgcgggacttcagctccatcagagaggaggagtacaacgaggagctggtgaccgagggcttgcagctcatgttcgacatcctcaagaccagcaaaaacgactccgtcatccagcaactggctaccatcttcacccactgctatggcagcagtcccatccccagcatcccagagatccggaagaccctgccggccaggctagatccacactttttgaacaataaggagatgtcagatgtgaccttcctggtggaaggaaagctgttttatgcacataaagtcctgctggtgacagcttctaacaggttcaagacactaatgaccaataaatcagaacaggatggggacagcagcaagaccatcgagatcagcgacatgaagtaccacatttttcagatgatgatgcagtatctgtactacggaggaacagaatccatggagatccccaccactgacatcctggagctgctgtcagctgccagcctgttccagctggatgccctgcagaggcactgcgagatcctgtgctcccagaccctcagcatggagagtgccgtgaacacctacaaatatgccaagatccacaatgccccagaactggccctgttctgtgagggcttcttcctcaagcacatgaaggccctactggagcaggatgccttccggcagctcatctacggccgcagcagcaaagtgcagggcctggatccactgcaggacctgcagaacaccctggcagagcgcgtgcactctgtctacatcacctcccgggtcagcagctga

SEQ ID NO: 156456 - DNA, 1237 bp, Homo sapiens
tttattttacgagatggagtcttgctctattgcccaggctggagtgcagtggctcagtctcggcttactgcaagctccgcctcccaggttcatgtcattctcctgcctcagcctcttgcgagctgatgttttttaagatctgaagtttgatatatacagtcattaattcagagttaagactgcagaagtagatgaagaaattctggaattccttaatttatttgtggcagcactcagaatgcacggcttcacaagagactgcatttttttctcctttgcaactaatagggctgtgcaatattaaactcatcacggcttggaagattcctgtgaatatttcaatactgtccagtcttaaagctgcagagaatcgggctttgcagaacactccactgtttttaatggcatgaatttaacagtgtttggcatggtgtcactgcccaacactttcagataactcaactgaagaagttgaccctatcttctgcaaaataacatgagtatatacttgagaaaagcctcaacatttttttttggctgccatttttaagctacctcaaaggagataacagaaaaacaaggagtactgatgatggaagcatctggtccctcttgcagagtgatgaatgattttattggtggcagctgggtggcaggacaatccagggcatccagttatgcctgatccccaataagtgaaatctttgttcattttctttttatacacccgtctgcttcctaaaacctggacaccatttaatgggtgcccttgggtcaaatcttaaatgatcttactttcataattctttggattctaggcttgccagagtcaagacgaactcctaacctcatggggatgggacaaactgggaagatgtaaaataagtaaggctttcctggggcccaaaaagccctcttccttacagaaaatcaaattttaaaagaacattgaccctcaaaacaataaaactgtccctggttatgcaatagaaatagcctatataaatggaatcatatccttaatgaacacctcctgtggctacccaacttttcacacatcttactgattataggccttgctgtgaatgctttcttgctctatctgaagtattcccaccagagttgtttccaactttatttcctatattatgaaaaatgaagtttttttaacattgttaacaaagtatatgaaagataatgtatactgtattaaataaaccattatacaaaaataaaa

SEQ ID NO: 156457 - DNA, 465 bp, Homo sapiens
attagaaagcccttgacccgcgctgcaggaattcggcacgagcgcgattctgagaggtgggcttttagtccctccagacctcggctttagtgctgtctccgcttttctttcaccttcacagaggttcgtgtcttcctaaaagaaggttttattgggaggtaaaggtcaatgcgtaggggtagagtaagaattctgcttggtcagaatcgtgatggcattgtgttcagcactgatgactattttcaccatcaagatgggtacaggtataatgttaatcaacttggtgatgcccatgactggaaccagaacagagcaaaacaagctatcgatcagggaagatctccagttataatagataacactaatatacaagcttgggaaatgaagccatatgtggaagtggccataggaaaaggatacagagtagagtttcatgaacctgaaacttggtggaaatttgatcct

SEQ ID NO: 156458 - DNA, 1617 bp, Homo sapiens
atgtcttatggtgaaattgaaggtaaattcttgggacctagagaagaagtaacgagtgagccacgctgtaaaaaattgaagtcaaccacagagtcgtatgtttttcacaatcatagtaatgctgattttcacagaatccaagagaaaactggaaatgattgggtccctgtgaccatcattgatgtcagaggacatagttatttgcaggagaacaaaatcaaaactacagatttgcatagacctttgcatgatgagatgcctggtaatagaccagatgttattgaatccattgattcacaggttttacaggaagcacgtcctccattagtatccgcagacgatgagatatatagcacaagtaaagcatttataggacccatttacaaaccccctgagaaaaagaaacgtaatgaagggaggaatgaggcacatgttctaaatggtataaatgacagaggaggacaaaaagagaaacagaaatttaactctgaaaaatcagagattgacaatgaattattccagttttacaaagaaattgaagagcttgaaaaggaaaaagatggttttgagaacagttgtaaagaatctgaaccttctcaggaacaatttgttccattttatgagggtcataataatggtctcttaaaacctgatgaagaaaagaaagatcttagtaataaagctatgccatcacattgtgattatcagcagaacttggggaatgagccagacaaatatccctgtaatggacaagtaatacctacattttgtgacacttcatttacttctttcaggcctgaatggcagtcagtatatccttttatagtgccctatggtccccctcttcccagtttgaactatcatttaaacattcagagattcagtggtccaccaaatccaccatcaaatattttccaagcccaagatgactctcagatacaaaatggatattatgtaaataattgtcatgttaactggaattgcatgacttttgatcagaacaatgaatatactgactgtagtgagaataggagtagtgttcatccctctggaaatggctgcagtatgcaagatcgatatgtgagtaatggtttctgtgaagtcagagaaagatgctggaaagatcattgtatggacaagcataatggaacagacaggtttgtgaaccagcagtttcaagaggaaaagttaaataaattgcagaagttacttattcttttaagaggtctgcctggttctgggaaaacaacattgtctcgaattctgcttggtcagaatcgtgatggcattgtgttcagcactgatgactattttcaccatcaagatgggtacaggtataatgttaatcaacttggtgatgcccatgactggaaccagaacagagcaaccagcagactaatggggatgaggttctggtacaagatgatgaacaccagtatgtcagacaatgacttgggagctggaatcaaggacatgaccaagagcagcaagaacaaaagggagactgacacattgatcactttctcaacctttgatctcttgagaggtgatttgacggaattctgcatgaattttgtttcaaatccagtgcaaacaactatgccaataatccgctga

SEQ ID NO: 156459 - DNA, 2115 bp, Homo sapiens
gcggggaggtgaggtttgttaccgcgattctgagaggtgggcttttagtccctccagacctcggctttagtgctgtctccgcttttctttcaccttcacagaggttcgtgtcttcctaaaagaaggttttattgggaggtaaaggtcaatgcgtaggggtagagtaagatgtcttatggtgaaattgaaggtaaattcttgggacctagagaagaagtaacgagtgagccacgctgtaaaaaattgaagtcaaccacagagtcgtatgtttttcacaatcatagtaatgctgattttcacagaatccaagagaaaactggaaatgattgggtccctgtgaccatcattgatgtcagaggacatagttatttgcaggagaacaaaatcaaaactacagatttgcatagacctttgcatgatgagatgcctggtaatagaccagatgttattgaatccattgattcacaggttttacaggaagcacgtcctccattagtatccgcagacgatgagatatatagcacaagtaaagcatttataggacccatttacaaaccccctgagaaaaagaaacgtaatgaagggaggaatgaggcacatgttctaaatggtataaatgacagaggaggacaaaaagagaaacagaaatttaactctgaaaaatcagagattgacaatgaattattccagttttacaaagaaattgaagagcttgaaaaggaaaaagatggttttgagaacagttgtaaagaatctgaaccttctcaggaacaatttgttccattttatgagggtcataataatggtctcttaaaacctgatgaagaaaagaaagatcttagtaataaagctatgccatcacattgtgattatcagcagaacttggggaatgagccagacaaatatccctgtaatggacaagtaatacctacattttgtgacacttcatttacttctttcaggcctgaatggcagtcagtatatccttttatagtgccctatggtccccctcttcccagtttgaactatcatttaaacattcagagattcagtggtccaccaaatccaccatcaaatattttccaagcccaagatgactctcagatacaaaatggatattatgtaaataattgtcatgttaactggaattgcatgacttttgatcagaacaatgaatatactgactgtagtgagaataggagtagtgttcatccctctggaaatggctgcagtatgcaagatcgatatgtgagtaatggtttctgtgaagtcagagaaagatgctggaaagatcattgtatggacaagcataatggaacagacaggtttgtgaaccagcagtttcaagaggaaaagttaaataaattgcagaagttacttattcttttaagaggtctgcctggttctgggaaaacaacattgtctcgaattctgcttggtcagaatcgtgatggcattgtgttcagcactgatgactattttcaccatcaagatgggtacaggtataatgttaatcaacttggtgatgcccatgactggaaccagaacagagcaaaacaagctatcgatcagggaagatctccagttataatagataacactaatatacaagcttgggaaatgaagccatatgtggaagtggccataggaaaaggatacagagtagagtttcatgaacctgaaacttggtggaaatttgatcctgaagaattagaaaagaggaataaacatggtgtgtctcgaaagaagattgctcagatgttggatcgttatgaatatcaaatgtccatttctattgtaatgaattcagtggaaccatcacacaaaagcacacaaagacctcctcctccacaggggagacagaggtggggaggctctcttggctcacataatcgtgtctgtgtcacaaataatcattaaattagctattttcagctaacacatttgttgttgcacttgaaaaagagttagtgagcctgtcttggagtttaagtagtttcaaataaaaaaaggctacagtgcctcacaaaggatgttcccagcaagttgtttaaattcccagcaagttgttaaagtgtaaataaaaatatatgaaattgtaaaaaaaaaaaaaaa

SEQ ID NO: 156460 - DNA, 948 bp, Homo sapiens
gttagcatctgtaattgtgtagatttaagtgtaaagtgatttgaaatctgaaatctttgtaagattattcagctcttgtgctggtctgttcgtgatatactttcaggtaagtatcagaaatccatttaataacctttcctgtgtgatttatttcacttggttatatttatttctgatagtttatttctgatggttatagattttgtaaatggcacctttatgatttcttttattaacagaattctgcttggtcagaatccgtgatggcattgtgttcagcactgatgactattttcaccatcaagatgggtacaggtataatgttaatcaacttggtgatgcccatgactggaaccagaacagaggtttgttttgggctaagtgtcccaggatagaatatttggctaggagtcaaaagacctagattttattttcagcttaggtttttaccagctgaatgactgtaggcaagccgtttaaatagctttgagacctaatttctccatctgttagaggtggtgataattatacttgccctacctgatcagggtttttgtgaaaagcagagaatttagataaaacgctttgtaaactgtaaatgagtttatccagtataagctggtaaaataatagcagcatgggatattttaagaggctttattttatacttgatgagtaaattcagagaactttgaatctgtaccattgttatgtagtcccaaagttatttccccgagaataatgctaatgttttccaaggcttaatatactggttgtgaatattaaaagtttttccccattggatattgcccctacaagaaaccctactttaatacattttttagcggacatggggccatttccgggttatccataatagggggtcctaacccggggctacacttttgaatttcttggggactttaaaaaaaaagcaaaaaaaaaaaa

SEQ ID NO: 156461 - DNA, 871 bp, Homo sapiens
tttttaagatggagtctggctctgttgcccaagctggagtgccgtggcacaatctcagctcactgcaacctccgccccccgggttccagtgatcctcctgcctcagcctcccaaatagctgcaaccacaggcgtgcaccaccacaaccggctaatccctgcatttttagtagagacagggttttgccatgttgaccaggctggtcttgaactcctgaccccgtgatccacccgcctcggcctcccaaagtgctgggattacaggcgtgagccaccgcacccagacccctcttgtccattcttttcatggatgaggaggctgaggcccaagctggtcaggggggtgccaggactggggctccgacattttctctcccaggggattctcaggatccctctatgggaacatgatcagtggctttaaggggccaggggctttccctccagccagccctggactcacaggcctcagagaacctggagaagccagcctcgcatggctgggattttcatcgggagaatcccactggccatgtactgggctctctcccagtccctgagattgggctctgggctcagcgctgagcaggacccaaggaagtggcttaagtctttgtggccaggcggtgtctgctgtagaaagcagtgtggcatgtggccaggtggtactgtggtcagggagagaggttgcctggggctgtccaggcttcagcctgggaaagggagcacccggggaaccaagacaaggtgcagggctggagacagctttgggctcggctgtcggggaagcatattggcaggaggggcctcctagatgtctggtcagagatggccagggggcacgaaatcgtcgacccgggaattcagggcga

SEQ ID NO: 156462 - DNA, 784 bp, Homo sapiens
gatcatgtactataaatcacagcattgtggatgcaatgggattagacatgaagaaaaattttatatttttaataaagactggttactaaccttaaggaatatacttagactctgaaagtaaaaggaaagtgcaatgaccatatttgttcattcatctgcctattttcaaatctaatgatgatttggttgatgcaaatatgtccctaatctaggctataaatgataaaaacaaaaatgtttaaagttctaacttttgttagcagtatacacctaagaattttccaagtattacaaaatacttggaaggaaagactttaatataccactttcaaaatcctatgtacccaaaccagcaatgaagtggtgggatatataacgttaccttgggcaaaatttaagaaaataaagacacaatagctctaatttttttttttttttttttttttttgagacggagtctcgctctattgcccaggcttgcatgcagtggtgctatctcagctcactgcaatcactgcctcctgggttcaagcgattctcctgcctcagcctcccaagtagctgggatgacaggtgcccgccaccatgcctggctaattattgtatttttagtagagacagggttttgccatgttggccaggctggtctcgaactcctgatctcaggtgatccacctgcctcggcctcccaaagtactgggattacaggcatgatctaaattctttatacccttcaagggcaggaaaccagtatctctgaaaagcttgtttgttttaatacaat

SEQ ID NO: 156463 - DNA, 374 bp, Homo sapiens
  misc_feature (1)...(374): n = a,t,c or g
aaagaggcccctggtcttaaaaaggaaaacaactcgttttgtttgtgcaatatgtcagatcaacatggaaggaaagacattgtgctccaagaaggacaggcctatctgcaagagccatgccttctttcatgtgtgagccctttatgaacacagctgccgcggtggccaataaagagaggggcctggagtcgtggccatgcatttttgggtagggctggcaatggttaccttaaccctgggtcntggaaaaagcntggggntncnngggnnntgnnccanccaccttatcctcccaccccactccctccaccaccacagcacaccggtgctggccacaccagccccctttcacctccagtgccacaataaacctg

SEQ ID NO: 156464 - DNA, 412 bp, Homo sapiens
  misc_feature (1)...(412): n = a,t,c or g
atgcggcacgagataattcctcttgctgtgatggttcgtcctcaatgacaggtcccttatagtatttaggtacaacaaggtcttttgtgcttggaatgcccttgaaaaagctgcctcacctgtttgtgaagggatccccaaacataaagggagnnnnnnnnnnnnnnnnnnnnnnnnnnnnnnnnnnnnnnnnnnnnnnnnnnnnnnnnnnnnnnnnnnnnnnnnnnnnnnnnnnnnnnnnnnnnnnnnnnnnnnnnnnnnnnnnnnnnnnnnnnnnnnnnnnnnnnnnnnnnnnnnnnnnnnnnnnnnnnnnnnnnnnnnnnnnnnnnnnnnnnnnnnnnnnnnnnnnnnnnnnnnnnnnnnnnnnnnnnnnnnnnnnnnnnnnnnnnnnnnnnnnnnnnnccctcgtgcc

SEQ ID NO: 156465 - DNA, 424 bp, Homo sapiens
  misc_feature (1)...(424): n = a,t,c or g
cagttatgcgaagatcggcacgagataattcctcttgctgtgatggttcgtcctcaatgacaggtcccttatagtatttaggtacaacaaggtcttttgtgcttggaatgcccttgaaaaagctgcctcacctgtttgtgaagggaaccccaaagagnnnnnnnnnnnnnnnnnnnnnnnnnnnnnnnnnnnnnnnnnnnnnnnnnnnnnnnnnnnnnnnnnnnnnnnnnnnnnnnnnnnnnnnnnnnnnnnnnnnnnnnnnnnnnnnnnnnnnnnnnnnnnnnnnnnnnnnnnnnnnnnnnnnnnnnnnnnnnnnnnnnnnnnnnnnnnnnnnnnnnnnnnnnnnnnnnnnnnnnnnnnnnnnnnnnnnnnnnnnnnnnnnnnnnnnnnnnnnnnnnnnnnnnnnnnnnnnnnccctcgtgcc

SEQ ID NO: 156466 - DNA, 591 bp, Homo sapiens
ctgcctccccaggttcatgccaattctccctgcctctacctcccaagtagctgggaatacaggtgcccaccaccatgcccggctaatttttgtattcttagtagaggtggggtttcaccatgttggccaggctggtctcttaactccttacctcaaatgatccacccacctcggcctcccaaagtgctgggattatagatgtgagccactgcacccagccctttcctctccctttctctttggggttcccttcacaacaaggtgaggcagcttttttcaagggcattccaagcacaaaagaccttgttgtaccttaaatacttataagggacctgtcattgaggacgaaccatcacagcaagaggaattatctcgtgccgcatcttcgcataactgaccaggatccctggcaaggatgtctcaatgcagaaagttggctaagtgaactgcagtatctaccctggacctaaaagaacttgctaatgttttcaagactacaattcagaggctgtctgatttaatctttgcatttacaaaaacaccctttttacgtacattaaatgtggaataaaactaaaaaaaaagtcgacg

SEQ ID NO: 156467 - DNA, 523 bp, Homo sapiens
  misc_feature (1)...(523): n = a,t,c or g
ggganccgtcagtcttnttcctgtggttccctctcatttgtcccagttactaactacggaaatagcatcctctgctggtgctaagtgtgattaggaagaagcctggggagaggcgagtctggaattttggtcncaagagggaaggacttggagaggagaattagttttctaggctcattggcatttagtttccctaggaaaggggtcaaaacttcaagacactggtggtggtgggagatcaggaaaataacttggcctagctcaaacaatattggataatcccctccttgggggagagggattagagtgtgctcctactggccccttggagcctcccctagcttacacagttaacttgattttaaaatccaaggccnggagagnngaatnnnaaaagcaatatttttcatcacatgccaaaaacgggggatagagagaaggagtggcagcctaggcccctccgatattttttattctgattagccattttaaaccaacgaggaataaaaagaaatcctgatct

SEQ ID NO: 156468 - DNA, 439 bp, Homo sapiens
ctgacacccaaagatgaagtacagctgaagaccacctacagcaaatccaacgggcagcccaagagcttaggtcagctcccctggccaaccagacacgcaatggaagcctatcttatgacagcttgctcacaccttcagacagccctgattttgagtcagtgcaggcagggctgagccagacccacctttaggctatacctctcccttcctgtcagccaggctggccagcaacgggaagctgagaggcaccacgtttggtgccaactggcccaacacaccgagagccctcaccagtccgttacgacaatctgtcgcgccacattgtggatctctcagtagccccacgaggggaggagtcaagaaggtgtcaggggttggtggtacacctatgagatttcggtgtgagcttcggacctcccctccccaacgcctctgccct

SEQ ID NO: 156469 - DNA, 540 bp, Homo sapiens
atgtacaagtatcggccgggttacagtagcagcagtacgtcagctgccatgccgcattcctccagcgccaaggtactgagtactctaagagccaggctggcccagcaacgggaagctgagaggcacccacgtttggtgccaactggcccaacacaccgagagccctcaccagtccgttacgacaatctgtcgcgccacattgtggcctctctccaggaacgagagaagttgctgcgccagtcacccccactcccgggccgcccaacagccccatacctgggccgatcgatgtcttacagcagccaaaaagcccaacctggtgtctctgagacagaagaagtggccttgcagccattactgacacccaaagatgaagtacagctgaagaccacctacagcaaatccaacgggcagcccaagagcttaggctcagcctcccctggcccaggccagccacctctcagtagccccacgaggggaggagtcaagaagttactaactacggaaatagcatcctctgctggtgctaagtgtgattag

SEQ ID NO: 156470 - DNA, 1555 bp, Homo sapiens
atgccgtattcactaaacctggccataagggacacctttgtgaatgcctctcggaccctgtacagcagcagccccagagtcctaagcaacaacagtgacgccaacttggagctcatcaacacctgggtggccaagaacaccaacaacaagatcagccggctgctagacagtctgccctccgatacccgccttgtcctcctcaatgctatctacctgagtgccaagtggaagacaacatttgatcccaagaaaaccagaatggaaccctttcacttcaaaaactcagttataaaagtgcccatgatgaatagcaagaagtaccctgtggcccatttcattgaccaaactttgaaagccaagttgagtcgtggggacagcttgaaggagccaacctcaattgcagagagcagccgtcaccccagctaccgctcagagcccagcttggaaccagagagcttccgttctcctacctttggcaaaagttttcacttcgatccactatccagtggctcacgctcctccagcctcaagtcagcccagggcacaggctttgagctgggccagttgcaatccattcgttcagagggcaccacctccacctcctataagagcctggccaaccagacacgcaatggaagcctatcttatgacagcttgctcacaccttcagacagccctgattttgagtcagtgcaggcagggcctgagccagacccacctttaggctatacctctcccttcctgtcagccaggctggcccagcaacgggaagctgagaggcacccacgtttggtgccaactggcccaacacaccgagagccctcaccagtccgttacgacaatctgtcgcgccacattgtggcctctctccaggaacgagagaagttgctgcgccagtcacccccactcccgggccgtgaggaagaaccaggcttgggggactcaggcattcagtcaacaccaggctcgggccatgcccctcgtactagttcctcctcagatgattcaaagagatcacctttggggcaagactccactgggacggccagctgttccccgttttggcaagccagatgggctataggggccggggagtagggttccctgaaccaggcccaacagccccatacctgggccgatcgatgtcttacagcagccaaatagcccaacctggtgtctctgagacagaagaagtggacttgcggccattactgacacccaaagatgaagtacagctgaagaccacctacagcaaatccaacgggcagcccaagagcttaggctcagcctcccctggcccaggccagccacctctcagtagccccacgaggggaggagtcaagaaggtgtcaggggttggtggtaccacctatgagatttcggaatttgatcatcactgcccctgggtgaataactgtattggtcgccggaactaccgttattttttccttttcctcctttccctgacagcccacattatgggtgtgtttggctttggcctcctttatgtcctctaccacatagaggaactctcaggggtccgcacggctgtcac

SEQ ID NO: 156471 - DNA, 1826 bp, Homo sapiens
acgcgtcgggaagctgagaggcacccacgtttggtgccaactggcccaacacaccgagagccctcaccagtccgttacgacaatctgtcgcgccacattgtggcctctctccaggaacgagagaagttgctgcgccagtcacccccactcccgggccgtgaggaagaaccaggcttgggggactcaggcattcagtcaacaccaggctcgggccatgcccctcgtactagttcctcctcagatgattcaaagagatcacctttgggcaagactccactgggacgcccagctgtcccccggttttggcaagccagatgggctaaggggccggggagtagggtcccctgaaccaggcccaacagccccatacctgggccgatcgatgtcttacagcagccaaaaagcccaacctggtgtctctgagacagaagaagtggccttgcagccattactgacacccaaagatgaagtacagctgaagaccacctacagcaaatccaacgggcagcccaagagcttaggctcagcctcccctggcccaggccagccacctctcagtagccccacgaggggaggagtcaagaaggtgtcaggggttggtggtaccacctatgagatttcggtgtgagccttcggcacctcccctccccaacgcctctgcgcctacaccaaaagggcccccaggtggccaaccttccttccctccaaggggcttcccctcccgtgcatggacattttttaaaccaccgattccaagaggatgaggagtgttttctaaaatgcagtaggcttgggggagtcggagagttggggccctgagacgtggggtagcaaccccccctttttatctttttaagaccttcccttccttgatccctggaccagactcagtggacatttgtgcaattgctcggccctggagggaaccagatcatttttaaaccagaaataatttttttttaattattgttacggattctatttttttcctcttctgcgttaccagggtgtgtgtgtacatataatatatatatatatatatattataaatatcaaagaaattatatatctatcctgggatgggaaaatgagggagggatacatatacggaggggggatcttactcttcccattcctcagaccagcaggaaaagaggggagacgtcagtctttttcctgtggttccctctcatttgtcccagttactaactacggaaatagcatcctctgctggtgctaagtgtgattaggaagaagcctggggagaggtgagtctggaattttggtcacaagagggaaggacttggagaggagaattagttttctaggctcattggcatttagtttccctaggaaaggggtcaaaacttcaagacactggtggtggtgggagatcaggaaaataacttggcctagcctcaaaccaatattggataatcccccctccttgggggagagggattagagtgtgctcctactggccccttggagcctcccctgagcttacacagttaacttgattttaaaatccaaggcccaggagagaagaatcccaaaaagcaatatttttcatcacatgccaaaaacgggggatagagagaaggagtggcaggcctagggcccctccgattgtcccttgggggttaccccctcagcccacctcactatggtgctgggtagaggggatacctgggttctaacctctaaataggggagatcccagcctccacaaagaggcccttttattttttattctgattagccattttaaaccaacgaggaataaaaagaaatcctgatctaaccagcaaaaaaaaaaaaaaaaa

SEQ ID NO: 156472 - DNA, 2265 bp, Homo sapiens
gcccaacatggctggagcgcggcggaggtgagccggccgcccgcccgcagacgccccagcctactgcgcccgagtcccgcggccccagtggcgcctcagctctgcggtgccgaggcccaacggctcgatcgctgcccgccgccagcatgttgggcgccccggacgagagctccgtgcgggtggctgtcagaataagaccacagcttgccaaagagaagattgaaggatgccatatttgtacatctgtcacaccaggagagcctcaggtcttcctagggaaagataaggcttttacttttgactatgtatttgacattgactcccagcaagagcagatctacattcaatgtatagaaaaactaattgaaggttgctttgaaggatacaatgctacagtttttgcttatggacaaacctggagctggtaaaacatacacaatgggaacaggatttgatgttaacattgttgaggaagaactgggtattatttctccgagctgttaaacacctttttaaagagtattgaagaaaaaaaacacatagcaattaaaaatgggcttcctgctccagattttaaagtgaatgcccaattcttagagctctataatgaagaggtccttgacttatttgataccactcgtgatattgatgcaaaaagtaaaaaatcaaatataagaattcatgaagattcaactggagggaatttatactgtgggcgtttaccaacacgtactgtgaatacagaatcagagatgatgcagtgtttgaagttgggtgctttatcccggacaactgccagtacccagatgaatgttcagagctctcgttcacatgccatttttaccattcatgtgtgtcaaaccagagtgtgtccccaaatagatgctgacaatgcaactgataataaaattatttctgaatcagcacagatgaatgaatttgaaaccctgactgcaaagttccattttgttgatctcgcaggatctgaaagactgaagcgtactggagctacaggcgagagggcaaaagaaggcatttctatcaactgtggacttttggcacttggcaatgtaataagtgccttgggagacaagagcaagagggccacacatgtcccctatagagattccaagctaacaagactactacaggattccctcgggggtaatagccaaacaatcatgatagcatgtgtcagcccttcagacagagactttatggaaacgttaaacaccctgaaatacgccaatcgagctagaaatatcaagaataaggtgatggtcaatcaggacagagctagtcagcaaatcaatgcacttcgtagtgaaatcacacgacttcagatggagctcatggagtacaaaaccaggtaaaagaataattgacgaagagggtgtggaaagcatcaatgacatgtttcatgagaatgctatgctacagactgaaaataataacctgcgtgtaagaattaaagccatgcaagagacggttgatgcattgaggtccagaattacacagcttgttagtgatcaggccaaccatgttcttgccagagcaggtgaaggaaatgaggagattagtaatatgattcatagttatataaaagaaatcgaagatctcagggcaaaattattagaaagtgaagcagtgaatgagaaccttcgaaaaaaacttgacaagagccacagcaagagcgccatatttcagcggatcatcaactttttctcctaccatactatcctcagacaaagaaaccattgaaattatagacctagcaaaaaaaagatttagagaagttgaaaagaaaagaaaagaggaagaaaaaaagtgtggctggtaaagaggataatacagacactgaccaagagaagaaagaagaaaagggtgtttcggaaagagaaaacaatgaattagaagtggaagaaagtcaagaagtgagtgatcatgaggatgaagaagaggaggaggaggaggaggaagatgacattgatgggggtgaaagttctgatgaatcagattctgaatcagatgaaaaagccaattatcaagcagacttggcaaacattacttgtgaaattgcaattaagcgaaagctgattgatgaactagaaaacagccagaaaagactgcagactctgaaaaagcagtatgaagagaagctaatgatgctgcaacataaaattcgggatactcagcttgaaagagaccaggtgcttcaaaacttatgctcggtagaatcttactcagaagaaaaaaaaaaaaaaa

SEQ ID NO: 156473 - DNA, 750 bp, Homo sapiens
ggaagatcagggcttgtattcaataagaatggaaggggccaggggatgccttgcaaaaagccttgcactgtgaggtgcaggtagaggcttttattctggtgagaggacatggactctctctctcccctcaggtaactgtgctcctgtaccagcggggaggctggtggtctcatgcctgagcccactccaacctcaacggtgtgtggcaccacggcggccactaccgaagccgctaccaggatggtgtctactgggctgagtttcgtggtggggcatattctctcaggaaggccgccatgctcattcggcccctgaagctgtgactctgtgttcctctgtcccctaggccttagaggacattggtcagcaggagcccaagttgttctggccacaccttctttgtggctcagtgccaatgtgtcccacagaacttcccactgtggatctgtgaccctggggcgctgaaaatgggacccaggaatcccccccgtcaatatcttggcctcagatggctccccaaggtcattcatatctcggtttgagctcatatcttactaataacacaaagtagccacagaccgtgtctggtttgtatctgcacctggcaggggtcactccctgggcccgccctcctcgtcctccacctcaggtaactgtgccctgtaccagcggggaggctggtggtaccatgcctgtgcccactccaacctcaacggtgtgtggcaccacggcggccactaccgaagccgc

SEQ ID NO: 156474 - DNA, 1188 bp, Homo sapiens
gcccttttttttgttcgacaatttcttaccgcctgtgcccggaaggggcggccggccagaagaaggtcctgccgccacccccactggtgcctgtggttccggtccgtcttgtgggtagcaccagagacaccagtaggatgcgggacccagccccagagccccagagagaccagacccagagacagcaggagcccatggcttctcccatgcctgcaggtcaccctgcggaccccaccaagcctgtgggcccgtggcaggattgtgcagaggcccgccaggcaggccatgaacagagtggagtgtatgaactgcgagtgggccgtcacgtagtgtcagtatggtgtgagcagcaactggagggtggaggctggactgtgatccagcggaggcaagatggttcagtcaacgtcttcacttacctggcagcactataaggcgggctttgggcggccagacggagaatactggctggcgccttgaacccgagcatcactctgaccagccgtggggaccatgagctgctggttctcaaggaggactggggggggccgtggagcacgtgcccactatgatggcttctccctggaacccgagagcgaccactaccgcctgcggcttggccagtaccatggtgatgctggagactctctttcctggcacaatgacaagcccttcagcaccgtggatagggaccgagactcctattctggtaaactgtgccctgtaccagcggcgaggctggtggtaccatgctctgtgcccactccaacctcaacggtgtgtggcaccacggcggccactaccgaagccgctaccaggatggtgtctactgggctgagtttcgtggtggggcatattctctcaggaaggccgccatgctcatttggcccctgaagctgtgactctgtgttcctctgtcccctaggccctagaggacattggtcagcaggagcccaagttgttctggccacaccttctttgtggcttaatgccaatgtgtcccacagaacttcccactgtggttcttgggaccctgggcgctgaaaatggggaccccagaatccccccccgccatatcttgggcctcaaaagggcttccccaaggtcattcatatctcggtttgagctcatatcttataataacacaaagtagccacagaccgaattccaccacagtggactaggagt

SEQ ID NO: 156475 - DNA, 800 bp, Homo sapiens
ccaaggcagtgtctctctctgtcacccaggctggagtgcagtggttcgatctcattgcaatctccgcctcccaggtttaatcgattctcgtgcctcagcctcccgagtagctgggattacaggcaagtgccaccacgcccggctaatttttgtatttttagtagagacagggtttcgccatgttggccaggctggtctccaactcctaacctgaagtgatccgcccaccttggcttcccaaagtgctgggattacaggcgtgacaacccgcgcccagccgagattaattcttaataaattaagaagagagaaaacctgtcaaggttcgaaaatatgcactgaaggaatcagatctggtagttaaaaataagtcacttcacagaacactgtaccctgacgcaatatccacccagggaaaattaatgagcacatcaatgtaatacatcctgaataaataatgacatcaacaatagccactttgtctaatcctacccctaaatgtcaagcattttgtcatattactacatgactttccagtgtctgctacttgtgcaggtgaatctgtaggtatttgcatataatccagttaaaactgtgatctgattgaattgtaaacagaattgacaagagaaacttattgtagtgcctaatatcacttacattttaagaagacagtatgtagcagcaatttaaaatgctcagtaaactatagtacaaatggacatctatactatttagcaaaccaacattcctttaatatctctatatcatagtgacacaaatgaggaattactttacat

SEQ ID NO: 156476 - DNA, 3082 bp, Homo sapiens
atggtggttagtctttattttcccacacatcctgattcatttcctgtccttctctgtcttgttctatgccctgggcggctgatccttagggactgcaatccccccagactcccatttgtaaattgacttcctgcttgggtttggtcaatggaatgccctggcacagctttggagggaagaagagagaagacaatgtatttcttcactgctcccactctgatttgggctatgttttattggcagggactgcatcccttcaagattttagcttcttccagaagtcccctcctccatgactctagctctcactaggctccagaaatactatttcttcctcttgccctcttaggcctagggtaacagctacctgctattgctaacctctgggtgccacaaaattgcttgttgggtctcataatcttgcatatacctctgtaagtagtccctacattaaagtcccttgaaccatctgatttagatttttttactggctaggactctgactgaggtgctggtgtgaggcctagaattactgcagctattttgataccattagaatgcacagtcaaggataaagctttcatgtaaggaagggtatagcagagaaaattatagaaaaatgaagcagaatcttaatcaaattgtacttaaagtcagataacttctggatgcaactcactgaagtaagaataggtggatatttcttaaatatgacaaaaatatatacatttctaacaagaagcctttcatgtttaagggataaacactagaagcatttccattaaaattaggaaaaagacaagaatgccagttatttccacaattatttaacattgttctagaagtactagttaatgcagtcaaccaagagaaagaaatgtaatattgatattggaaaggaaggggcaggcaagattatcattaccacaaatgaagcaaatctaagagaatcaactaaagactacttgaaacctttggaactccataaaaaggctggttatgaaatcaatagaataaaaactgatcactttcatatataaaaacaacaaacaaaatgtaaaataagaaaaaaaatctaaattacaatagccatgggaaaagataagctccttttgaataaacttaacaaaaaaatctgtaagacatatccattcattcagtaaatatggattgataacctacagtgtgccaggcaatgttctaggagttatttttatttaaaaaatttagaaactgctgagaaaaataaagacaaataagtagaaaaactgggttgttggatagaaagatattcctgtaaagatgccaattatcactcagttaacttataaattatgtgcaacacaaattgaaattaaaaacggtagtttttaggggactataacaaaataacagattttagtctctaaataaatacatgtgaacaggcaggtaatgataaaaaagatgagttatgagagaccttacccttcagatattgaaacatattatgaagatactatagttaaaacagtttgttatttaagaagaaagaaaagataacagattaaaagaatataataaagaataaagaaatagatacaaacatatgtggatgtttagattatgataattatggtaaagatggcactttattttttattttttgggtattatacattttatttaaagacttcaaagtaaaaaaaaaaaaaaaaaaggtacagaaatacagattacattatgatgaccacagtagtattctacatgacaaaaataaaaacagatttaagtaaatgtacgggcactgaaacaggcatttacttaacatccaatccaggctgcatatgcacaaaaaggatctgaccacatgcttatgcaaaataaagtttttcttagaaagccaaaattccaaccattctgactgtccgctgcctattcccctgttgagtattttgagcgaacttctatagaatataagaacaattggcatggcacttaaagactgcaaaaaacagaacacaattaaaaacatttataatgcatttctgtataaaattacacaccgtaaatcttattagttaaaaaaagatttaaaaacaaaagaccaccctggaataatggttaaaacctcatcatagaaaaatgctcatcattttgcacattattgatagaaactactgagaggttttcttggggggctgggtggaaaggtagatacctaacttaaagattcattcaaaatttgctttaaattgtgggtaataactcactgcttaccccttctcaaaatgttttatcatgaatactctaatatttaaccacaggacaaacataaagaataacctgaagaaggtatttctcaaagtgaggtcgaaggccccaaaagaagtctaaggtgggctcactagtgtgcattttaaaccaacttcctaggtgattatttcacattccaaaatctgagaactaatgccctatgggaaacagcaccacttaaaagcaaggccataaacatatttctgacatgagatacagaattctaagtttatgatttgaagtgaatactgctttttgttttaaaacaagtttcagatgttaagagaaacatattaaataaacatgtgcatgtatataaacattttcctttgaggttttcattgctttcagacttatgttatctgaaggaaagagagtacacagctagaaactttggaaaaatgacatttccaatgaaatgtagcatccacccctccaaaaaaagataatttattaaatgcctacaaattttgaaacatttgaaatttaaactaggacactttcctaaaattaagttttactaagattaaaaaattttaagtaatttagataatcatgtttactttttaagtcccttttcattaaaaatatatttaaaataaacaacagaaggatgctatatttggcacccctttaaataataagctgctgaacactaatattaataaaaaataatccaaggaactctgcctctgaaatgtattctactatgtgttacatgtgttatccagttaataaaaactcactgaaagagctgatgaattccacgcacactggactacggctc

SEQ ID NO: 156477 - DNA, 8160 bp, Homo sapiens; identical to SEQ ID NO: 138957

SEQ ID NO: 156478 - DNA, 1355 bp, Homo sapiens; identical to SEQ ID NO: 144460

SEQ ID NO: 156479 - DNA, 1996 bp, Homo sapiens
atgggctcgcgctgccttaaccctcctccgcccgcccactctgacaccaccggaaaggattcattcgggaacattcgtggggcggagacgggacagggggcctcggcctgtagcgtcacgtccgccagggttacctgtggggctgggagcgaaccgcactcgcaccgcaaccccggcatcagtgcccaggttggcctcgcgccgtcctacggggcggccagaggccgccgaaggcctctcgcgctgcagcagtctcctcaggagcgccgccatgtgggatggaatagcacacgtgggcttctccctgcgtcacttccggggactgcttccagccaatcggcctccgccacagccagcgcagccttgccccttaaagtcacaggccccctagcgcgaaatcccacgcccccctggacggctgcggccgcactcgccaccagggggcagaggccagagaaagggctatttcccggacccgcccccttcagcttgggaaagcgaaagcgtggcaggggccggacctgggagcggaggaggcgggtctccatagaaacctccacctgtttccggccgggctgtgagagattaggggctgctgcgggggccaatctcagccagctcgcctcttcccagcggcctctgcgggagcggtgggtgttgtacacaatcatcatggcggcggccggggccccggatggcatggaggaacctggcatggacacggaggccgagactgtggctactgaggctcccgcgcggcccgtcaactgcttggaggccgaagccacggcaggagcgggggcagggacggtggccgaggactccggcaccgcgcgaggcagcctgcagcctgcagccggccccagcccaggcccctggagaccccgtgtcccaggcttctgtcagcaacggcgaagactcgggcggcagcgcagacagcgagctggtggacctgaggatcatctggaacaagaccaagcacgacgtgaagttccccctggacagcacaggctccgaactgaaacagaagatccactcgattacaggtctcccgcctgccatgcagaaagtcatgtataagggactcgtccccgaggataaaacattgagagaaataaaagtgaccagtggggccaagatcatggtggttggctccaccatcaatgatgttttagcagtaaacacacccaaagatgctgcgcagcaggatgcaaaggccgaagagaacaagaaggagcctctctgcaggcagaaacaacacaggaaagtgttggataaaggaaaacctgaagatgtgatgccatctgttaagggggcccaggagcgcctgccaacggtaccgctgtccggcatgtacaataaatctggaggaaaagtgagactcacctttaaactagaacaagaccagctgtggattggcactaaagagcggactgagaaattgcccatgggctccataaaaaaatgtggtcaagtgaccctatccgaaggacatgaagactaccacaatgatggccgtttccagttggcccccacggaagccctcttactactgggtgtactgggttccaactcaatatgtggatgcaatcaaaagacactgtgctggggaaatggcagtatttttgaaagcactttcacctcttggccccaggaggactgaccccaaagtgaaggacatttgccgggaagaggcctgcagcatccctggaatttcagagttctggaactttgttcataaaaaatctatattcaatctgaggtgatgtggtgactgaagccagaggtgatgtactttcaccattaagcttaattttaactttaaattaccagttcccttccttgcagtcaagcttcataccatttttaaagtcaatacgatggaaatcaataaatctgaattccgaacatgttgtgtggaatactcttaagtgtgtttgagagtagatctgccaattatgttgacaagggaatgatcaaaagctttgtttttttt

SEQ ID NO: 156480 - DNA, 299 bp, Homo sapiens
  misc_feature (1)...(299): n = a,t,c or g
aaggcctctccaaagtcaacaaaacagccagcgggcgggaactgttatgatcacctccacatctcagaccaaagggtcgtcctcccccagaatttctcactcctgcccttcttccacagcgtatgtggggaggtggaggggtccatgtggaccaggcgcccagctccccccaaatattgggcagccctgtccttaccccggaccacccctcccttccagctatgtgtacaataatgaccaatctgtttggctnnnnnnnnnnnnnnnnnnnnnnnnnnnnnnnnnnnnnnnnnnnnnnn

SEQ ID NO: 156481 - DNA, 619 bp, Homo sapiens
  misc_feature (1)...(619): n = a,t,c or g
gtggacttctcttgctgtggtgccatcttgttcnccgtagtctggtccatccggcatctccagaatgcgtctggcacagacggaaggtggcagtgaacctggccaagctgaagctgttccggcattactatgtcatggtcatctgctacgtctacttcacccgcatcatcgccatcctgctgcaggtggctgtgccctttcagtggcagtggctgtaccagcccacaggaaacaacccgtacctgcagctgccccaggaggacgaggaggatgttcagatggagcaagtaatgacggactctgggttccgggaaggcctctccaaagtcaacaaaacagccagcgggcgggaactgttatgatcacctccacatctcagaccaaaggggtcgtcctcccccagcatttctcactcctgcccttcttccacagcgtatgtggggaggtggagggggtccatgtggaccaggcgcccagctccccgggaccccggttcccggacaagcccatttggaagaagagtcccttcctccccccaaatattgggcagccctgtccttaccccgggaccacccctcccttccagctatgtgtacaataatgaccaatctgtttggct

SEQ ID NO: 156482 - DNA, 465 bp, Homo sapiens
  misc_feature (1)...(465): n = a,t,c or g
gccgctggcatcttctgggtgtccatcctctgcaggaacacgtacagcgtcttcaagatccactggctcatggcggccttggccttcaccaagagcatctctctcctcttccacagcgtgagagccttggactggggagcagcggggggtgggctgaaaggcccacccgggccatcccccaaatctctgcagaccctgggcctgtgggagggccatccgccagctatccacgtgtccacccattttaccagtgtggccagtcacccatcccctctgtccaccagtcctgcggggcagctctgtccaccactgtcccttggttcagctgtgactgtccgtctctgattgtccaaccattcaccccatcagctcgtggctgttccctccattttttcagacacgaataccagttttgagtcccacccatgtattcgnccgcgctgtnttctnncaaggtttgtaaaa

SEQ ID NO: 156483 - DNA, 509 bp, Homo sapiens
ttccccgtagtctggtccatccggcatctccaggatgcgtctggcacagacgggaaggtggcagtgaacctggccaagctgaagctgttccggcattactatgtcatggtcatctgctacgtctacttcacccgcatcatcgccatcctgctgcaggtggctgtgccctttcagtggcagtggctgtaccagctcttggtggagggctccaccctggccttcttcgtgctcacgggctacaagttccagcccacagggaacaacccgtacctgcagctgccccaggaggacgaggaggatgttcagatggagcaagtcgtatgtggggaggtggagggggtccatgtggaccaggcgcccagctccccgggaccccggttcccggacaagcccatttggaagaagagtcccttcctccccccaaatattgggcagccctgtccttaccccgggaccacccctcccttccagctatgtgtacaataatgaccaatctgtttggctaaaaa

SEQ ID NO: 156484 - DNA, 3198 bp, Homo sapiens
atggcagtgagcgagaggagggggctcggccgcgggagccccgcggagtgggggcagcggctacttctggtgctgctgctgggtggctgctccgggcgcatccaccagctggcgctgacgggggagaagcgagcggacatccagctgaacagcttcggtttctacaccaatggctctctggaggtggagttgagcgtcctgcggctgggcctccgggaggcagaagagaagtccctgctgacccgggatttccaggactgccctctccagaaaaacagtagcagtttcctggtcctgttcctcatcaacaccaaggatctgcaggtccaggtgcggaagtatggagagcagaagacgttgtttatctttcccgggctcctcccggaagcaccctccaaaccagggctcccgaagccacaggccacagtcccccgcaaggtggatggcggagggacctctgcagccagcaagcccaagtcaacacccgcaagtgattcagggtcctagtgggaaggacaaggaccctgggtgttggggccttgagccacctcaacaactccctacaactttcagttttccacgttggtgatcgggcttcttcagggcggaaagaaaggccaagtacagcctgaacttccacaactgcaacaattcagtgccaggaaaggagcatccattcgacatcacggtgatgatccgggagaagaaccccgatggcttcctgtcggcagcggagatgccccttttcaagctctacatggtcatgtccgcctgcttcctggccgctggcatcttctgggtgtccatcctctgcaggaacacgtacagcgtctttcaagatccactggctcatggcggccttggccttcaccaagagcatctctctcctcttccacagcgtgagagccttggaccggggagcagcgggggccccgattaccagttttgagtcccacccaccgtcctcattattcaactttctgaccacccatctgatggtgacggtccgtgttcctaatcccccaccaccaccatcagcctcccacccctctgtgcgcctcactgtccgtctgtccatccacccccagatcaactactacttcatcaacagccagggccaccccatcgaaggccttgccgtcatgtactacatcgcacacctgctgaagggcgccctcctcttcatcaccatcgccctgattggctcaggctgggccttcatcaagtacgtcctgtcggataaggagaagaaggtctttgggatcgtgatccccatgcaggtcctggccaacgtggcctacatcatcatcgagtcccgcgaggaaggcgccagcgactacgtgctgtggaaggagattttgttcctggtggacctcatctgctgtggtgccatcctgttccccgtagtctggtccatccggcatctccatggatgcgtctggcacagacggcgaatggtggcagtgaacctggccaagcttgaagctgttccggcattactatgtcatggtaggagcccgcctcactcacagcgggtttggggggattaccggcctgctgcacgcccaccccagcccctcagctgctgccccatcccgaggcccccatccaggctccccagcccgcatcctgcagtctagccccatgcctgcccgtgcccctacagtcctggccccacgcctgctcgcgcccctgcaggtcatctgctacgtctacttcacccgcatcatcgccatcctgctgcaggtggctgtgccctttcagtggcagtggctgtaccagctcttggtggagggctccaccctggccttcttcgtgctcacgggctacaagttccagcccacaggaaacaacccgtacctgcagctgccccaggaggacgaggaggatgttcagatggagcaagtggaagcccacacattgaaactattagtcaaagacattaaatcaactgtctccaatgtgttcagtgagatgaaggaaaatatggacaaagaactaaagcagatcatgagaatgatatatgaaagaaggatctgtgtggcagaccccttcgaggtcacagtaatgcaggacttcttcatcgacctgcggctaccctactctgttgttcgaaacgagcaggtggaaatccgagccgttctctacaattaccggcagaaccaagagctcaaggtgagggtggaactactccacaatccagccttctgcagcctggccaccaccaagaggcgtcaccagcagaccgtaaccatcccccccaagtcctcgttgtccgttccatatgtcatcgtgccgctaagaccggcctgcaggaagtggaagtcaaggctgctgtctaccatcatttcatcagtgacggtgtcaggaaaaggagtgcagaaagaggacatcccacctgcagacctcagtgaccaagtcccggacaccgagtctgagaccagaattctcctgcaagggaccccagtggcccagatgacagaggatgccgtcgacgcggaacggctgaagcacctcattgtgaccccctcgggctgcggggaacagaacatgatcggcatgacgcccacggtcatcgctgtgcattacctggatgaaacggagcagtgggagaagttcggcctagagaagcggcagggggccttggagctcatcaagaaggggtacacccagcagctggccttcagacaacccagctctgcctttgcggccttcgtgaaacgggcacccagcacctggctgaccgcctacgtggtcaaggtcttctctctggctgtcaacctcatcgccatcgactcccaagtcctctgcggggctgttaaatggctgatcctggagaagcagaagcccgacggggtcttccaggaggatgcgcccgtgatacaccaagaaatgattggtggattacggaacaacaacgagaaagacatggccctcacggcctttgttctcatctcgctgcaggaggctaaagatatttgcgaggagcaggtcaacatacataatagatatgcagcaacaaggcagctcatggtggctaaaatatctgggaaattctcaaaaatggacaaatctaagacagctggcttggcggattgtcattctgtcctggatgtgtctaataagggcgtcttgcgggatgtagcctctacttcctcaggaattgtggattggagaggaagccagatccagacgtga

SEQ ID NO: 156485 - DNA, 999 bp, Homo sapiens
ctccgtcaacccacgcgtccggtctttgggatcgtgatccccatgcaggttctggccaacgtggcctacatcatcatcgagtcccgcgaggaaggcgccagcgactacgtgctgtggaaggagattttgttcctggtggacctcatctgctgtggtgccatccttttcccgttagtctggtccatccggcatctcaaggatgcgtctggcacagacgggaaggtgccagtgaacctgcccaagctgaagctgttccggcattattatgtcatgtcctgcccccacgccttgtgcgcccctgcaggtcatctgctacgtctacttcacccgcatcatcgccaatcctgctgcaggtggctgtgccctttcagtggcagtggctgtaccagctcttggtggagggctccaaccctggccttcttcgtgctcacgggctacaagttccagcccacagggaacaacccgtaccttgcagttgccccaggaggacgaggaggatgttcaagatggagcaagtaatagacggactctgggttccgggaaggccttctccaaaagtcaacaaaacagccagcgggcgggaactgttatgatcacctccacatctcaagaccaaagggtttgtcttccccagcatttttttactcctgcccttttttcaaaaggttatgtggggaggtggagggggtccatgtggaccaggcgcccagctccccgggaccccggttcccggacaagcccatttggaagaagagtcccttcctccccccaaaatattgggcagcccttgccttaccccggggaccacccctcccttccagctatgtgtacaataatgaccaatcttgtttggctacgccgttgtcttgcctttttgggggttggggtctacacggaggttgtgtttacaatgtagaaacctgttttcgctgtgtgtggcgggggcgcgggcacagggtccgtgtctttgtatattcaaaaaatattcattcagtaaaa

SEQ ID NO: 156486 - DNA, 827 bp, Homo sapiens
  misc_feature (1)...(827): n = a,t,c or g
tcctgagttgccgagttcaggtgtccgtcgcgccccccaggcccaggcctgctctgccggtcagcgcggtgccaggcacgcccggcaccctgacccccgccctgcttcacccaggttggccgactgcgatgtgagtgacagcagctgcagcagcctcgccgcaaccctgttggccaaccacagcctgcgtgagctggacctcagcaacaactgcctgggggacgccggcatcctgcagctggtggagagcgtccggcagccgggctgcctcctggagcagctggtgtatgtgcaacgcgctgggcgggtggtgcggccagggctgcccagggaggaaggcgggggtgggggaggacactgggcccatgcctcccttctggcctgtgtgcagcctgtacgacaatttactggtctgaggagatggaggaccggcttgcaaggccctggagaaaggacaagcacatccctgaggggtcatctcctgaggctcttcctgctgctggctgctgccctggacgaccggcctngagggcaacgcctgggggcccaccagcccctgccatggctctcaccctcgcatatcctaggtttggaagagaaacgcctgcagaatccggcttatttctgccgagtatattttgagacactttataatcatataaagcactttcttggcnnnnnnnnnnnnnnngggggggcccttttaaaggaaccaagtttaataaccgcgggagggcaagaaaaaatttttttaagggggccccaaaaatcaattcccgggccggggtttaaaaacggcggggagggaaaaaccctgggtgtacccc

SEQ ID NO: 156487 - DNA, 430 bp, Homo sapiens
gagaaaataaatgactgtgccgaagtgaagcaggagctggcggcctccgatcgggaacgggctcaaagtaggattcaagaactggaggaaaaggtcgcctctttgctgcaccaggtgtcctggagacaggattctcgagagccagacgccggccggattcacgctgggagcaaaactgccaagtatttggctgccgacgcattagagcttatggtgcctggtggctggaggcctgggactgggtcccagcagctagaaccccctgcagagggcgggcatcctggcgcggcccagagaggccagggggaccttcagtgccctcactgtctgcactgagaaactgcatttcagtagcatttgtcatccagccggaagttaaagtacacttactgtattcacctatttttataataaacgttcttgctgctgt

SEQ ID NO: 156488 - DNA, 1147 bp, Homo sapiens
  misc_feature (1)...(1147): n = a,t,c or g
gcggccgcgcggcctcccgggcgggcctacagccatgtcccgggacccggggtcgggcggctgggaggaggccccgcgcgcagctgccgcgctctgcaccctgtaccacgaggccggacagcggctgcgccgcctgcaggaccagctcgctgcccgcgacgccctcatcgctcgcctccgcgcccgcctggccgcgctggagggggacgccgcgccgtccctagtggacgcgctgctggagcaggttgcgcgcttccgggagcagctgcgaaggcaggagggcggcgccgccgaggcccagatgcgccaggtacgagggcgggtaccagaggagctgcgggagcgagagtgcgtgtggcggccgccgggtcctgggcagttctctgaggcagcaccaaggttcatgcagaaacacacgcgctgggatgttctgtggcagacagtacatcccgcacccatcagcagcttcaccgaggcgcccactggggagaagtcggaacacacagatgggcacacctctgtccagagtgttattgagaagttgcaggaagaaaatcgactgttaaaacagaaggtgactcacntcagggggctgcagatcccccacgagcccgagctgatgaggaaggagatctcccggctcaacaagacagttggaagagaaaataaatgactgtcccgaagtgaagcaggagctggcggcctccaggacggcccgggatgctgcgttggagcgggtgcagatgctggaacagcaggtgtctgtccctcgggctccggacggcactgaccagatgtctgctggccggtggtggccgaaatcatgggacaggctgggctgaaggcttggtggcactgagtgggcagtggtcacggtgggggtgggagaagcctgggggggcgcttcctccttccttgagcagaaatgtgtgtctcgcctctcttcagattctcgcttacaaggatgacttcatgtcagaaagggccgatcgggaacgggctcaaagtaggattcaagaactggaggaaaaggtcgcctctttgctgcaccaggtgtcctggagacaggattctcgagagccaaacgccggccggattcacgctgggagcaaaactgccaagtatttgggcgccgacgcattatagg

SEQ ID NO: 156489 - DNA, 1761 bp, Homo sapiens
  misc_feature (1)...(1761): n = a,t,c or g
gaaattgagaggctgactgagcgactagaagaaaaagagagggagatgcagcagctgctgagccagccccaacacgagcgagagaaggaagtcgtcctgctacggaggagcatggcagaaggggagcgcgcccgggccgccagtgacgtcctgtgccgctccttggccaacgagacccatcagctgcggaggacgctgaccgccaccgcccacatgtgtcagcatctggccaagtgtctggatgaacgacagcatgcacaaaggaatgtgggggagagaagtcctgaccagttctctgaggcagcaccaaggttcatgcagaaacacacgcgctgggatgttctgtggcagacagtacatcccgcacccatcagcagcttcaccgaggcgcccactggggagaagtcggaacacacagatgggcacacctctgtccagagtgttattgagaagttgcaggaagaaaatcgactgttaaaacagaaggtgactcacgttgaagacctcaatgccaagtggcagcgctacaacgccagcagggacgaatacgtgagggggctccatgcgcagctcagggggctgcagatcccccacgagcccgagctgatgaggaaggagatctcccggctcaacagacagttggaagagaaaataaatgactgtgccgaagtgaagcaggagctggcggcctccaggacggcccgggatgctgcgttggagcgggtgcagatgctggaacagcagattctcgcttacaaggatgacttcatgtcagaaagggccgatcgggaacgggctcaaagtaggattcaagaactggaggaaaaggtcgcctctttgctgcaccaggtgtcctggagacaggattctcgagagccagacgccggccggattcacgctgggagcaaaactgccaagtatttggccgccgacgcattagagcttatggtgcctgggtagctggaggcctgggactgggtcccagcagccagaaccccctgcagagggcgggcatcctggcgcggcccagagaggccagggggaccttcagtgccctcactgcctgcagtgcttcagtgacgagcaaggggaagagctcctcaggcatgtggccgagtgctgccagtgaccgagactcacccgtgccctttctggcctcctggcccggtgcagctgccctcatggacagggtgggtgctctcagatgccatgggttgagctctactgagagccaaggcccctagaatagttgcggggcactctgatcgttcactttggtccctttgggctatggaacaggctgggtcacagggaaactgccaagtgaggctggaaggctggaggtggagatggggtcaggaacatctggcagagggaggtcccaagtctgtgtctccgatccaggcttaagccagagcttatcctggtgctggtgtgccagcccccctcccccagcctgccctanaaaggggtggctgcctgagggagtcacttgtatggtccccagggtgggagccccatcctgttctatggaataaagcgtcgcctctctgcctcgaaacctagtcataatggagtatttgcggctgcacgtcacaactagggtggccaccccccgccattgcgagccacatgtctgcactgagaaactgcatttcagtagcatttgtcatccagccaggaatgttaaagcacacttactttattcacctatttttataataaacgttcttgctgctgtgaaaaaaaaaaaaaaaaaaa

SEQ ID NO: 156490 - DNA, 1261 bp, Homo sapiens
tttttttgagacagagtctcgctctgtcgcctaggctggagtgcagtggtgcaatctcggcttactgcaccctctgcctcccgggttcaagtgattctdttgcctcagcctccrggggtagctgggattacaggcgagcaccaccacgcccggctaattttrgtatttttagtagagatggggtttcaccatgttggtcaggctggtctcgkactcctggaccttgtgatccacccacctcggcctcccaaagtgctgggattacaggcatgagccactgcgcctggccgagtagagaagaatttactgctgattaaggttgtgtttttcaacctgcaatcccgagaccctcagaataaagattacttgaggttgctatgaaaaatacagattcctgtcctccccctggctgaatcagaatctcataaggtgaggctcaggtttctgcacttttcacaagctctgtaatggttacagtgcaccctaatgtttgagaaccagtggcctaaagagaatgcaacctaagagggcaaggctagtgcatagcttaaatcgctccagcctttggtaatcccttctaaacacagtaccacccatgtggaggagactgcaaggaagctgttattcaaagtagaacagtcagccttgtgcttgagtcctgctttatgcttgcgtgtttcataacaaaacacaaaggcaagtcttcatatcagcacttagtcttgatatccaagtagctgactactgtacttatgataacagcttgaagaggactgcaactctcccctcacgaatggtgacagagttggcttgtcacacctggctcagggaagaaaaatgagtaaacccctacctctttactcttgattcctcttccaccctaatactgttaacacatcatcctgtgtgattcaaataatctggcagatgaaatacagaaaatctaagtcatattgttcttatcactctatggccagatattatagtaatctaattttaaaaatccttttctgtgcaatagaaataaccaaagctcattctgtctcctttcctttctaatgctgttgataggaacaaaatatcaagtaaggatacatgctagagatgttaaattcatacaagtaaagtaaattacaaagagaggtggtaatatttttttctagaatttcacaataaaatccctctcaccatgaaaatctttttataattttaacaggaaacttaaaagacattttgttgcaagactatcttaacctcgtgc

SEQ ID NO: 156491 - DNA, 807 bp, Homo sapiens
gtgattatagtcttggtttacctgtggtgacaaccgggtgttggggacacatgtcaaatgcccctctgagatgggccctaaatcccagttactggggaaagaaccagctgctgtgtcctgagagcctggccctgtgctgtggtctctgctgcaagcccagatttttggaagtaactagtgttaggtctgctgacctttacctaagcagcccctgcctggtaagaaggtgcccattgttcagaggcaaagagaagcctgcggttggcatgaggatgcctgacaacaaaggctggagaagggccctgagttccagcctctccccaaggggtcccgcgccccagtggctgcctctgtcttgacctgtgtaatgaattagtgtgctgtgtcactgtggcttgaagtcactgtggatcaagctcacagggggcacccatcctgttgtcaacagagtctgaagcagtcagggtgttggattcctctgttgttgtcatcaattcctgctgaggggtttctggggttttgtttttaataaatgactcctttgtagcctttgtcacataatcttcactttggttgttggtaccaaacagagctcccagccatctcctccctgttctggaagactgatgggaagactctgtctgtccccagacctggtcatctgcagctctggcccagtcatagatacatcaaagaactgaagcttctgctgtccacagaactcaaaactgcctctgcattgggtgaagactaaaaatccacttgcggacttttcctttctttcttctcaagcccttaggggatgag

SEQ ID NO: 156492 - DNA, 2046 bp, Homo sapiens; identical to SEQ ID NO: 156028

SEQ ID NO: 156493 - DNA, 512 bp, Homo sapiens
ctgccgaccctcccagtccttctttttgtttttgtttttttttttttgagacagagtcttgctctgtcacccaggctggagtgcagtggtgccatcttggctcactgcaacctctgcctcccacatgccaccatgcctgggtaatttttgtatttttagtagagacagagtttcaccatgttggcgaggatggtctcaatctcctgacttcatgatctacctgcctcggcctcccaaagtgctgggattacaggcctgagccatcacacctggctggcctcatcacactttctaaacgactattattaactcatttcccagatgagaaaactgaagctcagaaagatcaagcgacctgcccaatatcccaaagctattaagtgcctattcttcctgcctgccatacttcccttccctctgtcttcccctttgcctacttaactgtgattcaacccaaagagaaatttccccaggaaagcctttcctaaacatcttgccttggccaacctctc

SEQ ID NO: 156494 - DNA, 480 bp, Homo sapiens
  misc_feature (1)...(480): n = a,t,c or g
ggatttgatgagtggtttggatcccccaactgccactttggaccttatgacaacaaggccaggcccaacatccctgtgtacagggactgggagatggttggcagatattatgaagaatttcctattaatctgaagacgggggaagccaacctcacccagatctacctgcaggaagccctggacttcattaagagacaggcacggcaccacccctttttcctctactgggctgtngacgccacgcacgcacccgtntatgcctccaaacccttcttgggcaccagtcagcgagggcggtatggagacgccgtccgggagattgatgacttccagttccgtctgtcctttgtccacaaggaatttccctggacgctaattatgagggaggcgtgtagcttcttatcattgtaactatgttatttagaaataaaacgggaggcaggtttgcctaattcccagcttgaaaaaaaaaaaaaaaaa

SEQ ID NO: 156495 - DNA, 464 bp, Homo sapiens
  misc_feature (1)...(464): n = a,t,c or g
ccaagaagtgcctctggtcccactagcacctgcgcagactcaggccaggcctagaatctccagttggccctgcaagtgcctggaggaaggatggctctggcctcggtcctcccccaaccctgcccaagccagacagacagcacctgcagacgcagggggactgcacaattccacctgcccaggacctgaccctggcgtgtgcttggccctcctcctcgcccacggcgcctcagatttcaggaccctcctcctcgcccacggcgcctcagacctcaagaccctgccgtctcacgcctttgtgaaccccaaatatctgagaccagtctcnnnnnnnnnnnnnnnnnnnnnnnnnnnnnnnnnnnnnnnnnnnnnnnnnnnnnnnnnnnnnnnnnnnnnnnnnnnnnnnnnnnnnnnnnnnnnnnnnnnnnnnnnnnnnnnncaagatcagtatgtgtatggcgtac

SEQ ID NO: 156496 - DNA, 503 bp, Homo sapiens
cccgttctgaagagcagccgcaagctggattcgttccaggacaggacaggctgcgcaaggaaacccggacagctggcctgggggccagggcgagtgggcacagaggtgtggcctgcagggctgctgtgggccggaggatgagattaggtgccaccagagggcatagcccatactcagtgctggagggtgctcgtcttaccaagaattttgtgaaggtggtatctgttgctgctcagaacttccgagtgtccccacgtggggtccctgaagtgtcctgggttcctgtttccaggcatctgggtcacaggccccagttccaccccctgaagcacggatttgatgagtggtttggatcccccaactgccactttggaccttatgacaacaaggccaggcccaacatccctgtgtacagggactgggagatggttggcagatattatgaagaatttcctattaatctgaagacgggggaagccaacctcacccagatctacctgcag

SEQ ID NO: 156497 - DNA, 2312 bp, Homo sapiens
  misc_feature (1)...(2312): n = a,t,c or g
atggcggcggttgtcgcggcgacgaggtggtggcagctgttgctggtgctcagcgccgcggggatgggggcctcgggcgccccgcagccccccaacatcctgctcctgctcatggacgacatgggatggggtgacctcggggtgtatggagagccctccagagagaccccgaatttggaccggatggctgcagaagggctgcttttcccaaacttctattctgccaaccctctgtgctcgccatcgagggcggcactgctcacaggacggctacccatccgcaatggcttctacaccaccaacgcccatgccagaaacgcctacacaccgcaggagattgtgggcggcatcccagactcggagcagctcctgccggagcttctgaagaaggccggctacgtcagcaagattgtcggcaagtggcatctgggtcacaggccccagttccaccccctgaagcacggatttgatgagtggtttggatcccccaactgccactttggaccttatgacaacaaggccaggcccaacatccctgtgtacagggactgggagatggttggcagatattatgaagaatttcctattaatctgaagacgggggaagccaacctcacccagatctacctgcaggaagccctggacttcattaagagacaggcacggcaccacccctttttcctctactgggctgtcgacgccacgcatgcacccgtctatgcctccaaacccttcttgggcaccagtcagcgagggcggtatggagacgccgtccgggagattgatgacagcattgggaagatactggagctcctccaagacctgcacgtcgcggacaacaccttcgtcttcttcacgtcggacaacggcgctgccctcatttccgcccccgaacaaggtggcagcaacggcccctttctgtgtgggaagcagaccacgtttgaaggagggatgagggagcctgccctcgcatggtggccagggcacgtcactgcaggccaggtgagccaccagctgggcagcatcatggacctcttcaccaccagcctggcccttgcgggcctgacgccgcccagcgacagggccattgatggcctcaacctcctccccaccctcctgcagggccggctgatggacaggcctatcttctattaccgtggcgacacgctgtatggcggccacccttcgggcagcacaaggctcacttctgggacctggaccaactcctgggagaacttcagacagggcattgatttctgccctgggcagaacgtttcaggggtcacaactcacaatctggaagaccacacgaagctgcccctgatcttccacctgggatgggacccaggggagaggttccccctcagctttgccagcgccgagtaccaggaggccctcagcaggatcacctcggtcgtccagcagcaccaggaagccttggtccccgcgcagccccagctcaacgtgtgcaactgggcggtcatgaactgggcacctccgggctgtgaaaagttagggaagtgtcttgacacctccagaatccattcccaagaagtgcctctgggtcccactagcacctgcgcagactcaggccaggcctagaatctccagttggccctgcaagtgcctggaggaaggatggctctggcctcggtcctcccccaaccctgccccaagccagacagacagcacctgcagacgcagggggacttgcacaatttccaacttgcccaggacctgaccctggcgtgtgcttgggccttccttcctcgcccaacgcgcctcagatttcaggaccctcctcctcgcccacggggcctcagaccttcaggaccctgccgtctcacgcctttgtgaacccccaaatatcttgagcccagtctccagtttattttgcccaaggttaaggatgcaccctgtgaacaaccccccagaaggcccctgacaacaggtgccctgaggtggcctgggggataccagtttgccctttaatacaccttaggggagccaccaagatcaagtatgtgtatggcgtacattggttcagtcagccttcccactgaatacacggattgagtctggcccagtgaatccgcattttttatgtaaacagttaggggaacgggggcaatcatataagcgtttgtctcaggggagnccccagagggatgacttccagttccgtctgtcctttgtccacaaggaatttccctgggcgctaattatgagggaggcgtgtagcttcttatcattggaaatatggtatttaggaattaaaacggaagcaaggtttgcctaattcccagcttgaa

SEQ ID NO: 156498 - DNA, 4269 bp, Homo sapiens
gagcggctttaaaaggcggcactccaccccccggcgcactcgcagctcgggcgccgcgcgagcctgtcgccgctatgcctccgcgcgcgccgcctgcgcccgggccccggccgccgccccgggccgccgccgccaccgacaccgccgcgggcgcggggggcgcggggggcgcggggggcgccggcgggcccgggttccggccgctcgcgccgcgtccctggcgctggctgctgctgctggcgctgcctgccgcctgctccgcgcccccgccgcgccccgtctacaccaaccactgggcggtgcaagtgctgggcggcccggccgaggcggaccgcgtggcggcggcgcacggctacctcaacttgggccagattggaaacctggaagattactaccatttttatcacagcaaaacctttaaaagatcaaccttgagtagcagaggccctcacaccttcctcagaatggacccccaggtgaaatggctccagcaacaggaagtgaaacgaagggtgaagagacaggtgcgaagtgacccgcaggccctttacttcaacgaccccatttggtccaacatgtggtacctgcattgtggcgacaagaacagtcgctgccggtcggaaatgaatgtccaggcagcgtggaagaggggctacacaggaaaaaacgtggtggtcaccatccttgatgatggcatagagagaaatcaccctgacctggccccaaattatgattcctacgccagctacgacgtgaacggcaatgattatgacccatctccacgatatgatgccagcaatgaaaataaacacggcactcgttgtgcgggagaagttgctgcttcagcaaacaattcctactgcatcgtgggcatagcgtacaatgccaaaataggaggcatccgcatgctggacggcgatgtcacagatgtggtcgaggcaaagtcgctgggcatcagacccaactacatcgacatttacagtgccagctgggggccggacgacgacggcaagacggtggacgggcccggccgactggctaagcaggctttcgagtatggcattaaaaagggccggcagggcctgggctccattttcgtctgggcatctgggaatggcgggagagagggggactactgctcgtgcgatggctacaccaacagcatctacaccatctccgtcagcagcgccaccgagaatggctacaagccctggtacctggaagagtgtgcctccaccctggccaccacctacagcagtggggccttttatgagcgaaaaatcgtcaccacggatctgcgtcagcgctgtaccgatggccacactgggacctcagtctctgcccccatggtggcgggcatcatcgccttggctctagaagcaaacagccagttaacctggagggacgtccagcacctgctagtgaagacatcccggccggcccacctgaaagcgagcgactggaaagtaaacggcgcgggtcataaagttagccatttctatggatttggtttggtggacgcagaagctctcgttgtggaggcaaagaagtggacagcagtgccatcgcagcacatgtgtgtggccgcctcggacaagagacccaggagcatccccttagtgcaggtgctgcggactacggccctgaccagcgcctgcgcggagcactcggaccagcgggtggtctacttggagcacgtggtggttcgcacctccatctcacacccacgccgaggagacctccagatctacctggtttctccctcgggaaccaagtctcaacttttggcaaagaggttgctggatctttccaatgaagggtttacaaactgggaattcatgactgtccactgctggggagaaaaggctgaagggcagtggaccttggaaatccaagatctgccatcccaggtccgcaacccggagaagcaagggaagttgaaagaatggagcctcatactgtatggcacagcagagcacccgtaccacaccttcagtgcccatcagtcccgctcgcggatgctggagctctcagccccagagctggagccacccaaggctgccctgtcaccctcccaggtggaagttcctgaagatgaggaagattacacaggtgtgtgccatccggagtgtggtgacaaaggctgtgatggccccaatgcagaccagtgcttgaactgcgtccacttcagcctggggagtgtcaagaccagcaggaagtgcgtgagtgtgtgccccttgggctactttggggacacagcagcaagacgctgtcgccggtgccacaaggggtgtgagacctgctccagcagagctgcgacgcagtgcctgtcttgccgccgcgggttctatcaccaccaggagatgaacacctgtgtgaccctctgtcctgcaggattttatgctgatgaaagtcagaaaaattgccttaaatgccacccaagctgtaaaaagtgcgtggatgaacctgagaaatgtactgtctgtaaagaaggattcagccttgcacggggcagctgcattcctgactgtgagccaggcacctactttgactcagagctgatcagatgtggggaatgccatcacacctgcggaacctgcgtggggccaggcagagaagagtgcattcactgtgcgaaaaacttccacttccacgactggaagtgtgtgccagcctgtggtgagggcttctacccagaagagatgccgggcttgccccacaaagtgtgtcgaaggtgtgacgagaactgcttgagctgtgcaggctccagcaggaactgtagcaggtgtaagacgggcttcacacagctggggacctcctgcatcaccaaccacacgtgcagcaacgctgacgagacattctgcgagatggtgaagtccaaccggctgtgcgaacggaagctcttcattcagttctgctgccgcacgtgcctcctggccgggtaagggtgcctagctgcccacagagggcaggcactcccatccatccatccgtccaccttcctccagactgtcggccagagtctgtttcaggagcggcgccctgcacctgacagctttatctccccaggagcagcatctctgagcacccaagccaggtgggtggtggctcttaaggaggtgttcctaaaatggtgatatcctctcaaatgctgcttgttggctccagtcttccgacaaactaacaggaacaaaatgaattctgggaatccacagctctggctttggagcagcttctgggaccataagtttactgaatcttcaagaccaaagcagaaaagaaaggcgcttggcatcacacatcactcttctccccgtgcttttctgcggctgtgtagtaaatctccccggcccagctggcgaaccctgggccatcctcacatgtgacaaagggccagcagtctacctgctcgttgcctgccactgagcagtctggggacggtttggtcagactataaataagataggtttgagggcataaaatgtatgaccactggggccggagtatctatttctacatagtcagctacttctgaaactgcagcagtggcttagaaagtccaattccaaagccagaccagaagattctatcccccgcagcgctctcctttgagcaagccgagctctccttgttaccgtgttctgtctgtgtcttcaggagtctcatggcctgaacgaccacctcgacctgatgcagagccttctgaggagaggcaacaggaggcattctgtggccagccaaaaggtaccccgatggccaagcaattcctctgaacaaaatgtaaagccagccatgcattgttaatcatccatcacttcccattttatggaattgcttttaaaatacatttggcctctgcccttcagaagactcgtttttaaggtggaaactcctgtgtctgtgtatattacaagcctacatgacacagttggatttattctgccaaacctgtgtaggcattttataagctacatgttctaatttttaccgatgttaattattttgacaaatatttcatatattttcattgaaatgcacagatctgcttgatcaattcccttgaatagggaagtaacatttgccttaaattttttcgacctcgtctttctccatattgtcctgctcccctgtttgacgacagtgcatttgccttgtcacctgtgagctggagagaacccagatgttgtttattgaatctacaactctgaaagagaaatcaatgaagcaagtacaatgttaaccctaaattaataaaagagttaacatccc

SEQ ID NO: 156499 - DNA, 4403 bp, Homo sapiens
cgggaacgcgccgcggccgcctcctcctccccggctcccgcccgcggcggtgttggcggcggcggtggcggcggcggcggcgcttccccggcgcggagcggctttaaaaggcggcactccaccccccggcgcactcgcagctcgggcgccgcgcgagcctgtcgccgctatgcctccgcgcgcgccgcctgcgcccgggccccggccgccgccccgggccgccgccgccaccgacaccgccgcgggcgcggggggcgcggggggcgcggggggcgccggcgggcccgggttccggccgctcgcgccgcgtccctggcgctggctgctgctgctggcgctgcctgccgcctgctccgcgcccccgccgcgccccgtctacaccaaccactgggcggtgcaagtgctgggcggcccggccgaggcggaccgcgtggcggcggcgcacggctacctcaacttgggccagattggaaacctggaagattactaccatttttatcacagcaaaacctttaaaagatcaaccttgagtagcagaggccctcacaccttcctcagaatggacccccaggtgaaatggctccagcaacaggaagtgaaacgaagggtgaagagacaggtgcgaagtgacccgcaggccctttacttcaacgaccccatttggtccaacatgtggtacctgcattgtggcgacaagaacagtcgctgccggtcggaaatgaatgtccaggcagcgtggaagaggggctacacaggaaaaaacgtggtggtcaccatccttgatgatggcatagagagaaatcaccctgacctggccccaaattatgattcctacgccagctacgacgtgaacggcaatgattatgacccatctccacgatatgatgccagcaatgaaaataaacacggcactcgttgtgcgggagaagttgctgcttcagcaaacaattcctactgcatcgtgggcatagcgtacaatgccaaaataggaggcatccgcatgctggacggcgatgtcacagatgtggtcgaggcaaagtcgctgggcatcagacccaactacatcgacatttacagtgccagctgggggccggacgacgacggcaagacggtggacgggcccggccgactggctaagcaggctttcgagtatggcattaaaaagggccggcagggcctgggctccattttcgtctgggcatctgggaatggcgggagagagggggactactgctcgtgcgatggctacaccaacagcatctacaccatctccgtcagcagcgccaccgagaatggctacaagccctggtacctggaagagtgtgcctccaccctggccaccacctacagcagtggggccttttatgagcgaaaaatcgtcaccacggatctgcgtcagcgctgtaccgatggccacactgggacctcagtctctgcccccatggtggcgggcatcatcgccttggctctagaagcaaacagccagttaacctggagggacgtccagcacctgctagtgaagacatcccggccggcccacctgaaagcgagcgactggaaagtaaacggcgcgggtcataaagttagccatttctatggatttggtttggtggacgcagaagctctcgttgtggaggcaaagaagtggacagcagtgccatcgcagcacatgtgtgtggccgcctcggacaagagacccaggagcatccccttagtgcaggtgctgcggactacggccctgaccagcgcctgcgcggagcactcggaccagcgggtggtctacttggagcacgtggtggttcgcacctccatctcacacccacgccgaggagacctccagatctacctggtttctccctcgggaaccaagtctcaacttttggcaaagaggttgctggatctttccaatgaagggtttacaaactgggaattcatgactgtccactgctggggagaaaaggctgaagggcagtggaccttggaaatccaagatctgccatcccaggtccgcaacccggagaagcaagggaagttgaaagaatggagcctcatactgtatggcacagcagagcacccgtaccacaccttcagtgcccatcagtcccgctcgcggatgctggagctctcagccccagagctggagccacccaaggctgccctgtcaccctcccaggtggaagttcctgaagatgaggaagattacacagctcaatccaccccaggctctgctaatattttacagaccagtgtgtgccatccggagtgtggtgacaaaggctgtgatggccccaatgcagaccagtgcttgaactgcgtccacttcagcctggggagtgtcaagaccagcaggaagtgcgtgagtgtgtgccccttgggctactttggggacacagcagcaagacgctgtcgccggtgccacaaggggtgtgagacctgctccagcagagctgcgacgcagtgcctgtcttgccgccgcgggttctatcaccaccaggagatgaacacctgtgtgaccctctgtcctgcaggattttatgctgatgaaagtcagaaaaattgccttaaatgccacccaagctgtaaaaagtgcgtggatgaacctgagaaatgtactgtctgtaaagaaggattcagccttgcacggggcagctgcattcctgactgtgagccaggcacctactttgactcagagctgatcagatgtggggaatgccatcacacctgcggaacctgcgtggggccaggcagagaagagtgcattcactgtgcgaaaaacttccacttccacgactggaagtgtgtgccagcctgtggtgagggcttctacccagaagagatgccgggcttgccccacaaagtgtgtcgaaggtgtgacgagaactgcttgagctgtgcaggctccagcaggaactgtagcaggtgtaagacgggcttcacacagctggggacctcctgcatcaccaaccacacgtgcagcaacgctgacgagacattctgcgagatggtgaagtccaaccggctgtgcgaacggaagctcttcattcagttctgctgccgcacgtgcctcctggccgggtaagggtgcctagctgcccacagagggcaggcactcccatccatccatccgtccaccttcctccagactgtcggccagagtctgtttcaggagcggcgccctgcacctgacagctttatctccccaggagcagcatctctgagcacccaagccaggtgggtggtggctcttaaggaggtgttcctaaaatggtgatatcctctcaaatgctgcttgttggctccagtcttccgacaaactaacaggaacaaaatgaattctgggaatccacagctctggctttggagcagcttctgggaccataagtttactgaatcttcaagaccaaagcagaaaagaaaggcgcttggcatcacacatcactcttctccccgtgcttttctgcggctgtgtagtaaatctccccggcccagctggcgaaccctgggccatcctcacatgtgacaaagggccagcagtctacctgctcgttgcctgccactgagcagtctggggacggtttggtcagactataaataagataggtttgagggcataaaatgtatgaccactggggccggagtatctatttctacatagtcagctacttctgaaactgcagcagtggcttagaaagtccaattccaaagccagaccagaagattctatcccccgcagcgctctcctttgagcaagccgagctctccttgttaccgtgttctgtctgtgtcttcaggagtctcatggcctgaacgaccacctcgacctgatgcagagccttctgaggagaggcaacaggaggcattctgtggccagccaaaaggtaccccgatggccaagcaattcctctgaacaaaatgtaaagccagccatgcattgttaatcatccatcacttcccattttatggaattgcttttaaaatacatttggcctctgcccttcagaagactcgtttttaaggtggaaactcctgtgtctgtgtatattacaagcctacatgacacagttggatttattctgccaaacctgtgtaggcattttataagctacatgttctaatttttaccgatgttaattattttgacaaatatttcatatattttcattgaaatgcacagatctgcttgatcaattcccttgaatagggaagtaacatttgccttaaattttttcgacctcgtctttctccatattgtcctgctcccctgtttgacgacagtgcatttgccttgtcacctgtgagctggagagaacccagatgttgtttattgaatctacaactctgaaagagaaatcaatgaagcaagtacaatgttaaccctaaattaataaaagagttaacatccc

SEQ ID NO: 156500 - DNA, 3335 bp, Homo sapiens
tcgcgggccgaggacgcctctggggcggcaccgcgtcccgagagccccagaagtcggcggggaagtttccccggtggggggcgtttcgggcctcccggacggctctcggccccggagcccggtcgcaggagcgcgggcccgggggcgggaacgcgccgcggccgcctcctcctccccggctcccgcccgcggcggtgttggcggcggcggtggcggcggcggcggcgcttccccggcgcggagcggctttaaaaggcggcactccaccccccggcgcactcgcagctcgggcgccgcgcgagcctgtcgccgctatgcctccgcgcgcgccgcctgcgcccgggccccggccgccgccccgggccgccgccgccaccgacaccgccgcgggcgcggggggcgcggggggcgcggggggcgccggcgggcccgggttccggccgctcgcgccgcgtccctggcgctggctgctgctgctggcgctgcctgccgcctgctccgcgcccccgccgcgccccgtctacaccaaccactgggcggtgcaagtgctgggcggcccggccgaggcggaccgcgtggcggcggcgcacgggtacctcaacttgggccagattggaaacctggaagattactaccatttttatcacagcaaaacctttaaaagatcaaccttgagtagcagaggccctcacaccttcctcagaatggacccccaggtgaaatggctccagcaacaggaagtgaaacgaagggtgaagagacaggtgcgaagtgacccgcaggccctttacttcaacgaccccatttggtccaacatgtggtacctgcattgtggcgacaagaacagtcgctgccggtcggaaatgaatgtccaggcagcgtggaagaggggctacacaggaaaaaacgtggtggtcaccatccttgatgatggcatagagagaaatcaccctgacctggccccaaattatgattcctacgccagctacgacgtgaacggcaatgattatgacccatctccacgatatgatgccagcaatgaaaataaacacggcactcgttgtgcgggagaagttgctgcttcagcaaacaattcctactgcatcgtgggcatagcgtacaatgccaaaataggaggcatccgcatgctggacggcgatgtcacagatgtggtcgaggcaaagtcgctgggcatcagacccaactacatcgacatttacagtgccagctgggggccggacgacgacggcaagacggtggacgggcccggccgactggctaagcaggctttcgagtatggcattaaaaagggccggcagggcctgggctccattttcgtctgggcatctgggaatggcgggagagagggggactactgctcgtgcgatggctacaccaacagcatctacaccatctccgtcagcagcgccaccgagaatggctacaagccctggtacctggaagagtgtgcctccaccctggccaccacctacagcagtgggggccttttatgagcgaaaaatcgtcaccacggatctgcgtcagcgctgtaccgatggccacactgggacctcagtctctgcccccatggtggcgggcatcatcgccttggctctagaagcaaacagccagttaacctggagggacgtccagcacctgctagtgaagacatcccggccggcccacctgaaagcgagcgactggaaagtgaacggcgcgggtcatacaatttagccatttctatggattcggatcggtggacgcaaaatctctaggtgaggaggcaaagaagtggacagcagggccatcgcagcacatgtgggtggccgcctcggacaagagacccaggagcatccccttagtgcaggtgctgcggactacggccctgaccagcgcctgcgcggagcactcggaccagcgggtggtctacttggagcacgtggcggttcgcacctccatctcacacccacgccgaggagacctccagatctacctggtttctccctcgggaaccaagtctcaacttttggcaaagaggctgctggatctttccaatgaagggttaacaaacggggaattcatgactgcccactgctggggagaaaaggctgaagggcagtggaccttggaaatccaagatctgccatcccaggtccgcaacccggagaagcaagggaagttgaaagaatggagcctcatactgtatggcacagcagagcacccgtaccacaccttcagtgcccatcagtcccgctcgcggatgctggagctctcagccccagagctggagccacccaaggctgccctgtcaccctcccaggtggaagttcctgaagatgaggaagattacacaggtgtgtgccatccggagtgtggtgacaaaggctgtgatggccccaatgcagaccagtgcttgaactgcgtccacttcagcctggggagtgtcaagaccagcaggaagtgcgtgagtgtgtgccccttgggctactttggggacacagcagcaagacgctgtcgccggtgccacaaggggtgtgagacctgctccagcagagctgcgacgcagtgcctgtcttgccgccgcgggttctatcaccaccaggagatgaacacctgtgtgaccctctgtcctgcaggattttatgctgatgaaagtcagaaaaattgccttaaatgccacccaagctgtaaaaagtgcgtggatgaacctgagaaatgtactgtctgtaaagaaggattcagccttgcacggggcagctgcattcctgactgtgagccaggcacctactttgactcagagctgatcagatgtggggaatgccatcacacctgcggaacctgcgtggggccaggcagagaagagtgcattcactgtgcgaaaaacttccacttccacgactggaagtgtgtgccagcctgtggtgagggcttctacccagaagagatgccgggcttgccccacaaagtgtgtcgaaggtacggtcctcctggcggggaacggcaggcaactgtgtccagcaaaggagtgcctggagggcagagtctgtcagcatcttccccaggggccggggagggcatgttgcatcaccccactgtggacaggagcccatttacagagctgctgaggggccttcgtccctttgtgcactggatgcatatttgttgggtccctgctgtgggcagacaccgtgcagcagcgggataagatgggaagcagaatagcaaggtgctcacaccccattggtggactacgcgggacgtccctgcccatgtcgcgctcagcatgcatcctttgcactgtcgataatcagagaaaccatgttttgggttaaaaa

SEQ ID NO: 156501 - DNA, 3132 bp, Homo sapiens
gagcggctttaaaaggcggcactccaccccccggcgcactcgcagctcgggcgccgcgcgagcctgtcgccgctatgcctccgcgcgcgccgcctgcgcccgggccccggccgccgccccgggccgccgccgccaccgacaccgccgcgggcgcggggggcgcggggggcgcggggggcgccggcgggcccgggttccggccgctcgcgccgcgtccctggcgctggctgctgctgctggcgctgcctgccgcctgctccgcgcccccgccgcgccccgtctacaccaaccactgggcggtgcaagtgctgggcggcccggccgaggcggaccgcgtggcggcggcgcacggctacctcaacttgggccagattggaaacctggaagattactaccatttttatcacagcaaaacctttaaaagatcaaccttgagtagcagaggccctcacaccttcctcagaatggacccccaggtgaaatggctccagcaacaggaagtgaaacgaagggtgaagagacaggtgcgaagtgacccgcaggccctttacttcaacgaccccatttggtccaacatgtggtacctgcattgtggcgacaagaacagtcgctgccggtcggaaatgaatgtccaggcagcgtggaagaggggctacacaggaaaaaacgtggtggtcaccatccttgatgatggcatagagagaaatcaccctgacctggccccaaattatgattcctacgccagctacgacgtgaacggcaatgattatgacccatctccacgatatgatgccagcaatgaaaataaacacggcactcgttgtgcgggagaagttgctgcttcagcaaacaattcctactgcatcgtgggcatagcgtacaatgccaaaataggaggcatccgcatgctggacggcgatgtcacagatgtggtcgaggcaaagtcgctgggcatcagacccaactacatcgacatttacagtgccagctgggggccggacgacgacggcaagacggtggacgggcccggccgactggctaagcaggctttcgagtatggcattaaaaagggccggcagggcctgggctccattttcgtctgggcatctgggaatggcgggagagagggggactactgctcgtgcgatggctacaccaacagcatctacaccatctccgtcagcagcgccaccgagaatggctacaagccctggtacctggaagagtgtgcctccaccctggccaccacctacagcagtggggccttttatgagcgaaaaatcgtcaccacggatctgcgtcagcgctgtaccgatggccacactgggacctcagtctctgcccccatggtggcgggcatcatcgccttggctctagaagcaaacagccagttaacctggagggacgtccagcacctgctagtgaagacatcccggccggcccacctgaaagcgagcgactggaaagtaaacggcgcgggtcataaagttagccatttctatggatttggtttggtggacgcagaagctctcgttgtggaggcaaagaagtggacagcagtgccatcgcagcacatgtgtgtggccgcctcggacaagagacccaggagcatccccttagtgcaggtgctgcggactacggccctgaccagcgcctgcgcggagcactcggaccagcgggtggtctacttggagcacgtggtggttcgcacctccatctcacacccacgccgaggagacctccagatctacctggtttctccctcgggaaccaagtctcaacttttggcaaagaggttgctggatctttccaatgaagggtttacaaactgggaattcatgactgtccactgctggggagaaaaggctgaagggcagtggaccttggaaatccaagatctgccatcccaggtccgcaacccggagaagcaagggaagttgaaagaatggagcctcatactgtatggcacagcagagcacccgtaccacaccttcagtgcccatcagtcccgctcgcggatgctggagctctcagccccagagctggagccacccaaggctgccctgtcaccctcccaggtggaagttcctgaagatgaggaagattacacagctcaatccaccccaggctctgctaatattttacagaccagtgtgtgccatccggagtgtggtgacaaaggctgtgatggccccaatgcagaccagtgcttgaactgcgtccacttcagcctggggagtgtcaagaccagcaggaagtgcgtgagtgtgtgccccttgggctactttggggacacagcagcaagacgctgtcgccggtgccacaaggggtgtgagacctgctccagcagagctgcgacgcagtgcctgtcttgccgccgcgggttctatcaccaccaggagatgaacacctgtgtgaccctctgtcctgcaggattttatgctgatgaaagtcagaaaaattgccttaaatgccacccaagctgtaaaaagtgcgtggatgaacctgagaaatgtactgtctgtaaagaaggattcagccttgcacggggcagctgcattcctgactgtgagccaggcacctactttgactcagagctgatcagatgtggggaatgccatcacacctgcggaacctgcgtggggccaggcagagaagagtgcattcactgtgcgaaaaacttccacttccacgactggaagtgtgtgccagcctgtggtgagggcttctacccagaagagatgccgggcttgccccacaaagtgtgtcgaaggtacggtcctcctggcggggaacggcaggcaactgtgtccagcaaaggagtgcctggagggcagagtctgtcagcatcttccccaggggccggggagggcatgttgcatcaccccactgtggacaggagcccatttacagagctgctgaggggccttcgtccctttgttcactggatgcatatttgttgggtccctgctgtgggcagacaccgtgcagcagcgggataagatgggaagcagaatagcaaggtgctcacaccccattggtggactacgcgggacgtccctgcccatgtcgcgctcagcatgcatcctttgcactgtcgataatcagagaaaccatgttttgggttaaaaa

SEQ ID NO: 156502 - DNA, 1593 bp, Homo sapiens
atggaggtcagccgggctggactctccactgtcctggaggctgtcctctgccctgctgatctcactgcagcctccctcgatgctgcctccccgatgcctagcagcagccaccttcccgtcttgggatatccggtgggtaaatctggtgccaggcctggctcgacacaggaagttgttctcaccgctgcagcagtgacacaggaagttgttctcaccgctgcagcagtgacacaggaagttgttctcaccgctgcagcagtgacacaggaagttgttctcaccgctgcagcagtgacacaggaagttgttctcaccgctgcagcagtgacacaggaagttgttctcaccgctgcagcagtgacacaggaagttgttctcaccgctgcagcagtgacacaggaagttgttctcaccgctgcagcagtgacacaggaagttgttctcaccgctgcagcagtgacacaggaagttgttctcaccactgcaggtgcagaaaacaagcctgtgtcggccccccacagcagcagcacttgtgccaggacaggctccccaggccggcccctccacactcagtcacccccaagaggccacattctctttgggaaggaaaaagtgtgctataaatttaagcatgacatattaaagcaccttctgacccaattaactgtggacggcattgtgagcatccccttagtgcaggtgctgcggactacggccctgaccagcgcctgcgcggagcactcggaccagcgggtggtctacttggagcacgtggtggttcgcacctccatctcacacccacgccgaggagacctccagatctacctggtttctccctcgggaaccaagtctcaacttctggcaaagaggttgctggatctttccaatgaagggtttacaaactgggaattcatgactgtccactgctggggagaaaaggctgaagggcagtggaccttggaaatccaagatctgccatcccaggtccgcaacccggagaagcaaggtgtgtcttctgtacaaagtgccattctcaccagtcctttgaagagtcgcaagatacaaagtcagtagtggcctgggagggatggggatgtacacatggggtccactgtgaggtgccaaagaatttggggataaggtcaggtaaacatcaccccctgaaaataaagctagtttaaaacaaatgcatcatggctgcatttgggcagctgcagaacgacgcccctcctgcagccagccagcttccttccctgggcccggtggggagcaactttgccaatgtgcagccccaggcaaggcattcacttctgtgggtctcagtgtccttgtctgggaaatgacaggtttagaggaggtgatccatgatcctgtcacttaaaatccatacacatatcctgccagagtccagacaattttaacctcaaggtcggaccacttgtgagcagacattatatgtagttggtctctttcaacaaggtggagtttagtcattaggactttgtgaacaacttctcaactccccacccgacttgtcagccccaagctgggcttgcctggattaaaaactaaaccaggcagcctcgtcgagtg

SEQ ID NO: 156503 - DNA, 711 bp, Homo sapiens
ttagatcagcatttgaattgtggactcaggaaggtggactgccctccccaagtggctgggcataatccaatccctcaagaacttgaatagaacagacagcagagggaggaggagttcacccctcatttcctgcctcgccactggagccgggacatctcgtcatctcttgcccctggactggatgtccaccatcggctgccctggttctcaggcctccagacctgagctgagtttgaatcacacctcaggcttccctgggtttccagccttccaccccagatggtgggccttttccggcccccagagtcacataaaccagattcctcatcctaaatctcctctgtgcgttggttctgcttctccagagagcctacactaacacgctccccctctttcccctgcaattcctgagatcacctaccaaagaaagcacatattctcaactgcatccttcagggtctcctcctggggggggccctggtccgagacagctgggattgactagccccaaggcttctgaacagccactacccggctttgactgggagggccagggctcggataggagggcaggagcagatggctcgggaagggagagctcggggacacctggaactgcagttctacaacgaagtagctgtgggacaagttgctgaacctctctgagcctaatgttttctcagcctcgtgccaagcttggcgtagtgataa

SEQ ID NO: 156504 - DNA, 965 bp, Homo sapiens
acgcagctgaggggctccctccagtccggatcccgcccttctcagagaccacagccaacgggacgatctccttcaccgagatggtgcaggacatgggagccgggctggccgtggtgcccctgatgggcctcctggagagcattgcggtggccaaagccttcgcatctcacaataattaccgcatcgatgccaaccaggagctgctggccatcggtctcaccaacatgttgggctccctcgtctcctcctacccggtcacaggcagctttggacggacagccgtgaacgctcagtcgggggtgtgcaccccggcggggggcctggtgacgggagtgctggtgctgctgtctctggactacctgacctcactgttcttactacatccccaagtctgccctgggttgccgtcatcatcatgggccgtggccccgctgtttcgacaccaagatctttcaggaacgctctgggctttttaaagaggctggacctgctgcccctgtgcgtgaccttcctgctgtgcttctgggaggagcaggacggcatcctggccggggccctggggtctctgctcatgctcctgcactctgcagccaggcctgagaccaaggggtcagaggggccggttctggtcctgcagccggccagcggcctgtccttccctgccatggaggctctgcgggaggagatcctaagccgggccctggaagtgtccccgccacgctgcctggtcctggagtgcacccatgtctgcagcatcgactacactgtggtgctgggactcggcgagctcctccaggacttccaaaagcagggcgtcgccctggcctttgagggcctgcaggttccccgtctccgtgtcctgctgtcccgctgacctgaaggggttccagtacttctctaccctggaagaagcagagaagcacctgaggcaggagccagggacccagccctacaacatcagagaa

SEQ ID NO: 156505 - DNA, 423 bp, Homo sapiens
cccacgcgtccggcatgaaaaacgaccttgtttacacgggcgtggaccctgagaccctgccgaataggaacggtgacggtgttctactggactctcacctgacccacagttccgaaccagaaaaatccaggcctctctgctcaccttggaggagaccatgaagcagctggaggaattggaggaggaatttcgccgcctgaaacccctcctggctaaccttggggggaactctgtcccccatcctggctgcacttgaggatcccgcccaggaaggccttttgcaataaggaaaggaacgggggagaggacctgagggaccacccctacccacacatctgacgcagcatgtcacaccccaaaggcctgaggagagggagctgtggaccacgcctggtaggggcccagctggcgttactgcccccg

SEQ ID NO: 156506 - DNA, 2882 bp, Homo sapiens
  misc_feature (1)...(2882): n = a,t,c or g
atggccgagccgctactcaggaaaaccttctcccgcctgcggggccgggagaaacttccccggaaaaagtcggacgccaaggagcgcggccacccagcccagcgcccagagcccagccctccagagccagagccccaggctcccgaagggtcccaggccggagcagaggggccctccagccccgaggcatcaaggagccctgcacggggagcctacctgcaaagcctggagcccagtagccgccgatgggtgctgggtggggccaagccagctgaggacacctctttagggcctggggtacctggcactggggagcccgccggcgagatctggtacaaccccatccctgaggaagaccccagacctccagcacctgagcccccggggccacagcctggctcagctgagtcagagggcctggccccccaaggtgcagcccccgccagccccccaaccaaagcctcccgcaccaagtccccgggccccgccaggcgcctctccataaagatgaagaagctgccggaactgcggcgccgcctgagcctgcgaggcccccgggctggcagggagcgcgagagggctgcccctgcgggctccgtcatcagccgctaccacctggacagcagcgtggggggccccgggccggcagcagggcctgggggcacccggagcccgagggccggttacctcagcgacggggactcaccggagcgcccagctgggcccccatcacccacctccttccggccctacgaggtgggtcccgcagcccgggcacccccggccgcactctggggccgcctcagcctgcacctgtacggtctcggggggctgcggccagcgccgggggccacccccagggacctctgctgcctactgcaagtggatggggaggccagggcccgaacagggccactgcgaggggggccggacttcctgcggctggaccacaccttccacctggagctggaggccgccaggctcctgcgcgccctggtgcttgcgtgggaccctggcgtgagaaggcaccggccctgtgcccagggcaccgtgctgctgcccacggtcttccgagggtgccaggcccaacagctggccgtgcgcctggagcctcaggggctgctgtatgccaagctgaccctgtcggagcagcaggaagcccctgccacagctgagccccgcgtctttgggctgcccctgccactgctggtggagcgggagcggccccccggccaggtgcccctcatcatccagaagtgcgttgggcagatcgagcgccgagggctgcgggtagtgggactgtaccgtctttgtggctcagcggcagtgaagaaagagcttcgggatgcctttgagcgggacagtgcagcggtctgcctatctgaggacctgtaccccgatatcaatgtcatcactgctgtgccctccttagccttagaagccagtggtgccctgaccagaggggaccctgtgttcacaggcatcctcaaggattatcttcgagagttgcccaccccactcatcacccagcccctgtataaggtggtactggaggccatggcccgggaccccccaaacagagttccccccaccactgagggcacccgagggctcctcagctgcctgccagatgtggaaagggccacgctgacgcttctcctggaccacctgcgcctcgtctcctccttccatgcctacaaccgcatgaccccacagaacttggccgtgtgcttcgggcctgtgctgctgccggcacgccaggcgcccacaaaggcctcgtgcccgcagctccggcccaggccttgccagtgcagtggacttcaagcaccacatcgaggtgctgcactacctgctgcagtcttggccagatccccgcctgccccgacaatctccagatgtcgcgccttacttgcgacccaaacgacagccacctctgcacctgccgctggcagaccccgaagtggtgactcggccccgcggtcgaggaggccccgaaagccccccgagcaaccgctacgccggcgactggagcgtttgcgggcgggacttcctgccctgtgggcgggatttcctgtccgggccagactacgaccacgtgacgggcagtgacagcgaggacgaggacgaggaggtcggcgagccgagggtcaccggtgacttcgaagacgacttcgatgcgcccttcaacccgcacctgaatctcaaagacttcgacgccctcatcctggatctggagagagagctctccaagcaaatcaacgtgtgcctctgagccagatgacggggtgggaccccggttagtaaggaccgggcgcccagtggctaaggcggtgccctggtgaccaaggagagccagacctgttgctcaggccgagctcctgggttgccagcgagttaccacggggaccagtcgcgtgtatggcttgagacttcattcccagtttccagggggcccggtatttgggacacttagtttgccaagtctggggcctggggattttagggaccagcggttgtgaccatctttcctgaggcaccaagggcttccccttttgttgccaaaaaggtaagttctcgcgcttgctaggctggcctctcttgcctccccttggccggggcaacaccagttactgtgagcatcaccctgggtgtgggtgagtcacctctagtcggccctcttgcttgctgccaaccaaatcagtatttagctttgagcactgcactgttttttcctcccttgggacggacacaaagattaggcatgagggcatttttgtgggggggcagcccttattcctggggtttccagcatgggacacagggggtagcctgggggtttattaggagaaacagttnggttttcccctaaccttttcccgggg

SEQ ID NO: 156507 - DNA, 2358 bp, Homo sapiens; identical to SEQ ID NO: 150777

SEQ ID NO: 156508 - DNA, 439 bp, Homo sapiens
ttttttttttttttttttttttttttggaaacagcgtctcactctgtcgcccaggctggagggcaggggcatgatctcagctcactgcaacctccgcctcccaggttcaagcaattctcctgcctcagcctcccaagtagctgggatcacaggcataagccaccacacccacctaagttttgtgtttttagtagagacagggtttcaccatgttggccaggcaggtctcgaactcctgacctcaagtgatcctcccgcctcagcctcccaaatggcagggattacaggtgtgagccactgcgcctggccgataactattttcaagcaaagcaattatggcatgttataagaaatttggggattttaactgtttatttacccaatttactaacttaatgccaccttaatggcaataattagatttttctcagcagaaaga

SEQ ID NO: 156509 - DNA, 1763 bp, Homo sapiens
tttaattttgttgggagaatccttggacctagaggacttacagccaaacaacttgaagcagaaaccggatgtaaaatcatggtccgaggcaaaggctcaatgagggataaaaaaaaggaggagcaaaatagaggcaagcccaattgggagcatctaaatgaagatttacatgtactaatcactgtggaagatgctcagaacagagcagaaatcaaattgaagagagcagttgaagaagtgaagaaattattggtacctgcagcagaaggagaagacagcctgaagaagatgcagctgatggagcttgcgattctgaatggcacctacagagatgccaacattaaatcaccagcccttgccttttctcttgcagcaacagcccaggctgctccaaggatcattactgggcctgcgccggttctcccaccagctgccctgcgtactcctacgccagctggccctaccataatgcctttgatcagacaaatacagaccgctgtcatgccaaacggaactcctcacccaactgctgcaatagttcctccagggcccgaagctggtttaatctatacaccctatgagtacccctacacattggcaccagctacatcaatccttgagtatcctattgaacctagtggtgtattaggtgcggtggctactaaagttcgaaggcacgatatgcgtgtccatccttaccaaaggattgtgaccgcagaccggagccgccaccggcaactaacctatgaccttctgacctctgaactcttcacccaatgatgacctgaccatgcctgcctgctgatcagttaactggtaatcgcctttgcttgcctgtcgtcagtgcagcgagctgaggcacttggtccgtttcgtctttaccatctaaccaaacaaaaggacaaagaaattgttgttccttccaactcagcttttttttttttttttttcctgtttgggtgaaagtggttctagaaactgcactgaatagtagtaaagcaataaggcccaattcatcccacagcactgatcatcttttaatatcccaccctaagcgaacggtaagaaggcctctcttaagaaggggagacagatggtccttaactactcaatgacagaggcagttactgtgagagacttctaggaatctttttcttctcatagcgaagtcaaagctctctctgaatgtactgtgtgatgatgcatcatgcatgaaccttcggtcagggatatcattggtgaagtgatttcaaaaagtattcaaaatttgatatgctgtttagtcactacagtgccctcaaagggcagaagttgcagccttttttatattgcctgccaaaatttgaagtattagaagaaagtgtgccatgagagaaaaacttaaggagttttgaaaagtaatgcaaataacaaaactgcaacactatttttaaaaagataaatatctgagttaaaattactgaatctttattttacacctaaaaaaatatgagaacaaggtacatgcattatgtgtcacattactgggcaaactgttcaagtatttttttttaaacctccctgtatagaaaaaaatcattaaggatgtaaaagccatgcttgcctatttgctgtatacatgtaatgaaattgtagataaagtgtagtgcattgaaacaaatgaacaaaaagtagatacttttactatacaagggtgctggtgcagaaaaaaatatatatatttttggaaatgtagcattttatactttcaagtgttataaaaa

SEQ ID NO: 156510 - DNA, 3219 bp, Homo sapiens
cacccaactgctgcaatagttcctccagggcccgaagctggtttaatctatacaccctatgagtacccctacacattggcaccagctacatcaatccttgagtatcctattgaacctagtggtgtattaggtatggctttcccaacgaaaggctaagaattcaagaacggtcttaactgaaccctcatcagatctgaatttaacaaatgcttagtctcagcagcctccgggggaaaaaagcttagcctagcagtcagtgacttacttgcactttttgcacatagatataaagtaaaattatgttattaatttggtttagtctgtaatattacacagtaatggtaatttataaaggagtgtatagtagtatactgactgctaagtgtactatactgtttgctttactaatcaacctattcaattgcagtcatacttattgactcagagtttaaaaccacaatctgtaggctttaagaattgcttttaaacctttttaagtgataaactcttgaagtggtcttaaggttagcaaataattgtctgtattaaacatggcgttatttaagtagtcctgctgcaagaaaggcacttcagtgaatatgtgactagtaaagcttaaatatgtttggatctaatagagctcatgaaatactgtaacttggggattgtaaatgaatggatacaataggttaaggcccaagatgtttgaaatgaatgcaatattaatagatgcatatatacatgacatattgtggttaattttaaaactactgtgccttaacgtgtttcttaaacttttgtagtaaatgaacatttgaaatccattttgataaacctgctgttaatgttttttccccccttgtgaatgttttctaactttgtcttggtaattgcaatttaactaggtgcggtggctactaaagttcgaaggcccgatatgcgtgtccatccttaccaaaggattgtgaccccagaccgaggttagtttagttctgcagttcttgtctataaaaaatgcgttgggtgtccataaaatttgcaaccccacacctgatggaaaaatgtaattgcttacctgcacccagttttttttccttttctaaatttgtttgtgatcattgacaaatttaagggttgggttttttgttttggtttggttttttctcccttcatatttttaacttattaaatcttctattattatgtactatgatttattcctactaaaacataaattagtcaatttggggagctattaaattttgatgttgcctcagttattttcattaataacttttgctaaaatttaccttttaaaagttctgaaatttggggttggtattgcaaaatgaattgaacggatggtgctttaatgagagaagtaaaggaatatatgcctcctgtgtacttttggagaaaactgaagatttagtttccatttttctttataataaaatatttgagccactgtataaacatgagggtgcacatgtcaagtacttagctaaaatcaacaaagtgaggactgtgaagataacttttcatgtagttggatttttttatataaattagagcgtcaattcccttttattcttacattctcttgccaaaatggatcctttgatttttgtcatttgctgctaaaatatattatatgaaggtaaactgtctcttgaagttctgtggtggtatgagatccagctgtgtgaatataatttttgactaacctgtgactggaaaataagtcttcatttttctcctttacaacttttataatttgtgtcctgtatatgcccttggacccttttataaattatttttgcttattgaggaatggtattttcggtttattgacattgaattgttttctaagtttttccatcacaagataggaatatcaagcatggtagtaaaaaaggattttttacaagtttctattatggcacatttgtttcctacaaattaaattgatcaaagtctcaaatattagtggaggaaaaagtgctggatttgtacttcaattgtacatcttctatgaatttatgaaggacctacctgctttatgtgattaccttgagtactgatgataaatactagacacagctgttgtccacatcagaaataacatgcctttcccaaagacattgttaatatttgtttagcataatccataaagaacgttgaagacttttaaactaatgtattcatcactaacagtgattgttcagtgaacaaaatagaccccagctccgtggtcgtctatgaggatggtattccttgtaagtgttctgtatgagcacgtctcatagggatggggaagttttttggaaagtcacttgagttttaaagaaactggacaattccatgaataatttgaggttttattcatattgctaatgtctacaattgttctaaagagtattttaaagtagttcttttcccccagctaatctttccctatgtatgcccccttttaggagatttctcaccattttgctttaacacaataattattggcctacttaatactccagtgccttgagatagttggacatattttaggaagattttattgtatttggaaaattacgacacattccatgcatggatcttttgtagttacgtgttttgattagtcctgtcactgtttttatttaaaatgcagtgtcagcaaaccgaaatgctcatttctttttttagtaacagagtactcggtatacttatcactggtattgcactcattggggtctaaagggagatgtctgaagtccttcacttaaattattttatgatactactgttttctctatttttgaggttaaaattattttaaaaaaatattttgaagagaagtttattagtataagcattcatttaatgcaaaaaaactcagcccttgggacatataaccatgtaattctatatgaacgtttagggtactacatggttgaccaatatctagttctttactaaaagtaaactcacctctttatatatatttcaaaactggaatttgaagcctattaggagaccaactgaccttttaggttgtaatgaactgtatgggtcttgcagggtgacacacctgtgtagggagggccaagacttggcagaggatgtattctaggtgtcctggtatatataaatggtcactcacttcctttatatattccacactcaaagtagaagcccgagtttttcttcgaagaattactaaaa

SEQ ID NO: 156511 - DNA, 917 bp, Homo sapiens
ttgagccctttccagggggtgattgcataccacgggctacactggagtcctgccgtagcatgattgcgctcatggatacagttggctctggaaagctcaatctgcaggagttccaccacctctggaacaagattaaaggctggcaagaaaattttcaaaccattatgacacagaccagtccgggcaccatcaaacagctacgaagatgcgaaatgcagtcaaacggacgcaggattccacctcaacaaccagctcttatgacatcattaccatgcggtacgcagacaaacacatgaacatcgactttgacagtttcatctgctgcttcgttaggctggagggcatgttcagagcttttcatgcatttgacaaggatggagatggtatcatcaagctcaacgttctggagtggctgcagctcaccatgtatgcctgaaccaggctggcctcatccaaagccatgcaggatcactcaggatttcagttttcaccctctatttccaaagccatttacctcaaaggacccagcagctacacccctacaggcttccaggcaacctcaatcaagtcatgttcctcctccattttaccccctacccatccttgatcggtcatgcctagcctgaccctttagtaaagcaatgagcgagtgctcctgcttaccttgctctaggctgtctgcagaagcacctgccggtggcactcagcacctccttgtgctagagccctccatcaccttcacgctgtcccaccatgggccaggaaccaaaccagcactgggttctactgctgtggggtaaactaactcagtggaatagggctgtgttactttgggctgtccaactcataagtttggctgcattttgaaaaaagctgatctaaataaaggcatgtgtatggctggaaaaaaaaaaaaa

SEQ ID NO: 156512 - DNA, 918 bp, Homo sapiens
  misc_feature (1)...(918): n = a,t,c or g
gggaaagccaacccttcgggagttcacccacctcgggacaagattaagggctggcgagaaattttcaacaacattacaccgagccagtccggcaccatcactggctacgagatgcgaaatgcattaacgacgcaggattccacctcaacaacccgctctatgacatcatttaccagtcgtacggcagacaaccacatgaacatcgactttgaaagtttcaatctgctgcttcgttagggctggagggcatgttcagagcttttcatgcatttgaccaaggatggagatggtatcatcaggctcaacgttctggagtggctgcagctcaccatgtatgcctgaaccaggctggcctcatccaaagccatgcaggatcactcaggatttcagtttcaccctctatttccaaagccatttacctcaaaggacccagcagctacacccctacaggcttccaggcacctcatcagtcatgttcctccttccattttacccccttaccccatcccttgatcggtccatgcctagccgtgaccctttagtaaagcaaatgaggtaggaagaacaaacccttgtccctttgccaatgtggaggaaagtgcctgccctctggtccgagccgcctcggttctgaagcgagtgctcctgcttaccttgctctaggctgtctgccagnaaagccctccggtgggacttcagcaacctccttgtggctgaacccctccaatcaccttcacgctgtccccccatgggccagggaaccaaaccagcactgggttctactggtggtggggtaaactaactcagtggaatagggctggttactttgggctgtccaactcataagtttggctgcattttgaaaaaagctgatctaaataaaggcatgtgtatggctggtaaaaaaaaaaaaaaaaa

SEQ ID NO: 156513 - DNA, 3937 bp, Homo sapiens
gccctcagcatcggaccagagtacttggtatctggatgaatcgacactcactgacaacatcaaaaagacactgcacaagttctgtggcccctcccctgtggtcttcagtgatgtgaactccatgtatctgtcttccacggagccgccagccgctgctgaatgggcatgtctgctgcgccctctgaggggccgtgagccagagggcgtctggaacctgctaagcattgtgcgggagatgttcaagcggagggacagcaatgctgcccccttgttggaaatcctcactgaccagtgcctcacctatgaacagataacaggttggtggtatagcgtacgtacctcagcctcacacagcagtgccagtgggcacacgggccgtagcaacgggcagtcagaggtggcagcccatgcctgtgccagcatgtgtgacgagatggtcacactgtggaggctggccgtgctggaccctgcactcagcccccagcggcgccgggaactgtgtacgcagctgcggcagtggcaactgaaggtgattgagaacgtcaagcggggccaacacaagaagacgctggagcggctcttccccggcttccggccagcggtggaggcctgctacttcaactgggaagaggcctacccacttcctggtgtcacctacagcggcactgacaggaagctggcactgtgctgggcccgggccctgccctctcggccaggtgcctcccgctctgggggcctggaggaatcccgggaccggccccgaccccttcctactgagccagctgtgcggcccaaggagcctgggaccaagcgaaagggcttgggtgagggggtcccctcatcacagcggggtccccgccgcctctcagctgaagggggagataaagctctacataagatgggtccaggtgggggcaaagccaaggcactgggtggggctggcagtgggagcaagggctcagcaggtggcggaagcaagcgacggctgagcagcgaagacagctccctggagccagacctggccgagatgagcctggatgacagcagcctggccctgggcgcagaggccagcaccttcgggggattccctgagagccctccaccctgtcctctccacggtggctcccgaggcccttccactttccttcctgagcccccagatacttatgaagaagatggtggtgtgtacttctcggaagggcctgagcctcccacagcctctgttggcccccctggcctactgcctggggatgtctgtacccaggacgacctcccttctacagatgagagtggcaatgggcttcccaaaaccaaagaggcagcccctgcagttggagaggaggatgatgactaccaggcgtactatctgaatgcccaggatggggctgggggcgaggaagagaaggccgagggcggggctggggaggagcacgacctgtttgctgggctgaagccactggaacaggagagtcgcatggaggtactgtttgcctgtgctgaggccctgcatgcgcatggctatagcagtgaggcctcccgtctcactgtggagcttgcccaggatctgctagccaacccacccgacctcaagggcaagaagaacaaggtatccacgagccgtcagacctgggtggctaccaacaccctgagcaaggcggccttcctgttgacagtgctaagtgagcgtccagagcaccacaacctggccttccgagttggcatgtttgccttggagctacagaggcctccagcttctaccaaggccttggaggtgaagctggcataccaggagtctgaggtggctgccctgctcaagaagatccctctgggtccaagtgagatgagtaccatgcggtgccgggcagaggaacttcgggaggggacactctgtgactatcggcctgtgttgcctctcatgctggccagtttcatctttgacgttctctgtgctccaggttcccggcccccaagtcgcaactggaacagcgagacacctggggatgaggagcttggatttgaagcagcagttgctgccttgggcatgaagacaacagtgagcgaggcagaacatcccctcttatgtgaaggcacacgtcgggagaagggtgacctggcattagcactaatgatcacttacaaggacgaccaggccaagcttaagaagatcttagacaaactcttggaccgagagagccagacacataagccacagacgctgagttctttctactcatctagccgcccaaccacagccagccagaggtctccttcaaagcacgggggcccatctgccccaggggccctgcaaccactgacctcaggctctgcagggcctgctcaaccagggagtgtggcaggggctgggccaggccccactgagggcttcacagagaagaatgtgcctgagagttccccacattccccctgtgagggtcttccatctgaggcagctttgaccccaaggccagaagggaaggttcctagccgcttggcacttggcagtcgtggaggctataatggacggggatgggggtccccaggacggcctaagaagaagcacacaggcatggccagcattgacagcagtgcccctgaaacaacatcggatagttcccccaccttaagccggagaccacttcgagggggctgggcccccacctcctggggtcgaggtcaggacagtgacagcattagcagctcttcttcggactccctgggctcctcatcctccagtggaagtcgccgggccagtgccagtggaggagcccgggcgaagactgttgaagttggcaggtacaagggccgccgccccgagagtcatgcccctcatgtacccaatcagccatcagaggcagctgcacacttctacttcgagctggcgaagacagtgctgatcaaggcagggggcaacagcagcacttccattttcacacatccatcttcctcagggggccaccagggtcctcaccgcaacctgcacctttgcgccttcgagattgggctttatgcccttggcctgcacaactttgtttctcccaactggctctcacgtacttattcttcccacgtttcctggattacaggccaggccatggagataggcagcgcagccctgactatactggtagaatgctgggatgggcacctgacaccccctgaggttgcatccctggctgacagggcatcacgggcaagagactccaatatggtgagggcggcagcagagctggccctgagctgcctgcctcacgcccatgcattgaaccctaatgagatccagcgggccctggtgcagtgcaaggaacaggacaacctgatgttggagaaggcctgcatggcagtggaagaggcagctaagggtgggggcgtgtaccctgaagtgttgtttgaggttgctcaccagtggttctggctatatgagcaaactgctaggtggctcatccgcagcccgtgaaggggcttacaagctgtagtgccagtgggatcagggcaggtggggaagctgggcgcggtatgcctgagggtagagggggcccagggactgagccggttacagtggcagcggcagcagttgacagcagcagccacagtggtgcccgtcatatcggtggggtctagtttatacccgggtccaggactggggcatggccactcccctggcctgcacccctacactgctctacagccccacctgccctgtagccctcagtatctcactcacccagcttcacccttgcccaccccatggcctcacatgccccggcctgccgtcttccctgtggcccagctctgcatacccacagggtgtgcatcctgcattcctaggggctcagtacccttattcagtgactcctccctcacttgctgccactgctgtgtctttccccgttccttccatggcacccatcacagtacatccctaccacacagagccagg

SEQ ID NO: 156514 - DNA, 406 bp, Homo sapiens
tggatcgggagaaaggccttgagaacttcgaagtgcgtcggaattcgatgaactaaaaaataaagaaacacttaggctagtcttcagaatcagtttctgagtttactgtatcaaaacactggagcacacacttagggttggccccaggacactcttcaataaaagtctctgaagataaggaggtagatgtaaaatagaaataatccattctataactctggaagttccaacttcctggaaaactcaatatggagtcatcagctgtctttgttatggaaactgaactctctctctctctctctctccctctcctgtttcacagctaaattaggagacacaaaagagctagaagccttcattgctgatcttgacaaaactttagcaaagtaagtacatttctgatatt

SEQ ID NO: 156515 - DNA, 786 bp, Homo sapiens
tgcggccgcggaggacctgtcggacgcgctgtgcgaggtttgacgcggtgctggccgacttcgcgtcgcccttccacgagcgccacttccactacgaggagcacctggagcgcatgaagcggcgcagcagcgccagtgtcagcgacagcagcggcttcagcgactcggagagtcgcagattcacttttataggaacagcttcagccttcagtgatgaaaaactgaattctccaacagactctaccccagctcttctctctgccactgtcactcctcagaaagctaaattaggagacacaaaagagctagaagccttcattgctgatcttgacaaaactttagcaagtatgtgaaacaagaagttctggggtcctttcatcataagggagaagaagcttcagaaagttccgaggacctgctaaaatcagctactagaatctgctgcccagaggggacaaagaccgtgcacctcaacccttcctaccccaggcccactcctcaggcctcacccttaaaatcagccccttgatccccatttcctgggcaatttagacagtgaaactggactttgtttaacctgcttgcagcatattagaacagacgatccgatgctaatattggtattttctcttaaaacatagctttcctgtaatttaaagtgcttttaatgaaaatatttgtaattaagtgatatatagttgggaaataggcagtaagctttcccattattaatatatttttgtatacaaataaaatttgaactgaaaaaaaaaaaaaaaaaaagat

SEQ ID NO: 156516 - DNA, 411 bp, Homo sapiens
ttcccaagtggcagctgctaaggatcatactgttgtattaactgaagatggatgtgtttatacatttggtctaaacatttttcatcaattaggaattattccaccgccttccagttgtaatgtacccagacagatacaggcaaaatatctgaaaggaaggacaatcattggcgttgcagcaggcaggtttcatacagtcctatggactagagaagctgtttacactatgggactaaatggtggacaactggacagttgaacttgaaaaaagttcttgtgtctgggggtcatatggaatacaaggttgatcctgaacatttgaaagaaaatgggggtcaaaaaatttgcattcttgcaatggatggagctggaagggtgttttgctggagatcagtcaacagttctctgaag

SEQ ID NO: 156517 - DNA, 283 bp, Homo sapiens
ggcatcttctctgcattcagtttcatccaagtcattccgggatttcttactagaagaaaaaaagtctgttactagccatagttcaggcgatcatgtcaaaaaagtttcttttaaaggaattgaaaattctcaggcaccaaaaattgtcagtccctggctatcttcttcagtgactgctccatccatggtagccccagtcacttttgcatctattgtagaagaagaactacaacaagaagcagctcttattagaagtcgagaaaaaccgttggctctgattcag

SEQ ID NO: 156518 - DNA, 418 bp, Homo sapiens
ctccttcaaaagcccccaaaccagtgaatgcatgggcatcttctctgcattcagtttcatccaagtcattccgggatttcttactagaagaaaaaaagtctgttactagccatagttcaggcgatcatgtcaaaaaagtttcttttaaaggaattgaaaattctcaggcaccaaaaattgtcaggtaataaaacaaacttaaaactaatacattttctaccttaaaatattctgtggtggttttatgttctgaaataatccttaaaactttatgaggcagattttttgtacactcttttacattcagaattaaaattagcatgtttaaattccttccccacttaaaaaaattgaaacggttacggagatataattgacttaaaatcaattgcgtatatttaaagggatacattctgag

SEQ ID NO: 156519 - DNA, 4610 bp, Homo sapiens
  misc_feature (1)...(4610): n = a,t,c or g
tggaattattccaccgccttccagttgtaatgtacccagacagatacaggcaaaatatctgaaaggaaggacaatcattggcgttgcagcaggcaggatttcatacagttcctatggactagcagaagcctgctttacactatgggcactaaatggctggacaactgggttgtttgctagatcccaatggagaaaaatgtgtaactgctcctcgtcaggtctctgcccttcaccataaagacattgctctgtctttggttgctgcaagtgatggagctacagtctgtgttaccacaaggggagatatttacttacttgcagactatcagtgcaagaagatggcttctaaacagttgaacttgaaaaaagttcttgtgtctgggggtcatatggaatacaaggttgatcctgaacatttgaaagaaaatgggggtcaaaaaaatttgcattcttgcaatggatggagctggaagggcgttttgctggagatcattcaacagttctctgaagcagtgtcgatggtcctatccacgtcaggtcttcatttctgatattgctttaaatagaaatgaaattctattcgttacgcaagatggagaatgatttagagggagatggttagaagagaaaagaaagagttctgaacagaaagagattttatcaaaccttcacaattcctcatcagatgtgtcttatgtctctgatataaatagtgtgtatgaaagaattcgacttgagaaacttacctttgcacatagagctgttagtgtcagcacagatccaagtggatgcaactttgcaatcctgcagtcagatcctaaaacaagcctttatgaaattccagctgtgtcctcatcatccttttttgaagagtttggcaaactgttgagggaagcagatgaaatggacagcattcatgatgtgacatttcaagttggcaatagatctcttccctgcacataaatatattttggccagtgcattctgatatttttcagaaattgtttcttttcagatggtaatacttcagaatttacagatatttacccagaaaggatgaagattcctgccagggtgcccatcctctttgtggtagagaaggttcatccctgacatgtttgaatgaccttttacaatttatatacacagatacttgtgactttttaactcatggcttcaaaccaagaatacacttaaacaaaaacccagaagaatatcagggaactctgaattctcatttgaataaagtgaatttccatgaagatgataaccagaagtctgcatttgaagtttacaaaagtaatcaagctcaaacagttagtgagaggcagaagagcaaacctaaatcttgtaaaaaaggaaaaaatattagggaagatgatcctgtaagaatgttgcaaactgttgcaaagaaattcgacttcagtaatttgagtagtaggttagatggagtcagatttgaaaatgaaaaaattaatgttattgccaagaacactggtaataaactgaagctaagtcagaaaaaatggtataatgtatacaaagaaaaagtgatgcttgttttctttctttttttagaatctcaaaatgtagattttatttgtagtgttcttgtggtggctgatcaacttctcataacccggttgaaagagatttgtgaagtagcattaactgaaaaacttacccctgaagaatgctgctatgctactggaatttgcagcaatgtatagtgcaaaacagttgaaactgtcttgtttacagtttataggattgaatatggcagctttacttgaagcaaggtctcttgatgttttaagcgatggtgttttgaaggatctttctgagttttaccggaaaatgattccagcaatggatagaagagtcattacaccatatcaagatggaccagatattagctatttggaagtagaagatggagatatcttccttgaaagaagaaataaatatggaaccaaatcattcggaaactatgttcaagaaagcaaaaacaaaagctaaaaagaagccacgtaaacgttcagatagttctggaggttataacctttcagatattattcagagtccatcatctacaggattattaaagtctggtaagaccaattctgtggaatctcttccagaactgttgacatcagactctgaaggaagctatgcaggagtgggtagtcctagagatttacagtcccctgatttcacaacaggatttcattcagataagattgaggcgaaagtcaaaccgtatgttaatggtacatctcctgtgtattctagggaagatttaaaaccatgggaaaagtcaccaatacttaaaatatctgctccacagcctattcccagtaacagaattgatactaccagctctgccagttgggttgctggttctttcagtcctgtcagccctcctgttgtggatctcagaactatcatggaaatagaagaaagtagacaaaaatgtggagctacaccaaagtcacatttaggcaaaacagtttctcatggagttaaactttctcagaagcaacgaaaaatgattgcattgactaccaaggtataacaattcaggactgaatagcatgcaaacagttatatgcattccttcagatgccccctaaacagtaaatgaatagggatcttctctgcattcagtatcatccaagtcattccgggatttcttactagaagaaaaaaagtctgtaactagccatagttcaggcgatcatgtcaaaaaagtttcttttaaaggaattgaaaattctcaggcaccaaaaattgtcagatgctctacccatggtaccccaggaccagaaggcaaccatatttcagatttaccacttctagacagtcccaatccctggctatcttcttcagtgactactccatccatggtagccccagtcacttttgcatctattgtaggaagaagnacttcaaccaaggaagcagctcttattagaagtcgagaaaaaccgttggctcttgattcagattgaggagcatgccatacaagatttattggttttctatgaggcatttggcaaccctgaagagtttgtcattgttgaaaggacaccgcagggaccactggcagtacctatgtggaataagcatggatgctagttcactgtggaggtgagatgcattttacataattatgagtttgttcatatgaaagaaaagctgtgggaaaagagtcttgagagattttgtaatatcattctaaatagattaagaaaagatataatttctttactgcagttaaatcatataatgtttgtatgattaaaaataaatttctcagaattgtgattttagtaactttatataaaatgtgtgagacaaaaacttattaaggttaaatagaattgtttcttctgaataatctaacaaaggaaaatataagtgattgaatcataagatataagggggggtaaagtattaaaaataacttttttgtttgataacttgagaatttagaagattttgccaagtatgtgttgttgcttgacttcttaaatatggcattgatgaatttaaagtaggagcatcagttattacttctgattcattaatggccagaattttgtgtttggtgtaatagttgtgtcaccattcttgttgctttttaaaaatcaggctaatcatgtggtccatgtctcttcaaagcttgacctgcacaaatgccatatttctatttggacccacatattctccattttgcattgagcagtagagtacagtggaaagggaataagaatactgattattctgaacagtttagtcccaagagaatagcgttttaaaaaagaaaaacaagatttggagtcattgtgggttatttttggtgggatggaggatcttaaaaatgcctaattgtgagagaaatcaaattgctgaaaagtgttaaaaatttctgaaaattaaatgcttaattccatataccaggaattcaaataagtttggaagagggttggattatccattaccctttacaatactgtattaatccggaagttctctgaacctcaattgtatatctagacataaaaattgttttctgtataggatgttgtttggtttgtttctgagtgtttaaattttgcaaaaacaaatgttaaatttgtgcttcagtacctagataaattggaaaggttaatgttctagtttctggaaggtaagcctgggagacacataagcaattcactgcttataatttagttgatgtaaaatgaccggaaactgactcaatatgtcaggtttaactcctgcccaaaagcagcagacattgtaagcagatgttgcaataaaaaatgatcttgatccatttcactaatgtgtgcttgacattttttactatattgacatttattatggaaagagttaataattattttttctgatgtgctacactagtggccagtatatggttaagttgatgttgtatttattctaagacggatttaaaaaggcagttttctaaatatgaacttgtgaatttttgtatgtgtgtttgagtaaattgagaaatgaattttataaatgttctattgatgttgcagtaaagaagccttttgaagtaaaaaaaaaaaaaa

SEQ ID NO: 156520 - DNA, 1326 bp, Homo sapiens
ctagccttgcatcctagggatgaagcccacttgatcatggtggataagctttttgatgtgctgctggatttggtttgccagtattttattgatgatttttgcatggatgttcatcaggcatattggcctaaaattctctttttttgttgtgtctctgtcaggctttggtatcaggatgatgctggcctcataaaatgagttagggagtattccctctttttctattgattggaatagtttcagaaggaatggtcccagctcctccttgtacctctggtagaattcggctgtgaatccatctgctcctggactttttttggttggtaagctgttaattattgcctcaatttcagagcctgttcttggtttattcagagattcaacttcttcctggtttagtcttctgctagcttttgaatgtctttgctcttgcttctctaattcttttaattgtgatgttagggtgtccattttagatcttttctggtttctcttgtgggcatttattgctataaatatccctctacacgcagctttgcctgtgtcccagagattctggtatgttgtgtctttgttctcattggtttcaaagaacatctttatttctgccttcatttcgttatgtacccagtagtctttcaggagcaggttgttcagtttccatgtagttgagcggttttcagtgagtttcttaatcctgagttctagtctgattgcactgtggtctgagagacagtttgttataatttctgttctgttacatttgctgaggagtgctttacttccaactatgtggtcaattttggaataggtgtggtgtggtgctgaaaaaaatgtatattctgttgatttggggtggagagttctgtagatgtctgttaggtctgcttggtacagagctgagttcaattcctggatatccttgtcaaccttctgtctctttgaactgtctaatgttgacagtggggtgttaaagtctcccactattattgtatgggagtctaagtctctttgtaggtctctaaggacttgctttatgaatctgggtgctcctgtattgggtgtatatatatttaggatagttagctcttcttgttgaattgatccctttaccattatgtagtggccttctttgtctcttttgatctttgttggtttaaagtctttggtctttgatgatggtgacgtacagatggagttttggtgtggatgtcctttctgtttgttagttttccttctaacagtgaggaccctcagctgcaggtctgttggagtttgctggaggtccactccagatcctgtttgccttggtatcagcagcggagg

SEQ ID NO: 156521 - DNA, 924 bp, Homo sapiens; identical to SEQ ID NO: 125289
  misc_feature (1)...(924): n = a,t,c or g

SEQ ID NO: 156522 - DNA, 2991 bp, Homo sapiens; identical to SEQ ID NO: 120691

SEQ ID NO: 156523 - DNA, 1842 bp, Homo sapiens
atgcatgcaccctgtggcactgctacagctgctggcacacacaagcaagcacagatcccactgctattgccccagcgaagtgctttggccagcaccacccatgagagtgttgtgaccagtgaactgggaatatctcagcccctccagtgcagcaggtcatcgcaatgtcaattcatgtcttctaaattagcaagtccgcataaagtgtttcagtggacaccttcaatgatgagcgacgaagcccccagtcctggtagtttcggcagctctctgatgcccttcagtagggttttcattacaggcaggagtagtgtttggctgcaaactccttacagccaaggacttctgacagcaaacccagggcttttcccaggattgtcacagctacatacacatgggcacagggcattgcagaagaaagctatttcttcaaaaaacgaattcaccatcatgggccaaatatcagaggcaacttcagccttatttggtgagaaagaaagcaaagaagctacacttagaggagaaggagcaagaaacagagatgatagagtagattcaaactgcaggctccagcccccaggtcaggatggagatgaggggcagaaggtgccggttaaatactcggctggtgatacccaggcaaacagggtctggagtggactccagcaaactccaacagacctgcagctgagggtcctgactgttagaagaaaaactaacaaacagaaaggacatccacaccaaaaccccatctgtacatcagcatcatcaaagaccaaagaaatacaaactaccatcagagaataccataaaaacctctatgcaaataaactagaaaatctagaagaaatggataaattcctggacacatacaccctcccaaggctaaaccaggaagaagttgaatccctgaatagaccaataacaggctctaaaattgaggcaataattaatagcctaccaaccaaaaaaagtccaggaccagatgcattcacagctgaattctaccagaggtacaaagaggagctgagaataaaatacctaggaatccaacttacaagggatgtgaaggacctcttcaaggagaactacaaaccactactcaacgaaataaaaggacacaaacaaatggaagaacattccatgctcatggataggaagaatcaatattgtgaaaatggccacactgcccaagaattggaaaaaactgctttaaagttcatatggaaccaaaaaagagcccacattgccaagacaatcctaagccagaagaacaaagctggaggcatcatactacctgacttcaaactttactacaaggctactgtcaccaaaacagcatggtaccggtaccaaaacagagatatagaccaatggaacagaacagagcccccagaaataataccacacatctacaaccatctgatctttgacaaacctgacaaaaacgagaaatggggaaaggatcccctatttaataaatggtactgggaaaactggctagccatatgtagaaagctgaaactggattccttccttacaccttatacaaaaattaattcaagatggattaaagatttaaatggtagacctaaaaccataaaaaccctagaagaaaacctaggcaatactattcaggacataggcatgggcaaggacttcatgacgaaaacaccaaaagcaatggcaacaaaagccaaagtaggaaaatgggatctaattaaactaaagagcttctgcacagcaaaagaaactaccatcagagtgaacaggcaacctacagaatgggaaaaaatttttgcaatctatccatctgacaaagggctaatatccagaatctaa

SEQ ID NO: 156524 - DNA, 1989 bp, Homo sapiens; identical to SEQ ID NO: 117890

SEQ ID NO: 156525 - DNA, 1863 bp, Homo sapiens
atggggagaaaccagcgcagaaaggatgaaaattccaaaaaccagaatgccttttctcctccaaaggataacaactcctctccagcaagggaacaaaactggatgaagaatgagtttgacaaattgacagaagtacgcttcagaaggtgggtaataacaaacaactccgagctaaaggagcatgttctaacccaattcaaggaagctaagaaccttgacaaaagattagacgaattactaactataataaccattgtagagaagaacataaacgacctgatggagctgaaaaacacagcaccagaacttcgagaagcatacacaagtttcaatagccaaatcgatcaagcggaagaaaggatatcagagattgaagagcaactcaatgaaataaagtgtgacatcaagattaaagaaaaaagagtgaaaagaaatgaacaaagcctccaagaaatatgggactatgtgaaaagaccagatctacatttgattgatatacctgaaagtgacaaggagaatggaaccaagttggaaaacactcttcaggatattatccaggagaacttccccaatctagcaaggcaagccaacagtcaaattcagaaaatacagagaacaccacaaagatattcctcaaaaagagcaactccaagacacattaattgtcagattcaccaaggcaaatggtctggagtggacctccagcaaactccaacagacctgcagctgaaggtcctgactgttagaaggaaaactaacaaacagaaaggacatccacaccaaaaccccatctgtacgtcaccatcatcaaagaccaaagaaatacaaactaccatcagagaataccataaacacctctatgcaaataaactagaaaatctagaagaaatggataaattcctggacacatacaccctcccaagactaaaccaggaagaagctgaatccctgaatagaccaataacaggctctgaaattgaggcaataattaatagcctaccaaccaaaaaaagtccaggaacagacggattcactgccaaattctaccagaggtataaggaggagctggtaccattccttctgaaactattccaatcaatagaaaaagaggaaatcctccctaactcattttatgaggccagcatcatcctgataccaaagcctgacagagacacaacaaaaaaagagaattttagaccaatatccccgatgaacattgatgcaaaaaccctcaataaaacactggcaaaccgaatccagcagcacatcaaaaagcttatccaccatgatcaagtgggcttcatccctgcaatgcaagactggttcaacacatgcaaatcaataaacgtaatccagcatataaatagaaccaaagacaaaaaccacatgattatctcaatagatgcagaaaaggcctttgacaaaattcaacagcccttcatgctaaaacctctcaataaattagtgttggaagttctggccagggcaatcaggcaggagaaggaaataaagggtattcaattaggaaaagaggaagtcaaattgtccctgtttgcagaggacgtgattgtatatttagaaaaccccatcgtctcagaccaaaatctccttaagctgataagcaacttcagcaaagtctcaggatacaaaatcaatgtgctaaactcacaagcgttcttatacaccaataacagacaaacagagagccaaatcatgagtgaagtcccattcacaattgcttcaaagagaataaaatacctaggaatccaacttacaagggatgtgaaggacctcttcaaggagaactacaaaccactgctcaaagaaataaaagaggacacaacattccatgctcatggatag

SEQ ID NO: 156526 - DNA, 642 bp, Homo sapiens
ttacgatttggcctgtttttgcagtggctggtacgggttgttcctttccgtgtttagtgcttccttcaggagctcttttagggcaggcctggtggtgacaaaatctctcagcatttgcttgtctgtaaaggattttatttctccttcacttatgaggcttagtttggctggatatgaaattctgggttgaaaactcttttctttcagaatgttgaatattggtccccactctcttctgacttgtagagtttctgctgagagatccgctgttagtctgatgggcttccctttgtgggtaacccgacctttctctctggctgcccttaaaattttttccttcatttcaacttggtgaatctgacaattatgtgtcttggagttgctcttctcgaggagtatctttgtggcattctgtgtatttcctgaatttgaatgctggcctgtcttgctaggttggggaagttctcctggataatatcctttggtctttgatgatggtgacgtacagatggggttttgctgtggatgtcctttctgtttgttagttttccttctaacagtcaggaccctcagctgcaggtctgttggagcttgctggaggtccactccagaccctgtttgcctgggtatcagcagcagagg

SEQ ID NO: 156527 - DNA, 496 bp, Homo sapiens
agagaagttctcataacaactaatgtttgcgcccgagggattgatgtgaagcaggtcacaattgttgtgaactttgatctccctgtaaaacaaggagaggagccggactatgagacctacctccacagcatagggcggacggggcgctttgggaaaaaaggccttgccttcaacatgattgaagtagatgagctgccctcgctcatgaaaatccaggaccactttagaaagtcctaaattctgaagtccgcgacctttcctccagccccccatctaaacaaggcaggctctgatgatggcctgctggaactctggactggcagatttctctgatggaaactcaaaaggtcccatggttcaaattgtcctgtgccccaaagcccatggatgtggctggggagcaggggagaaggaacaccttccaggacagtgacagcagtattaagcaactcaacgctgaagacatggatgaaattgaaaagattgactattgaaa

SEQ ID NO: 156528 - DNA, 707 bp, Homo sapiens
cctccgctggtgatacccagcaaacagggtctggagtggacctccagcaaactccaacagacctgcagctgagggtcctgtctgttagaaggaaaactaacaaacagaaaggacatccacaccaaaaccccatctgtacgtcaccaccatcaaagaccaaaggtgtgaacgccatgctgaggaaagtggccgtagcggctgcgtccaagccgcacgtggagatccgccaggacggggatcagttctacatcaagacatccaccacggtgcgcaccactgagatcaacttcaaggtcggagaaggctttgaggaggagaccgtggacggacgcaagtgcaggtttttcgatatgcttcgtgatctgctcaagaacgttgatcttaaagggttcgagcctgatgtacgtattttgcttaccaaatacagcaatagtaatggctctcagtccccgtggatggaggagcaaattcgggatgcctggggaagcatggttctaaaaaatgttgtacgtgaaacggatgaagttggtaaagtgccgcaagccaaaggcaacaatgtggttatcacaagtcttatgacaaacagaggcttcttcgaggagggggaggcaacatttgcgccaagcttcttaatgaacatcaaaggcaataaaacatccgttgtcaaaaacagcatcctggagcaaggacagctgacagtcaactaa

SEQ ID NO: 156529 - DNA, 801 bp, Homo sapiens
atggagaattgcactgctgttttgaatatcatggtcaaagaaaacttcattgataaaattataaataagcagggacctgaaggaagggaagaagggagtcatacagctctccagaggaagaggactctggacagtggcccaaggcaaacagggcctggagtggacctccagcaaactccaacagacctgcagctgagggtcctgactgttagaaggaaaaccaatgaacagaaaggacatccacaccaaaaccccatctgtacgtcaccatcatcaaagaccaaagactttaaaccaacaaagatcaaaagagacaaagaaggccattacataatggtaaagggagcaattcaacaagaagagctaattatcctacatatatatgcacccaatacaggagcacccagattcataaagcaagcccttagagactcacaaagagacttagactcccacacaataataatgggagactttaacacccctctgtcaacattagacagacccacgagacagaaagttaacaaggatatccaggaactgaactcagttctgcaccaagtggacctaatagacatctacagaactttccaccccaaatcaacagaatatacattcttctcagcaccacatcgcacttattccaaaattgaccacatagttggaagtaaagcactcctcagcaaatgtaaaagaggagaaattataacaaaaatcaaactagaactcaggattaagaaacagacgcaaaaccgctcaactacatggaaactgaacaaccttcttctgaatgactactga

SEQ ID NO: 156530 - DNA, 669 bp, Homo sapiens; identical to SEQ ID NO: 125949

SEQ ID NO: 156531 - DNA, 774 bp, Homo sapiens
tcatgccatggttttcagctccatcaggttatttaaggtcttctctatgctgtttattctagttagccatttgtctaatcttttttcaaggtttttagcttctttgcgatgggttcgagcatcctcctttagctcggagaagtttgttattactgattgtctgaagccttcttctctcaactcgccaaagtcattctccgtccagctttgttccgttgctaccaaggagctgcattcctctttggtctttgatgatggtgacatacagatggggttttggtgtggatgtcctttctgtttgttagttttccttctaacagtcaggaccctcagctgcaggtctgttggagtttgctgcaggtcactccagaccctgtttgcctgggtatcaccatcggagggtgacactgaggggacatcatccccaaatgctcccagcctctgaacatccacttccattatgtttttaaaatgagatgaggaagcagccgtcctggccgtggccctgagattcggtgcttttctccagcggcaaggctgctgctgacggcacatcagcagtggcctcagctctgggcgatcttccagcaggtagcgctcctcctgcctcatgctgggggtgcggatcatgtgattttgttcccctctccagtctccaaagcgacggaaaaaatagttggataagaaccggttgacggggtctctaatgatgttgatgtagacaggctggtctcctccaaacctaacacaaacattgagttcgttacaacccat

SEQ ID NO: 156532 - DNA, 585 bp, Homo sapiens
ccggccagctttcaggttttcattatcgagtatgatgttaactgtgcacttgccatttatggtccttatgttgaggtatattccttctatagctaaattggtgagaatttttatcctgaaagggtgttgaattttgtcaaatgctttttctgtgtctttggtctttgatgatggtgacgtacagatggggttttggtgtggatgtcctttctgtttgttagttttccttctaacagtcaggaccctcagctgcaggtctgttggagtttgctggaggtccactccagaccctgtttgcctggctatcaccagcagaggctttactccagttctcaacaggttcctcaaatctgcatctgagaccacctcagcctggacttcattgtccatatcactatcagcattttggtcaaagccgttcaacaagtctctaggaagttccaaactttcccacatctttttgtcttctgagccctccaagtctctaggaagttccaaactttcccacatttccctgtcttcttctaagtcctccaaactgtttaaacctctgcctgttaaccagtgccaaagtcgcttccacat

SEQ ID NO: 156533 - DNA, 1854 bp, Homo sapiens
atggatatgctggacaaagggatgattcaggtgccagttgaaagtttggaatgcccagaacactttgttcaggaacctgtgctgccttcagaattgcgcagtgaaaaacaagagccttggaatcaacccagcctggatttggagcccagctttgccacttacatggcttgttccatgctccctgcagaaaggcaggatctcagacccacttctcttgttatctctcatggggtcagtgtcaaggacagacgtgaacactgtcaatgccccaactactacccaccactgagaaatatgtcccctctggaacattcaattaaaatctgtggggggaaaaagcctcaaaatgacagccagagaataacaacaataacaaaagttattgtaaaccaagacttcaagcagccagatgacactgagttgagtcaaggcagtagaaaagaaacgagtgaagcgtccctggtcacattactttgggagttggtaacagcaggccaaacattccaagatgaccgaatgggaacagctccagtctacagctcccagcgtgagcgacgcagaagacgggtgatttctgcatgtccaactgagcctccactggtgacacccaggcaaacagggtctggagtggacctccagcaaactccaacagacctgcagttgagggtcctgactattagaaggaaaactaacaaacagaaaggacatccaccaaaaccccatctgtatgtcaccatcatcaaagaccaaagaactctccaccccaaatcaacagaatatacattcttctcagcaccacatcccacttattctaaaattgaccacatagttggaagtaaagcactcctcagcaaatgtaaaagaacagaaattataacaaactgtctctcagaccatagtgcaatcaaattagaactcaggattaagaaactcactcaaaaccgctcaactacatggaaacttaacaatctgctcctgaatgactactgggtatataaagaaatgaaggcagaaataaagatgttctttgaaacgaatgagaacaaagacacaacataccagaatctctgggacacatttaaagcaatgtatagtgggaaatttatggcactaaatgcccacaagagaaagcagcaaagatctaaaattgacaccctaatatcacaattaacagaactagagaagcaagagcaaacacattcaaaagctagcagaaggcaagaaacaactaagatcagagcagaactgaaggagatagagacacaaaaaacccttcaaaaaatcaatgaatccaggagctggttttttgaaaagatcaacaaaattgatagaacactagcaagactaataaagaagaaaagagagaagaatcaaatagacacaataaaaaatgataaaggtgatatcaccaccgatcccacagaaatacaaactactgtttatattatttggtactggtacgcaaataaactagaaaatctagaagaaatggataaattcctggacacatataccctcccaatactaaaccaggaagaagttgaatccctgaatagaccaataacaggctctgaatttgaggcaataattaatagcctaccaaccaaaaaaagtccaggaccagatggattcacagctgaattctaccagaggtacaaggaggagctgttaccattccttctgaaactattccaatcaacagaaaaagagggtatccttcctgactcatttcatgaggccagcatcatcttgataccaaagcctggcagagataaaacaaaaaaagagaattttagaccaatatccctgatgaacattggtgcaaaaatcctcaataaaatactggcaaactga

SEQ ID NO: 156534 - DNA, 903 bp, Homo sapiens
atgaatggaatttattcaagagacaccagagagctctttcctctttgtgccatgggagcactgaaggagaagtcagtagcgtgtaatgtggagaggccctcaccagaacccaaccatgatggacaaggagtagatgaacctctttcagaaactggatttaaacaagcagcagctgctggtatatttctgaataatgtgaagtttactcatgctttctccagtgatctcatgaggacaaagcagcctccactgctgatacccaggcaaacagggtctggagtggacctccagcaaactccaacagacctgcagctgaggatcctgactgttagaaggaaaactaacaaacagaaaggacatccataccaaaaccccatctgtacgtcaccatcatcaaagaccaaagaactagagaagcaagagcaaacacattcaaaagccagcaggaggcaagaaataactaagatcagagcagaactgaaggagatagagacacaaaaaacccttcaaaaaatcaatgactccaggagctggttttctgaaaagatcgacaaaattcatagactgcgagcaagactaataaagaagaaaagagggaagaatcaaatagatgcaataaaagatgataaaggtgatatcaccactgatcccacagaaatacaaactaccatcagagaatactataaacacctctatgcaaataaactagaaaatctagaagaaatggataaattcctggacacatacaccctcccaagactaaaccaggaagaagttgaatctcttaatagaccaataacaggctctgaaattgaggcaataattaatagcttaccaaccaaaaaaggtccaggaccagacagattcacagctgaattctatcagaggtacaaggaggagctg

SEQ ID NO: 156535 - DNA, 1402 bp, Homo sapiens
tcaattcaagcactccccacaatctctgggattgtggctaagacaagcagaaagtgtttgatcttcagttgcctgctgttgttcaccctggaatccactgagaggtgtattgtcatgtgtggccttggttatctctctgcatgtgttcttgggcagtatggccattttcacgatattgattcttcctacccatgagcatgaaatgttcttccatttgtttgtatcctcttttatttcactgagcagtggtttgtagttctccttgaagaggtccttcacgtccctcgtaagttggattcccaggtattttattctctttgaagcaattgcgaatgggagttcactcatgatttggctctctgtttgtctgttattggtgtataagaatgcttctgatttttgcacactgattttgcatcccgagactttgctgaagttgcctatcagcttaaggagattttgggctgagacgatggggttttctgggtatacaatcatgtcatctgcaaacagggacaatttgacttcctcttttcctaattgaataccctttatttccttctcctgcctaattgccctggccagaacttccaacactctggtagaattcggctgtgaatccatctggtcctggacttttttggttggtaagctattaattattgcctcaatttcagagcctgttattggtctattcagagattcaacttcttcctggtttagtcttgggagggtgtatgcgtcgaggaatttatccatttcttctagattttctagtttatttgcatagaggtgtttatagtattctctgatggtagtttgtatttctttggtctttgatgatggtgatgtacatatggggttttggtgtggatgtcctttctgtttgttagttttccttctaacagtcaggaccctcagctgcaggtctgttggagtttgctggaggtccactccagaccctgtttgcctgggtatcagcagtggaggtcgagcctcggcaaaggtgggcgcccctcccgcagcctcgctgccaccttgcagtttgatctcagactcctgtgctggcagtgagcaaggctctgtgggcgtaggaccctccaggccaggcgcaggatataatctcctggtgtgccgtttgctaagaccgttgggaaagcgcagtattagggtgagagtgacctgattttccagttgctgcctgtcacccctttctttgactaggaaagggaactccccaaccccttgcacttcctgggtgaggcaatgcctcgccctgcttcggctcacgctcggtgcgctggacccactgtcctgcacccactgtccgacaatccccagtgagatacacccggtacctcagttggaactgcagaaatcgttcgtcttctgcgtcgctcat

SEQ ID NO: 156536 - DNA, 1644 bp, Homo sapiens
cctggagttttgactactgtagcccaaatgccaacttttatcctattttaaatgatcatactgagagcatcttcagcaattatgaccaaagactttcagtggacattggcaattttaaggcttcgctgctgatacccaggcaaacagggtctggagtggacctccggcaaacaccaacacacctgcagctgagggtcctgactgttagaaggaaaactaacaaacagaaaggacatccacaccaaaaccccatctgtatgtcaccatcatcaaagaccaaagtgttggaagttctggccagggtgatcaggcaggagaaagaaataaagggtattcaattaggaaaagaggaagtcaaattttttttgacttctgttttgaccctgtttgcagatgacatgattgtatatttagaaaaccccattgtctcagcccaaaatctccttaagctgataagcaacttcagcaaagtctcaggatacaaaatcaatgtgcaaaaatcacaagcattcctatataccaataacagacaaacagagagccaaatcatgagtgaacccccattcacaattgcttcaaagataataaaatacctacaaatccaacttacaagggatgtgaaggacctcttcaaagagaactacaaaccactgctcaacaaaataaaagaggacacaaacaaatggaagaatattccatgctcatggataggaagaatcaatattgtgaaaatggccatactgcccaaggtaatttgtagattcaatgccatctccaccaagctaccaataaccttcttcacagaattggaaaaaaactactttaaagttcatatggaaccaccaaagagccagcattgccaagtcaatcctaagtcaaaagaacaaagctggaggcatcatgttacctgacttcaaactatactacaaggctacagtaaccagaacagcatggtactggtaccaaaacagagatatagaccaatggaacagaacggagccctcagaaataatgccacatatctacaactctctgatctttgacaaacctgacaaaaacaagaaatggggaaaggattccctatttaataaatggtgctgggaaaactggctagccttatgtcgaaaactgaaactggatcccttccttacaccttatacaaaaattaattcaagatggattaaagacttaaatgttagaactaaaaccataaaaaccctagaaggaaacctaggcaataccattcaggacataggcatgggcaaggacttcatgtctaaaacaccaaaagcaatggcaacaaaagacaaaattgacaaatgggatctagttaaactaaagagcttctgcacagcaaaagaaactaccatcagagtgaacaggcaacctacagaatgggagaaaatttttgcaatctactcatctgacaaagggctaatatccagaatctacgatgaactcaaacaaatttacaagaaaaaaaccaaacaacccaatcaaaaagtggccaaagggtatgaacagacacttctcgaaagaagacatttatgcagccaacagacacgtgaaaaaatgctcatcctcactggccatcagagaaatgcaaatcaaaaccacagtgagataccatctcacaccagttag

SEQ ID NO: 156537 - DNA, 2456 bp, Homo sapiens; identical to SEQ ID NO: 134105

SEQ ID NO: 156538 - DNA, 1208 bp, Homo sapiens
actccttgctgataccaaggcaaacagggtctggagtggacctccagcaaactccaacagacctgcagctgagggtcctgactggtagaaggaaaactaacaaacagaaagaacatccacaccaaaaccccatctgtacatcaccatcatcaaagaccaaagtgtggaagagaaatgtggggccagagcccccacacagagtccctactgggacaccacctagtggagctgtgggaagagggccactgtcctctggaccccagaatggtagatccaccgaccgcttgcaccatgtacctggaaaaaccacagacactcaatgccagcctgtgaaagcagccaggagccaagtaccccagggagggggaaaaggaacaaagaaatctgaaactgaaatacaagctaccatcagagaatactataataaacacctctacgcaaataaactagaaaatctagaagaaacggaaaaattcctggacacatacaccctcccaagactaaaccaggaagaagttgaatctctgaatagacgaataacaggctctaaaattgaggcaataattaatagcttaccaaccaaaaaaagtccaggacgagacggattcacagccgaattctaccaggggtacaaggaggagctggtaccattccttctgaaactattccaatcaatagaaaaagagggaatcctccctaactcattttatgaggccagcatcatcctgatagcaaaacctggcagagacacagcaacaacaacaaaaaacttcaggacaatatccctgatgaacattgatgcaaaaatcctcaataaaatactagaaaaccaaatccagcagcacatcaaaaagcttatccaccacaatcaagttggctttatccctggaatgcaaggctggttcaacatacacaaatcaataaatgtaattcatcatataaagagaactaaaaacaaaaaccacatgattatctcaatagatgcaggaaaggcctttgacaaaattcagcagcccttcatgctgaaaactctcaataaattaggtattgatgggatgtatctcaaaataataagagctatttatgacaaacccacagccaatatcatactgaatgggcaaaaactggaagcattccctttgaaaactggcacaagacagggatgccactcctattcaacactcaccactcctattcaacatagtgtt

SEQ ID NO: 156539 - DNA, 3568 bp, Homo sapiens
ctacagggctacagcacacagctggggctgtcgagctaagagctggggctggcactcaagtaggggagaaatcccactttcagaacactgaaaggagtgagacacgtgggttcgtgggccagtgcaggaatgggacatgccttcctccacagtgctggtctgggaagggtgtggcctgtctggcagccatggcctctgtctaagggagcccttgaggtatgtcccttctatgccaattttgcggcaggttttgatcataaaaggatgctggattttgtcaaatgctttttctgcatctattgagatcatatgatttttgtttttaattctgtttacgtggaaaaattttcctaaacccaaggtttctgaggtggtaggagaaaactggaggtggacgttaatatccccaccagtctgggaatcttcttgggaagccaactccagttccatctcacagaaaacactgagagtaccaagaaggctgaaccaccttccacccacacaaaccaaaaatagggttctggcttccagctgtgctttctgggcttctttgtgatttttcctggcatcctcttggtctgctccatccttggcctctgctttccaggaagacacagcaggagcccacgtgtctgatatagaaaaaagcagtcctagcactgtccatgctgttttggttactgtagccttgtagtatagtttgaagtcaggtagtgtgatgcctccagctttgttcttttggcttaggattgacttggcaatgtgggcccttttttggttccatatgaactttaaagtagttttttccaattctatgaagaaagttcttggtagcctgatggggatggcattgaatctataaattaccttgggcagtatggccattttcatgatattgattcttcctacccatgagcatggaatgttcttccatttgtttgtatcctcttttatttcattgagcagtggtttatagttctccttgaagaggtctttcacatcccttgtaagctggattcctaggtattttattctgtttgaagccattgtgaatgggagttcactcatgatttggctctctgtttgtctgttattggtgtataagaatgcttgtgatttttgcacattgattttgtatcctgagactttgctgaagttggctgtcagcttaaggagattttgggctgagacgatggggttttctagatatacaatcatgtcatctgcaaacagggacaatttgacttcctcttttcctaattgaatgccctttatttccttctcctgcctgattgccctggccagaacttccaacactctggtagaaatcggctgtgaatccgtctggtcctggactttttttggttggtaggctattaattattgcctccatttcagagcctgttattggtctattcagagattcaacttcttcctggtttagtcttgggagggtgtatgtgtcgaggaaattatccatttcttccagattttctagtttatttgcatagaggtgtttatagtattctctgatggtagtttgtatttctgtgggattagtggtgatatctgctttatcattttttattgcatctatttgattcttctctcttttcttctttattagtcttgctagcggtctatcaattttgttgatcttttcaaaaaaccagctcctggattcattgattttttgaagggttttttgtgtctctatttccttcagttctgctctgattttagttatttcttgccttctgctagcttttgaatgtgtttgctcttgcttctctagttcttttaattgtgatgttagggtgtcaattttagatctttcctgctttctcttgtgggcatttagtgctataaatttccctctacacactgctttgaatgtgtcccagagattctggtatgttgtgtctttgttctcgttggtttcaaagaacatctttatttctgccttcatttcgttatgtacccagtagtcattcaggagcaggttgttcagtttccatgtagttgagaggttttgagtgagtttcttaatcccgagttctagtttgattgcactgtggtctgagagacagtttgttataatttctgatcttttacatttgctgaggagtgctttacttccaactatgtggtcaactttggaataggtgtggtgtggtgctgaaaagaatgtatattctgttgatttggggtggagagttctgtagatgtctattaggtccacttggtgcagagctgagttcaattcctggatatccttgttaactttctgtctcgttgatctgtctaatgttgacagtggggtgttaaagtctcccattattattgtgtgggagtctaagtctctttgtaggtcactaaggacttgctttatgaatttgggtgctcctgtattgggtgtatatatatttaggatagttagttcttcttgttgaattgatccctttaccattgtgtaatggccttctttgtctcttttgatctttgttggtttaaagtctttggtctttgatgatggtgacgtacaggtgggtttttggtgtggatgtcctttctgtttgttagttttccttctaacagccaggaccctcagctgcaggtctgttggagtttgctggaggtccactccagaccctgtttgcctgggtatcagcagcggtggatcaggctcgaaccctttaagatcaacgttcttgagcagatcacgaagcatatcgaaaaactgcagtgcggaggtgtagtcaaacaactcagcaggcgtgggaacaatcagcacatcagcagcacatacgacattaatcgtgccgatacccaggttaggcgcgctgtcaataactatgacatcatagtcatgagcaacagtttcaatggccagtcggagcatcaggtgtggatcggtgggcagtttaccttcatcaaatttgcccattaactcagtttcaatacggtgcagagccagacaggaaggaataatgtcaagccccggccagcaagtgggctttattgcataagtgacatcgtccttttccccaagatagaaaggcaggagagtgtcttctgcatgaatatgaagatctggtacccatccgtgatacattgaggctgttccctgggggtcgttaccttccacgagcaaaacacgtagccccttcagagccagatcctgagcaagatgaacagaaactgaggttttgtaaacgccacctttatgggcagcaaccccgatcaccggtggaaatacgtcttcagcacgtcgcaatcgcgtaccaaacacatcacgcatatgattaatttgttcaattgtataaccaacacgttgctcaacccgtcctcgaatttccatatccgggtgcggtagtcgccctgctttctcggcatctctgatagcctgagaagaaaccccaactaaatccgctgcttcacctattctccagcgccgggttattttcctcgcttccgggctgtcatcattaaactgtgcaatggcgatagccttcgtcatttcatgaccagcgtttatgcactggttaagtgtttccatgagtttcat

SEQ ID NO: 156540 - DNA, 1045 bp, Homo sapiens
atgtgccattctgcaatattcactgttctgcagcctccactggtggtgatacctaggcaaacagggtctcaagtggacctccagcaaactccaacagacctgcagttgagggtcctaactgttagaaggaaaactaaaaaacagaaaggacatccacaccaaaaccccatctgtatgtcaccatcatcaaagaccaaagcaacctttgaggactctgtgtggcactttgctgagcgaatcatccctgaccctaatgttatcaagttacgcaaagaggagctcacactgaacaacatccggcaatattacgtgctgtgtgagcacaggaaagacaaataccaagctctgtgcaacatttatggcagcatcaccattggtcaggccatcatcttctgccagactcgtcgaaacgctaagtggttgaccgtggagatgatacaggatggccaccaggtgtctttgttaagcggggagctgaacggtggagcagcgagctccattcattccagaggtttcgggatggaaaagagacggttctcataacaaactaatgtttgcgcccgagggattgatgtgaagcaggtcacaattgttgtgaactttgatctccctgtaaaacaaggagaggagccggactatgagacctacctccaacgcatagggcggacggggcgctttgggaaaaaacgccttgccttcaacatgattgaagtagatgagctgccctcgctcatgaaaatccaggacccactttaacagcagtattaagcaactccaccgctgaagacatggatgaaattgaaaagattgactattgaagaaagaactttattgtttgtgcagtatcctagtttatgtgagaatgtctcagtgggttttgaaggtaatttttttatgttgaggctttttcgacgtgaaactgtcacagatggcaaaataaatgtcacggtacttagttttaagacatgaggtctttttgaagccaaattgatgtgaagcttgtgatccttttgaataaaaaaaaggcaagattatttcttattct

SEQ ID NO: 156541 - DNA, 1071 bp, Homo sapiens
atggcctcgtgggaagggaaagacctgaccgtcccccagcccgacacccgtaaagggtctgtgctgaggaggattagttctctcgttccaccttacgagaaacacccacagatttcactgtggggaaataagtgtgatctgtctctctcaggtggagaaagtagttctcagaataccaatgtactaaattcattggaagacctaaaacctttcattttattgaatgatatggaacatctttggtcattgcttagcaattgcaagaaaacaagagaaaaagcttctgctactagagtgtatattgttctcgataattctggatttgagcttgttacagatttaatattagccgacttcttgttgtcctctgaactggctactgaggttcatttttatggaaaaacaattccatggtttgtttctgatactactatacatgattttaattggttaattgaacaggaaggcgtggaagctgaaaagaaagctatctctctcctttctaaattacggaatgaattgcaaacagataaaccatttatccccttggttgagaaatttgttgatactgatatatggaatcagtacctagaatatcaacagagtcttttaaatgaaagtgatggaaaatcaagatggttctactcaccgtggttgttggtagaatgttacatgtatcgaagaattcatgaagcaattatccagaggcaccgtataaacttgagttcagacttcctgattactcctgatttctactgggacagagaaaacctggaaggactttacgataaaacgtgtcaattccttagcattggccgaagagttaagttaaacgctcagcgagagtttggtttcctgtgtgactgcacggttgcaatcggcgatgtatacttcaaggcacacaaatcagttcttgcttcattctccaattactttaagatgttgtttgtccatcagaccaggtttatatccttacctctgactgcagccaccacggggctcaggctgactcacagtcaggtgccctttggcaagacaggattcaataaatctcatcggaaagccagttag

SEQ ID NO: 156542 - DNA, 1687 bp, Homo sapiens
aattgctaagcaatgaccaaagatgttccatatcattcaataaaacaagagaaaaagcttctgctactagagtgtatattgttctcgataattctggatttgagcttgttacagatttaatattagccgacttcttgttgtcctctgaactggctactgaggttcatttttatggaaaaacaattccatggtttgtttctgatactactatacatgattttaattggttaattgaacaggtaaaacacagtaatcataagtggatgtccaagtgtggggctgactgggaagagtatattaaaatgggtaaatgggtttaccacaatcatatattttggcctgtgcctcatgagtactgtgcaatgcctcaggttgcaccatgacttatatgctgaactacagaaggcacatttaattttattcaagggtgatttgaattacaggaagttgacaggtgacagaaaatgggagttttctgttccatttcatcaggctctgaatggcttccatcctgcaccactctgtaccataagaacattaaaagctgaaattcaggttggtctgcagcctgggcaaggggaacagctcctggcctctgagcccagctggtggaccactggaaaatatggaatatttcagtacgatggtcccctttgacttgatttaggagctctcagttgcatagaaagatctggtgagcaccttttcatccccagaaaaggagcacgtgaattgagtcgcctggcggctctgtacgcgctcagggaagcttagcttcttggtgcccatctacggtgcactggatgatttttcttttgaacattttgccccactacactgttttgggggatagctgggttaaggcaagttaaaagatattttacattttattattgggatttttaggcaactttttttcaggttaaatatataatttcaagtgcctttaatggacctaattttaaatgggccaaggagcaaaaaataagtgagttctgcttttagttagttaaccttgttcttttcttaaatagtacactgcatgggatttaatattccaggaagcatgggattttattttgcttgattttgggcacatgaaataatagctctaggaaaatgcgcatcttaatgactctttgtaaagagaggcatttcttacaactgtgatgtttgcttacataaaagttacctcataagttaattctaacttttattcttgaattttatttcatttcaatagcttgtttccatttgcacgcctttgtattttgattgacctgtaggaatgggatgttagggaaactcaaaattggaacacagtggaaaccaaatgggtatttggaaggaaatgtaatatcttttatattctatttatgatatccccataatcaaatgagattattttaccccacataaatggttttaaatatcagatttttagtttgcagttttaggaaaatgctttagatagaaaaggttccttatgcattgaatttggagtactaccaacaatgaatgaatttattttttatattcttacaaattttattggtcattgtcacagatagtaaatactaaaaatttcaggtcagtttgttttgaaactgaaattggaaataaatctggaaatgttttgttgcactaaaataataaaatgaattgtactgaaaaaaaaaaaaaaaaa

SEQ ID NO: 156543 - DNA, 518 bp, Homo sapiens
  misc_feature (1)...(518): n = a,t,c or g
ngggcgcctgcggaagaccgcccccatttcccaggcccctccctaggggtgcccctcctcagccatggctgccccgttctctcctcctccagcatctgcccctggggccgcccccacctttccgccatctctcgggcccgcgtggcaccctgctttgtttttaacggggataaacttgacttgcttctccaaagagcgggaaaaagaggcgcagtcttggtactgatctgggggagggaacgtcccagggcgcgcaggggcgttttctacccgtgccccgtcggcctgctctgatcagtaccgaccgtgttcggggttcacgtggcccagtcggcaaagtttctttggaggtccagcgtctctgattcccggatcttcagccccacccggagcccccacggttactgccccccgcaacccccgatggagtgtcggaatgcgctttctctccgaacgcaagcgtgggtcgagtcggtaattccgggacagtccggaacggtgctcgaggcgttccaatn

SEQ ID NO: 156544 - DNA, 755 bp, Homo sapiens
caacaggggatcctgtcaccgagggcttaaatttgaaggcgcctttaaatataaaatgggtcaaatagaaattgacgatcaggtggaaggactccaatatctagcttctcgatatgatttcattgacttagatcgtgtgggcatccacggctggtcctatggaggatacctctccctgatggcattaatgcagaggtcagatatcttcagggttgctattgctggggccccagtcactctgtggatcttctatgatacaggatacacggaacgttatatgggtcaccctgaccagaatgaacagggctattacttaggatctgtggccatgcaagcagaaaagttcccctctgaaccaaatcgtttactgctcttacatggtttcctggatgagaatgtccattttgcacataccagtatattactgagttttttagtgagggctggaaagccatatgatttacagatctatcctcaggagagacacagcataagagttcctgaatcgggagaacattatgaactgcatcttttgcactaccttcaagaaaaccttggatcacgtattgctcactggctatttaaccaaatgaggaggtttaatcaacagaaaacacagaattgatcatcacattttgatacctgccatgtaacatctactcctgaaaataaatgtggtgccatgcaggggtctacggtttgtggtagtaatctaataccttaaccccacatgctcaaaatcaaatgatacatat

SEQ ID NO: 156545 - DNA, 985 bp, Homo sapiens
  misc_feature (1)...(985): n = a,t,c or g
caacaggggatcctgtcaccgagggcttaaatttgaaggcgcctttaaatataaaatgggtcaaatagaaattgacgatcaggtggaaggacatccaatatctagcttctcgatatgatttcattgacttagatcgtgtgggcatccacggctggtcctatggaggatacctctccctgatggcattaatgcagaggtcagatatcttcagggttgctattgctgggggcnccagtcactctgtggatcttctatgatacaggatacacggaacgttatatgggtcaccctgaccagaatgaacagggctattacttaggatctgtggccatgcaagcagaaaagttcccctctgaaccaaatcgtttactgctcttacatggtttcctggatgagaatgtccattttgcacataccagtatattactgagttttttagtgagggctggaaagcaatgatgatttacaaagctatcctcaggagagacacagcataagagttcctgaatcggggagaacattatgaactgcatcttttgcactaccttcaagaaaaccttggatcacgtattgctgctctaaaagtgatataattttgacctgtgtagaactctctggtatacactgagctatttaaccaaatgaggaggtttaatcaacagaaaacacagaattgatcatcacattttgatacctgccatgtaacatctaatcctgaaaataaatatggtgccatgcaggggtctacggtttatgatagtaatctaatacattaaccccacatgctcaaaatcaaatgatacatattcctgagagaccccgcaataccataagaattactaaaaaaaaaaaaaaaaaaagggggggccgttttaaagaatcaaattttacttcccggggctggcaaggttttattttttttttggggcccccaaaattaaattcccgggccggggttttacaacgcggggatgggaaaaccccg

SEQ ID NO: 156546 - DNA, 445 bp, Homo sapiens
taacctgtattgtgcggaattctggaatggtcccagaccctcatgacggtcaacgagttcatcagcatttacatcgtgaatgagccaagggacgtcgggtgccttgctcagcaccagctctttgaccagatcccggagttgaagcaggacatcagcatccccgactactgcagcctgggcgatggggaggaggaggaaatcaccatcaatgcctggtttggtccccagggaaccatctccccactacatcaggatccccagcaaaacttcctagtgcaggttggagctgcagctggaatagtggccttctaactcctcctggcccagacacctggccggccacattctctgcctttaaacaccgggctcttaaaaagaaacaagaagcactgaaggggatgaggacaaaaatataaagcaaacccacaaacggccccaggcccat

SEQ ID NO: 156547 - DNA, 1611 bp, Homo sapiens
ctgcagaagtggagtttggagtatatccaggagatcgctggctgccgaactgtcccagtggaagttggttcgaggtacacagatgaggaatggtcccagaccctcatgacggtcaacgagttcatcagcaaatacatcgtgaatgagccaagggacgtcgggtaccttgctcagcaccagctctttgaccagatcccggagttgaagcaggacatcagcatccccgactactgcagcctgggcgatggggaggaggaggaaatcaccatcaatgcctggtttggtccccagggaaccatctccccactacatcaggatccccagcaaaacttcctagtgcaggtgatggggaggaagtacatccggctgtattccccgcaggagtcaggggctctgtaccctcatgacacgcaccttctccataacacgagccaggttgacgtggagaatcccgacctggaaaagttccccaagtttgccaaggccccattcctgtcctgcatcctgtctcctggagagatcctgttcatcccggtgaaatactggcattacgtgcgggctctggatttgagcttctcggtcaagcttctggtggtcgtagccaggataggagctgaaaggggctgacattgcagacagcattcatctgttcactaatttcctgggtcctggaatctatagagacaagcaggactgaacctgtgtcctgaagagccttcactgcccagtggcagccctggggggctgagctccagcactggacaggcacagagcaggggctgcccaggaaggagcacactccaggccaggggtgcatggcagaggaaggtggggagagcccagaaggacattgcagacagacagcctgcatggggactctggcatcagaaagccgaatgtttttgggaaacgggtgggtcacacaggcaggggtgaaacatgggctctgaggttggctacctgatttcaaacccggccgcgctgccaaccttgctgggtgacttggccagggttcccccactttcgcttgttgcccatatggaaaagaggggcaaggccagtcctcactgccgagggccgagaaggcggtgccgagcccctgctgctgcatgaaccttagccgctgtcactgatcccaattactctgatccttttgcccttccttcccataacggcctgctggacgccacagcctgaatactggagagagctgggcattgcccaggtcacaggagagagtccgtagagacctgcgcaggagccgggacccctgctgagcagtgggagctttctgtcatacccatggctcaaggataacctacctgcctgcagagaagtgcgaaggtcttgctggatgacttttcacccgcactcacccaggagcaggctcccaagtgaagaaacccccgaaccatcaccagctcctagaagcctccctcctacccccttctagtcaccatcccccagaagtaatgactctcaaacctgggggatttgaggccagggggagagccaggctctatgctttctgtaattgtgtctcgtttgtgtgcacgcaggtttgttttatgttttggccattaagattttccccagccaaaaaaaaaaaaa

SEQ ID NO: 156548 - DNA, 572 bp, Homo sapiens
acgagatcatcgcgttcagcaccgtgcagaggacttcgcaagctgggctgtgaagtgctgggcgtctcggtggactctcagttcacccacctggcttggatcaacaccccccggaaagagggaggcttgggccccctgaacatccccctgcttgctgacgtgaccagacgcttgtctgaggattacggcgtgctgaaaacagatgagggcattgcctacagtttgtcccgctggctggaagcctggcagtgacacgattaagcccaacgtggatgacagcaaggaatatttctccaaacacaattaggctggctaacggatagtgagcttgtgcccctgcctaggtgcctgtgctgggtgtccacctgtgcccccacctgggtgccctatgctgacccaggaaaggccagacctgcccctccaaactccacagtatgggaccctggagggctaggccaaggccttctcatgcctccacctagaagctgaatagtgacgccctcccccaagcccacccagccgcacacaggcctagaggtaaccaataaagtattagggaaaggtgtgaaaaa

SEQ ID NO: 156549 - DNA, 1313 bp, Homo sapiens
  misc_feature (1)...(1313): n = a,t,c or g
cccacgcgtacgaaaggcttcgcgggccagggctcacttggcgctgagaacgcgggtccacgcgtggtgatcgtccgtgcgtctagggggttgcccacgcagctttcagtcatggcctccggtaacgcgcgcatcggaaagccagcccctgacttcaaggccacagcggtggttgatcggcgccttcaaagaggtgaagctgtcggactacaaagggaagtacgtggtcctctttttctaccctttggaacttcacttttgtggtgccccaaccgagatcatcgcgttcagcaacccgtgcagagggacttcccgcaaacttgggctgtgaagtgctggggcgtctcggtgggactctcagtttcacccacctgggcttgggatcaacaccccccggaaaagaggggaggctttgggccccctggaacatcccccctgctttgctgaacggtgaaccagaacgccttgtctgagggatttacgggcgttgctgaaaaacagattgaggggcatttgcttacaagggggcctctttattcattcgattgggcaaggggtgtcctttcgccaagatcaccctgttaattgatttggcctgtgggaacgcttccgttggatgagggcttctgcggcttggtccaaggcctttcccaagtacacaagacgagccatgggggaaagtttgtccccgcttggctggaaagccttgccagtgacnacggattaagccccaacgtggatgacagcaaggaaatatttctccaaacacaattagggctggcttaacggatagtgagctttgtgcccctgccttaggtggcctgtgctgggtgtccacactgtgcccccaccctgggtgccctatgctgacccaggaaaggccagacctgcccctccaaactccacaagtatgggaccctggagggggtagggcaagggccttctcaatgcctccacctagaagctgaaatagtgacgccctcccccaagcccaacccaggcggacaaaaggcctagaggtaaccaataaagtattagggaaaggtgaaaaaaacacaacaaaacagaaaaaagaaaaaaccaaagaaataataaaagaaaaacatgagggcgtgcactggccgatcgccggccggcatccaccttatgagccggatctcacctgcagcaagaactccggttgtgattgctcaccgcaccattggtttctctccctgcgttcctcttgggtgcagggggcataatgttatgtatgatcatatataggaggggtgaggggctggcttgctccntccgnnnnngtcttttgcgca

SEQ ID NO: 156550 - DNA, 433 bp, Homo sapiens
  misc_feature (1)...(433): n = a,t,c or g
gaaaaaattggccccccccaagatttttttaaaagggcccccccccnnnnnnnnnnnnnnnnnnnnnnnnnnnnnnnnnnnnnnnnnnnnnnnccttaccccatttttttnnnnnnnnnnnnngggggtttgccccctaaagggtcnnnnnnnnnnnnnnnnccctccaaaaaaaccttgggaggccccccnnnnnnnnnnaaaaaggggggaaacccccgttttttaaacccccaaatttttttcccaaaaattccccaaccccggggggggcccccttaaaacccttttggaaaaatttcnnnnnnnnnnnnnnnnnnnnnnnnnnnnnnnnnnnnnnnnnnnnnnnnnnnnnnnnnnnnnnnnnnnnnnnnnnnnnnnnnnnnnnnnnnnnnnnnnnnnnnnnnnnnnnnnnnnnnnnnnnnnnnnnnnn

SEQ ID NO: 156551 - DNA, 1570 bp, Homo sapiens
ccccctcacaatgtccctcggaggtggagtgccaacctgtatcttacaccaaggtaatatggttctgcttactgctatagctctcatcggtgtctgtgttttcatcttggcaataattggcattttacattggcaggaaaagaaagcagatgatagagaaaaacgacaagaagcccaccggtttcattttgatgctatgtgacttgcctttaatattacataatggaatggctgttcacttgattagttgaaacacaaattctggcttgaaaaaataggggagattaaaatattatttaataaatgatgtatccccatgggtaaattaattgggaaagtattcaaaataaatatggtttgaatatgtcacaaggtcttttttttttaaagcactttgtatataaaaatttgggttctctattctgtagtgctgtacatttttgttcctttgtggaatgtgttgcatgtactccagtgtttgtgtatttataatcttatttgcatcatgatgatggaaaaactatgtgtaaataaaaataattaaatgagcaggaatttttgtgtccacttgacttgggcttgcttcttattctaatgatgcaaattatacttttgtgaatatatcacggagtcattacgcattcagcttcatcacagcaggtcaggggtctcactgatggcatacaatatagtgatcgggtactctgacttggtagcacagtaagacagacttgccttaaactcctaattcaaccacttacaaagtcattggttgaacttggctcttgtttaacctcttgaaaccctcagttttcttgtttattcagtggggctaatacttgagttactgtaaacattaaatgggatgatgtatgtgaagtgcttagcttggtgcctagccaggagtaagtggtcaatatgtggtagttgtcattattaatattttagatgatcttattagacttatgacatctaattattaggaaatacatagacttggatagaattttattttccagggcatggaaggaaatattctttggaaaagctaaatttttggtgattgacataaagatttacttgctcatattaactaaaaattatagtactctccaagaattaatgtgcccctaaaaattttcctccaaaaactttatccttatcatgtgataatgaagaacatttgatttcttgaaaggaaactgctgtaggcagcatctgggaatgcaaaatcttcaatcacatttctattctcaaacaccttgagaagtcctataatttacattcagacttcaatgcaaattttgtattgtgaacttcacattttccaaaaaagttactttaaaaagactttaagactgaaaaaaaaaagtttatcaatgctaataaatttctagtatgcaaatggacatgtgatgcctataaaaacacaaaaatttctttgaaaacaattttgttcttatttttttctttatagttcactgagattggcatgtgtttttactttgtatctaagcatgttaacatgtttttttaataaatattccttattggaaaaaaaaaaaaaaaa

SEQ ID NO: 156552 - DNA, 297 bp, Homo sapiens
gaaccgggaagagcagaatttggtggcttatcctcatgatggaaaaatctttttctgcacctcacaagatatccctcctgaaaatgaactgcttttttattatagccgagattatgctcaacagattggtcagaagaactacaggtgtaccttgtgtgacaagtctttcacccagaaggctcacctggagtcccacatggttatccacactggggagaagaatcttaagtgtgattactgtgacaagttgtttatgcggaggcaggacctcaagcagcacgtgctcatccacactca

SEQ ID NO: 156553 - DNA, 340 bp, Homo sapiens
gtgagtccacatgtactcatcaggagacaatccagcaggcatttgggctctctgtatctccaggccccctttgtctgaatggctggatgtttactggagacagggagccatgtctaaacctacaaagatctccacgttacaataaccaggcacctgccgaaactttggaaaacaagatctaccctaaacttccaagtggccaggagcagttaaggcaggtgacctggagatgcaaagaaacagatgacagagctcctgcctgcgagcagggcatcctacaagaaaggaagatagacacaaaggtccacagcacaaataaagagatgagtgtaggcatgag

SEQ ID NO: 156554 - DNA, 2154 bp, Homo sapiens
atgcaactaagtgtaagcagcagtgtgatgcatcctgaaatgagcactattcacaacagcaaagacatggaatcaaccaaggtgtccatcagtggtgcactggataaagaaaacatgaatgaagtgatcagccagcagctgtgcgtcatcttcacacactgctacgggccctaccccatccccaagctcacagaaatcaaacggaaacagacctcgcgcttgggggctccagattttcttctgcccacctgcagggccacgctgccatacttggtggtctgtggcaaagtgggtaaagcaggaacaactggagaagacacagaacaaaacatgtgggaaaaaaatgttcaagtggcagctctcgccgtcgggattactatgacagaggatatgatcggggctatgatgatcgggactactatagcagatcatacagcttttgtcttttctcccctgtttaaggctaccttctcctaccgcaagttttacaaggcctcctcttgtctatataacaccttggccagtacagatgacggctttgtatatgattgggatgcacgttcagataagccaatttttacacttaatgcacacaatgatgaaatctctggtcttgatcttagcagtcaaatcaagggctgtctcgtgactgcttcagctgacaaatacgtgaagatctgggacatcttaggagataggccaagtctagttcattctagggacatgaaaatgaggcgagaggcaaattacagcagtcagctgctgaagaggtccctgttaaaggaggaagacctgatgaagtacctgcagatggaaatgttgttttgcacagaggagcagcaggaatatcctcccatgtcttcttattcgggcgtcccgtggactctgcacacgtggctggagtctttgcggatcgccttccagcagcaccgcaggcctctcatccagtgcttgttaaaggagtttaagaccattcaggaggaggaatacacggaggagctcgttacccaaggcctgcccctgatgtttgagatcctgaaagcgagcaaggttctcatagctggtgacccaaagaagccaacgaaaacactaatgattgtcggatcccactccttagagggctactaccagaagcaggccatttatgctctttttggcggttgtggcctggagctgaggcactcaccagattaccctggtcaaaggttggccctggagggggacaccagaaggccgtttggtgccctgggtttgggtgtaacccctagaactgttgaggtctggacccaaatagcctttgggctagttggtgctcctgtctgtagagaacagcttctgtctgctgctaagtttttccagctggaggctttgcagcgacactgtgagattatctgtgcgaaaagcatcaataccgacaactgtgtggatatttacaaccatgccaagggtcgccctgcgtctggacgccgcgtgctgggagtgggcgcgcagcgctgcgcacggggatggcagtacttgcccgtgccgctggacagcgccttcgagcccgccttcctccgcaagcgcaacgagcgcgagcggcagcgggtgcgctgcgtgaacgagggctatgcgcgcctccgagaccacctgccccgggagctggcagacaatcgcctcagcaaagtggagagctccgcgtgccatcgactacatcaagcacctgcaggagctgctggagcgccaggccttggggctcgaggcgcggccgcgccgtcccccagcgcaggcggaatgcaacagcgacgggaagtccaaggcctcttcggcgccttcgcccagcagcgagcccgaggaggggggcagctagcgagcgcccgaactggccagaccccccgcgcccgccgcacagcgcgcagccgggcgctcaacctaaggtcctcttcgaaggtgaatgctacactagtcccatgtcataaggagaccgaagcacagagaggtgtatggactggagaaaccattcctgtgcggacttgctttggacctctaattggccagcagagtcactccatggaagtagcagaatggacagacaaggcagttaaccatatctggaaggccccacgcaacacagccctcaagatgacccagacctacaacgaccctgccgactga

SEQ ID NO: 156555 - DNA, 1339 bp, Homo sapiens
atgaggaacaaagcagtggggcaggcgcgtgcgcccccagcgcagctggcaggttgggcagcccccttcccgaagcttctggacggaaggccccaggtgttccccgagatgccccaacccgtggcggggtgcacggccaccggccctcgggagaagttgggcggccccgggcgaccccggggacgagtggccgcgtcggtgcagcggttgatgaatgaaatgaacctgagtccagtggggatggagcagctgacttcatcctctgtgagcaatgccttgccagtctcaggaagtcacctgggattggctgcctcacccactcacagtgccatccctgccccaggcattttatcttatttagctgacagaccacctccacagtacatccaccctaactctataaatgttgatggtaatacagcattatctatcaccaataacccttcagcactagatccctatcagtccaatggaaatgttggattagaaccaggcattgtttcaatagactctcgctctgtgaacacacattggtgcccaaagtcttcatcccagtgatggccatgaggtggccttggacacagcaatcactatggagaacgtttctagggttaccagcccaatttcgacagatggaatggcagaggagcttacgatggacggtgttgcaggcgagcattcccaaatcccaaatggctccagaagtcatgaacctctgtctgtggattctgtgagcaacaaccttgcagcagacgctgtaggacatggtggtgtgatacccatgcatgggaatggcctgggagctccctgtggtcatggagacagaccacattgcaagtcgggtcaatggcatgtctgacagtgccctcagtggactccatttcacactgtggccatgagcaccaactctgggcctcgtgagagctctgccgtggctccagtggcttctcacttctctgtgcatgtgtttctgttctcattcatctgggtctcaccagcagatgctgagactcttggtgaatctctcttgggtcttacggtctacgggagtaatgatcaagatccttacgttactctgaaagatacagaacaatatgaacgtgaagatttcttgattaagcccagtgataatcttatagtttgtggccgagctgaacaggaccagtgcaatttagaggtgcatggaaattacattgctgtaggaaacatgacccctgttattgaagtgtgggaccttgatatagtggactctttagagccagtcttcacactcggaagtaaactttcaaaaaagaagaaaaagaaaggaaagaaggtaaagaagttaataaatatttaa

SEQ ID NO: 156556 - DNA, 3776 bp, Homo sapiens
atgaaaatgaacctgagtccagtggggatggcgcagctgacttcatcctctgtgagcaatgccttgccagtctcaggaagtcacctgggattggctgcctcacccactcacagtgccatccctgccccaggcctcccagtggcaattccaaacctgggtccctccctgagctctctgccttctgctctgtctttaatgctaccaatgggtattggggatcgaggggtgatgtgtgggttacctgaaagaaactacaccctacctccaccaccttaccctcacctggagagcagttatttcagaaccattctacctggcattttatcttatttagctgacagaccacctccacagtacatccaccctaactctataaatgttgatggtaatacagcattatctatcaccaataacccttcagcactagatccctatcagtccaatggaaatgttggattagaaccaggcattgtttcaatagactctcgctctgtgaacacacatggtgcccaaagtcttcatcccagtgatggccatgaggtggccttggacacagcaatcactatggagaacgtttctagggttaccagcccaatttcgacagatggaatggcagaggagcttacgatggacggtgttgcaggcgagcattcccaaatcccaaatggctccagaagtcatgaacctctgtctgtggattctgtgagcaacaaccttgcagcagacgctgtaggacatggtggtgtgatacccatgcatgggaatggcctggagctccctgtggtcatggagacagaccacattgcaagtcgggtcaatggcatgtctgacagtgccctcagtgactccattcacactgtggccatgagcaccaactctgtaagcgtggcactctctacctcacacaaccttgcctccctagaatctgtttccctccatgaagttggcctcagcctagaacctgtggctgtctcctccatcacccaggaggttgctatggggacaggtcatgtagatgtatcttcagacagtctttcttttgtatcaccttcactgcaaatggaagactccaattcaaacaaggagaacatggcaaccttgtttacaatttggtgtactctgtgtgaccgcgcctatccctcggactgtcccgaacatggaccagtgacttttgttcctgacactccaatagagagcagagcaaggctttctctcccaaagcagcttgttctccgtcagtcaattgtgggagcagaagttggtgtatggactggagaaaccattcctgtgcggacttgctttggacctctaattggccagcagagtcactccatggaagtagcagaatggacagacaaggcagttaaccatatctggaagatataccacaatggtgtcctagaattctgcatcattacaactgatgaaaatgaatgtaattggatgatgtttgtgcgcaaagccaggaaccgggaagagcagaatttggtggcttatcctcatgatggaaaaatctttttctgcacctcacaagatatccctcctgaaaatgaactgcttttttattatagccgagattatgctcaacagattggtgttcctgaacacccagatgtgcatctctgtaactgtggcaaggagtgcaattcttacacagagttcaaagcccatctgaccagccacatccataaccatcttcctacccagggacatagcggcagcatcgggccaagtcacagcaaagaaaggaagtggaagtgctcaatgtgcccccaagcttttatctctccttccaaacttcatgtctactttatgggtcacatgggtatgaagccccacaagtgtgatttctgtagcaaggcttttagtgatcccagcaacctgcggacccacctcaagatacatacaggtcagaagaactacaggtggtaccttgtgtgacaagtctttcacccagaaggctcacctgggagtcccacatggttatccacactggggaggaagaatcttaaagtgtgattacttgttgacaagttgttttatggcgggagcagggaccttcaaggcaggcacgtgctcatccacaactcaagaacgcccagatcaagtgtcccaagtgtgataagcttgttcttgagaacaaatcactttaaagaagcatctcaattctcatgaaggaaaacggggattatgtctgtgaaaaatgtacaaaggcttatctaaccaaataccatctcacccgccacctgaaaacctggcaaagggcccacctccagtttcgttcaggcaccagaggaggaagaagaggatgactcagaagaggaagatctagcagactctgtggggacagaagactgtaggattaacaagtgctgtgtattcagcggatgagtctctttctgcacataaataaaaggaaaagaaacaagcaattttggatgaaaatgcaaatggaaaaatacacataaccagttatctactataatggtttttatataaaatggttcctgatttattttcagccagtaatcaaaacagactgggaatgaataaagcacttacagaagagtatcctaatgaaaacactttaaaacagattgggaaaactgagcatgtgtcctgttttaagtggtggactgggagggaagtgtcaacttctgaggtctttatttacatgataatctgggagatgcatttatgcctgaatcaaagctgccttctgctcaaacaaatcagatttatttcacattcttccattattccattttcctgctggtcctgtgacttggtaacattctaaacggtccttgccccatagccatcctgattgctgatagtgttttatgcagactcttgtgacttatactcaccacagaatggattgggacacagcagcataagtgtgctactttggcagctaagtaagtttaaagcaggacctgccttaactgctcctggccacttggaagtttagggtagatcttgttttccaaagtttcggcaggtgcctgggaggcaatataaaaaagcagcagtcagtcagtagtcagtgatgggagagaacaagagggagagatgcctgggcctctgcccaagaaattagctttgatggaagcctgagcaagtcaccctgtttaatgtaccttggagatctttgtaggtttagacatggctccctgtctccagtaaacatccagccattcagacaaagggggcctggagatacagagagcccaaataatgcctgctggattgtctcctgatgagtacatgtggactcacctgaggaagggaaggaagggaataatcttttatgtttcatttacccttaatgaaaagtgttaaaacattgcccaactcaaaataacattattttaatgcatgtgcaaagttaggtcttcccaagttgtctcagtgctgaggaacctcatcagagaagcatggaagatgccaaaaggatttttggaaggtaaagaagggctgaatagtgaccacatgggcctgtttttcagggtcccagcttagttaagtccaccccatgcacctgggtccattgtgtctcccgtgcacatccagcgtttctcaggaaccagacccacccttaagttgacaggattgatggaacatgctctcctgctcaaggcacaacctctgggctggagtagaggactctggtgggaaggttttgctgctaatgtatttatggaatgaatgtatttcattcaaatctgtattcctctaggaaggattaaaattaaacttttttaaaatacaaa

SEQ ID NO: 156557 - DNA, 1770 bp, Homo sapiens
atgcaggcattgattcctttggaaagtggatcaggcatgactcagacttctggtgttagcacagaaacaggagatgtagtcaaagatatgggtgtcaataaccagagcaaggaaggaaggtgtccatggaaggatcatgaggcagctccctggatttctgaaaagcctaaaaagagaggcaatgaaggcaaaagcaaaaagtttaaaaataattattccacacagcctgctagaatggagaggaaggaagaaatccttaacccaccttttgaagggaaggatggagatactggtagtattccccataaaagcaaggaaataggatttactttccccaaaatgcatgattcttcgttctcacatacaccagatacacccacagtggaagcagttgacaggaagggtggaaattttcaggttaattttgttgagcttgggactcttggggaaaacaagataagcacagtcaaggcttctactgttactgaaccacctgccaaggtgacagatgtgagctgccaagagcaaatccagggggcaggatttgttccttcagtagtatctgaggagaataagacagatgcagccaatagatacactgcagtggctgacaaaccaagtgaaaggagtaatgatggaaaaagttctggatcagcagcctgtgaaaaactgcccactcctactcctcaagtagtaaaggaaggtgattcctttccagataccttggcaaaaaatgggcaagagatagccccagcccagatttccaaatcattaatggtagataactacaccaaagatggagtcccaggtcaagaaagacccaagggtccctctgctgttgtgccctctacaagcacaggaggagttgctctacctattacaacagccatagaaacagttaacattcatggagatcactctcttaagaataaagctgagcttgctgattccatgaaaaatgaagcagggatcgatgaagggcatgtgataggagaatctgagtcagtgcacagtggtgcgtctaagcattcagtagagaaagtcacagagctagcaaaaggtcacctccttcctggagtgccagtagaagaccagagcctaccaggagaggccagagccctagaaggatatgcagatagaggtaatttcccagcacatccagtgaatgaagagaaagagactaaagaagggtctgttgcagttcagattcctgacttactggaagacaaagcacaaaagctcagtttttgtgaggaccaaaatgctcaagatagaaattccaaaggttcagatagtttgaataagaaggtagatctgactcttttgtctccaaaaagtgaaaatgataaattgaaagaaattagtctggcttgtaaaatcacggaattggaaagcgtttccttgccaacaccagaaatccagtcagatttcttacatagcaaagtcgaagctcctccttcagaggtggcggatacgttagtaataatgactgcttccaagggtgttcgactcccagaacccaaagataagattttggagacacctcagaaaatgacagaaaaatctgaatcaaagacaccaggagaagggaaaaaggaagataaaagcagaatggcagaaccaatgaaaggctacatgagacccaccaagtcccgaggacttactccacttttgccaaagtctacaatccaggaacaagagagacataagcaactgaagtccgctggtatgaacctgccatggggaaatgtgtgtgcttgtggcttttga

SEQ ID NO: 156558 - DNA, 3825 bp, Homo sapiens
atggtagcctcacagcatcccattgcagatgcaaaggctcctgagaagcgggcctcaccatccaagccagcttctgccccagcctccagatctgggtccaagagcactcagactgttgcaaaaaccacaacagctgctgctgttgcctcaactggcccaagcagtaggagcccctccacgctcctgcccaagaagcccactgctgacttgagtcgcccaaagagcacctccaccagttccatgaagaaaaccaccactctcagtgggacagcccccgctgcaggggtggttcccagccgagtcaaggccacacccatgccctcccggccctccacaactcctttcatagacaagaagcccacctcggccaaacccagctccaccaccccccggctcagccgcctggccaccaatacttctgctcctgatctgaagaatgtccgctccaaggttggctccacggaaaacatcaagcatcagcctggaggaggccgggccaaagtagagaaaaaaacagaggcagctgctacaacccgaaagcctgaatctaatgcagtcactaaaacagccggcccaattgcaagtgcacagaaacaacctgcggggaaaaaatgtgagaaaagagtaactagcgaaccatctccagacattgagggagagataaagcgggacttcattgccacactagaggcagaggcctttgatgatgttgtgggagaaactgttggaaaaacagactatattcctctcctggatgttgatgagaaaaccgggaactcagagtcaaagaagaaaccgtgctcagaaactagccagattgaagaaaccgtcacaggaacggggaaaaagtgcagcttgccggccgaggaggattctgtgttagaaaaactaggggaaaggaaaccatgcaacagtcaaccttctgagctttcttcagagacctcaggttgggtctctggttcatcctcctgtggtgggcctgggaaccaaagaaaaagtattcatgttgactcacttgaaccccagagggatcttggcagggaggcctgggatatagaaagcacaccaataatgatgaagaaaaagaagaagaaaccaaagcaaaagagatattctcaaccacgggctggaggaccttcggatgatgacaatgcagataagcctaaaggtcatccatttgcagctgacacacaaaaatcaggtgttctccccagccagcctaccactatgggtacagaatatggacttgtatctggagaaaacttgaaaagggaatgtttagttaactccagtgcagccagactggtagctgagaactttgtctcagagagtctcagaattcctttatatccttctgaagaagcccccaaaactgcaataagttctcagtctaagctgagagtagaggaagagagcaaaagtaacaagtcagtactacaaaaccaagacaagaaattgctgaagcaacatgaatacaaaccacagcctgcaccccacctgaagactcctgtagataaaagccagtcagtaggccctctcaatctgaaaggacccctagcagaagtttctgcatacaatgtagaaacccctttggatatcagacttaaagagggttgctcttttttcttggaccaagaggttatgggtgtagtttcaaaacccacagcagcaaaagaaataccaaatttggtacccactttgatagcaagtaatccattagaatgtaatctaaaagaagggaataatgaaagtaaaatgactaaactgcagaatgtcaaactgaaggagtttcctgaaggagctgaagaggataaagaactaaaaaaggaagcttttcccaacgaaagacaagagatcagcatctttacttctgagcagctgcagggccaagtgttggtacaggtccctggggtagagaatgaaccatttaagagaatggcaggtgatggcaaaagcaggaagggaaggggaagttctgggaaaatgagaacagattctgggaaggtaaaagcaaaatctgagctgccatttcttctggacagccagaaggacggaagggctgttctcataccgagtgagccagtctctaaaactgaaggaatgactactcaggataagagtgaggagctggggctgaattcttcaaagcaaccaggcactaaggctgatctcacggaggcagtggtgatgggggagcctaaagagatgactcagcctaaggtggcaggcaccatgcaggcattgattcctttggaaagtggatcaggcatgactcagacttctggtgttagcacagaaacaggagatgtagtcaaagatatgggtgtcaataaccagagcaaggaaggaaggtgtccatggaaggatcatgaggcagctccctggatttctgaaaagcctaaaaagagaggcaatgaaggcaaaagcaaaaagtttaaaaataattattccacacagcctgctagaatggagaggaaggaagaaatccttaacccaccttttgaagggaaggatggagatactggtagtattccccataaaagcaaggaaataggatttactttccccaaaatgcatgattcttcgttctcacatacaccagatacacccacagtggaagcagttgacaggaagggtggaaattttcaggttaattttgttgagcttgggactcttggggaaaacaagataagcacagtcaaggcttctactgttactgaaccacctgccaaggtgacagatgtgagctgccaagagcaaatccagggggcaggatttgttccttcagtagtatctgaggagaataagacagatgcagccaatagatacactgcagtggctgacaaaccaagtaaaaggagtaatgatggaaaaagtaaaaaggttaaaaatagttctcctgagaagcacattctggagaataagatagatgcaacaaaaatacatgttcccatggaaaccacaggggaccagggaattgaaggaatggcctatatggacgaaaatagaaatattacatttacctgtcccagaacaccatcagagctgataaataaatcatctcctctagaggttctggaatcagcagcctgtgaaaaactgcccactcctactcctcaagtagtaaaggaaggtgattcctttccagataccttggcaaaaaatgggcaagagatagccccagcccagatttccaaatcattaatggtagataactacaccaaagatggagtcccaggtcaagaaagacccaagggtccctctgctgttgtgccctctacaagcacaggaggagttgctctacctattacaacagccatagaaacagttaacattcatggagatcactctcttaagaataaagctgagcttgctgattccatgaaaaatgaagcagggatcgatgaagggcatgtgataggagaatctgagtcagtgcacagtggtgcgtctaagcattcagtagagaaagtcacagagctagcaaaaggtcacctccttcctggagtgccagtagaagaccagagcctaccaggagaggccagagccctagaaggatatgcagatagagaacccaaagataagattttggagacacctcagaaaatgacagaaaaatctgaatcaaagacaccaggagaagggaaaaaggaagataaaagcagaatggcagaaccaatgaaaggctacatgagacccaccaagtcccgaggacttactccacttttgccaaagtctacaatccaggaacaagagagacataagcaactgaagtccgctgaaccactttatggaggatgtgagattaacctgatccagttctaa

SEQ ID NO: 156559 - DNA, 1968 bp, Homo sapiens
atgcaggcattgattcctttggaaagtggatcaggcatgactcagacttctggtgttagcacagaaacaggagatgtagtcaaagatatgggtgtcaataaccagagcaaggaaggaaggtgtccatggaaggatcatgaggcagctccctggatttctgaaaagcctaaaaagagaggcaatgaaggcaaaagcaaaaagtttaaaaataattattccacacagcctgctagaatggagaggaaggaagaaatccttaacccaccttttgaagggaaggatggagatactggtagtattccccataaaagcaaggaaataggatttactttccccaaaatgcatgattcttcgttctcacatacaccagatacacccacagtggaagcagttgacaggaagggtggaaattttcaggttaattttgttgagcttgggactcttggggaaaacaagataagcacagtcaaggcttctactgttactgaaccacctgccaaggtgacagatgtgagctgccaagagcaaatccagggggcaggatttgttccttcagtagtatctgaggagaataagacagatgcagccaatagatacactgcagtggctgacaaaccaagtaaaaggagtaatgatggaaaaagtaaaaaggttaaaaatagttctcctgagaagcacattctggagaataagatagatgcaacaaaaatacatgttcccatggaaaccacaggggaccagggaattgaaggaatggcctatatggacgaaaatagaaatattacatttacctgtcccagaacaccatcagagctgataaataaatcatctcctctagaggttctggaatcagcagcctgtgaaaaactgcccactcctactcctcaagtagtaaaggaaggtgattcctttccagataccttggcaaaaaatgggcaagagatagccccagcccagatttccaaatcattaatggtagataactacaccaaagatggagtcccaggtcaagaaagacccaagggtccctctgctgttgtgccctctacaagcacaggaggagttgctctacctattacaacagccatagaaacagttaacattcatggagatcactctcttaagaataaagctgagcttgctgattccatgaaaaatgaagcagggatcgatgaagggcatgtgataggagaatctgagtcagtgcacagtggtgcgtctaagcattcagtagagaaagtcacagagctagcaaaaggtcacctccttcctggagtgccagtagaagaccagagcctaccaggagaggccagagccctagaaggatatgcagatagaggtaatttcccagcacatccagtgaatgaagagaaagagactaaagaagggtctgttgcagttcagattcctgacttactggaagacaaagcacaaaagctcagtttttgtgaggaccaaaatgctcaagatagaaattccaaaggttcagatagtttgaataagaaggtagatctgactcttttgtctccaaaaagtgaaaatgataaattgaaagaaattagtctggcttgtaaaatcacggaattggaaagcgtttccttgccaacaccagaaatccagtcagatttcttacatagcaaagtcgaagctcctccttcagaggtggcggatacgttagtaataatgactgcttccaagggtgttcgactcccagaacccaaagataagattttggagacacctcagaaaatgacagaaaaatctgaatcaaagacaccaggagaagggaaaaaggaagataaaagcagaatggcagaaccaatgaaaggctacatgagacccaccaagtcccgaggacttactccacttttgccaaagtctacaatccaggaacaagagagacataagcaactgaagtccgctggtatgaacctgccatggggaaatgtgtgtgcttgtggcttttga

SEQ ID NO: 156560 - DNA, 4995 bp, Homo sapiens
  misc_feature (1)...(4995): n = a,t,c or g
gtccactgcggtggaattcacaaaaccatcctaaagcgttaactgctcataattttaatcagctacagttatgaaaaaggaagaattttgctctaaagattattaataagcttagaaaatcctgcttttaccctaacagaatgaaagtggggttgaggggcggtagtatgaacagtgattcctaactctatggcgtaaattactttgaagagttcattttggaagtaagggaatccccgcttcccttggtgttgaagatctgcatctgattttgaaacgtcccagatttagctttcaaggtgcgtgcatgttgaatgatccagaagcaacgaaaactctggggtgagggattgaaaaaatctgaaatcacagttggatttttaaattcaaccatcaaaaatatgtactatcagtttttttttacattgatgtgaaataagcaaattttcatgataattaagctgcaaaatttaaagttatcaagtaaataggtcctctgtgttctgtttcatgtgatggagtgggtttcagtctgtgttcttggagccaaagggttcctcaggggtgcctcaggagtaatggtttaaaagaagaggggcaatgagagggagcgagggggaaggcctatttggtatttgagcaggggccttaggctccatatccccaccccctttacccagaacagcccatttttcttatgtatattggaatttcaagtaagctttcatggggtgcactggggcggggaggaatggatgggataaaaaaagtggagattttgctgctttaaaaaagttgagaactacttgtgtagtttttaagtattttaatgtatttcatttggccaaattcaactgccacaagcaaagctagtcatagttgtaactgtgcagtggtaatatgcttatgcctacctttttcctctcaaacaatttgttttttttacattgcattctgagtactgaagagcatcttgaaatgtatggaagtggtttctatgctatttgataatcagtaatgttcagctgtcatgatagtactttactggttgcagacccatctctcttttatattaaagcactagtgcagtttataattgtgcctacttttaaaatctttcagtaaaaaagtacataatgaatacagaaatcataactgacagggatacagtaataatgaaatgctactatcacttattttaatataccattataaagcaggcaaataccattgctttttgagtgcctttttaactttatactaatgacttaatagagctttaaaagaaagaaattggctgggcatggtggctcacacctgtaatcccagcactttgggaggccgaggtgggcggatcacctgaggtcaggagttcgagaccagcctggccaacgtggtgaaaccctgtctctactaaaaatacaaaatttagccgggcatggtggcacacgcctgtagtcccaactgcttgggaggatgaggcatgagaatccattgaacccgggaggcggaggttgcagntgagcagggattgctccattgcactccagcctgggcaacaagagcgaaactctgtcaaaaaaaaaaaaaaaaattctcctggataataaggctctttgaaaggaggattactcattgttttacgtaggaatatatgatgagtattatttagcaagactgttgctaaagaatatctgatgagctgaaaacattcttagtaaattgaataaatgtttaagggaaaaaatacgtagtatttatatttcattgtttcaacttgagaccatttcagatcacttcggaagtaatttaattcatcggagtatttgtaatatatgtttctaaaaaagtttagttctaaagatcagagaaaaagcatgacacaaagcgttttgactattttatgaatatgtgaattgaaagagaatgtacataatcatgtagtttccgttggcattggccggtttgtaatttcacaagagtcagatgaggtcatctacctgcagtatgtgaaggtgaatgtaaagtcatgtgactggacatgatgaagatgaagagggactctcgtttctttctgtttaagccaacacagctcagagtccttataagaaactgaaagaagcattatcgtcagtggaagcttttgaaaaacactacttagtaagtattaacaagtgttcaatgtctgttctgtgaatacctgtctctagaaggctttgctacatggcctgttgagttgggaaggaactggtgtggggggccccttcttgttggttttttttagtttctttggtacctggggagttgtggacaaaacatggagtagttcatcaaatgtgtattagtgcccatggtaccatgctaggcatggaatcatctttgaatatttaccgttttgttcaaattgggtttgctcacacagaaattataagagaggctagtgaatacttttctttgtaaaaaggagtaatttggacttgggcagagctattgtatttgattttgaaagacttaaattagcaaaactttaaaaaacggtgtaggcagaagtgtggtgggtcagcgtcattcccgggtcatgggcaacttgagcgtttggtctgcccgtaatggctgtacctcttatacacacaagtatgaaaaatacccagcatgtcacccacgtgcagaaagtccttggaaaagttagatgttttggatgagtttgtgggtttcttttattattatgcttcataatttatacacaggttaccaattttgcttatatattacagaaaaattcacaaaaatagatgcaaaggaaaaaataatgttacattattagcaatgtcttctgcgggctgggcatggtggctcacgcctgtaatcccagcactttgggaggccaaggtgggtggatcacctgaggtcaggagttcaagaccagcctggccaccatggtgaaaccccacctctactaaaaatacaaaaaaaaaaaaaaattagccgggtgagtatggtggcttgtgcctgtagtgccagctactcgggaggctgagacaacgagaattgcttgaacctgggaggcggaggttgcagtaagccaagatcacgccattgcactccagcctgggcaacaacgagcaagactctgtctcaaaaaaacaaaacaaaaaaacaccaaaaaaacccccaaacctgaagaaattcagatacacgtgtgtaatgttagtgatgtgagaacaaggagcaggggtgcatttgtgttgtgttcgggttggggatgggtttaggagctccaggttgggagcagtgacagagagtcatggccgtggtgagggtgaatcccaagtggatggctcaggacgggtatggaaacccttcattcctcataggtactgggaagtccatttgcaagctgagcgccaggcctggggaggaagaggcttgggctgcagatgcacgcacatttgtttttcactgatagtttttacaaaaagcttggtttaagttatggaattttatgtccctgggagtagaatttacatttgttaaattgaccactgtttaagatcagtatacattctctagtctgtgatgtctggagctagttttgagggtgaaccacactttatccaacatacaaactttcccatgcagcttctctggtgcgcagttggttttgaccgtgggactaggtgcttctgcaggttttaagtaattaacttaaaagcttctcctctgagaaacatttctgttgcgctactgactctccttctccacatttgttgtgttcctagggcttctctatagtgcacattaggacgtttcatttgttgctgaatgctttccagaattatttattccatagggtttctctcctgtgcagctctctcatgggtaatggggcgtgttttcttgccaaaggcggttccaccctcgtgattgtatagggctcttctcctgtatgaactctgagatcagtgagctctgatctccaagggaaagttttcctgcatttgctgttttctcatgtctctcccagtgtgaattctctggcttctagctgaaaacttttccacagttttacattcatgtggttttctccactgtgaactctgtgattcagaatcagaagcagttcttagtagaggcatttctacactgattgcactgaggatatctccccagtgtgaagtttctggcatagagtcctggcttcccgcagacgactttcacactctgccatgttcatgcctgtgggcctctctggcaggaactctgatgcaccgcgaggcccatgtactcctgtggctttctcacattcggtctacttgcagggtatctccacagcatgcaccattctgggtacagggggacatcctctgttactgaagatgttgtcatatttagtaccttcacaaggtttctctccttccagaattttctgatgtacacaaataactgacttccacaagagggcttttccacactcggtgtgtgcatacagtttctgcctgtgatcatttctttatgttattattttattttttcgagatagggtcttgctcaatttcttaggctggagtgcagtggcacgatcatagctcactgaagtttcgacctgggctcaagcaatcctcccgcttcagcctcctgagtagctggtgcgcacgaccatacccagctaatgttttattttttgtagagacgaggtctcactatgttgcccaggctggtctcgaacttctgagctcgagcgatcctcctgcctccacctcccaaagtgttcggattacaaacgtgagccatcatgcccggccgaaagtcaacaatttttccaaatctttttcctcaaagtcttcaacaaagactttgaactgccaaagttgtaatctagtaagtcaaactgcttatctcaattaggggtaaacaaaggcacaaaagaaaaacaagcagcataacctttatttggtcatacaataggtgaagagtgtctcaatgttttgaacacta

SEQ ID NO: 156561 - DNA, 1272 bp, Homo sapiens
agcccgggtttaccctgttaaccaagaaggtttttattttcttaccttgtgaaacaacccccctggcccccccaaaaggtggggattccaaagtgaacccccccgccccacctttttttttggttggttttgaaacaaaatttccctttttttccccgggtggaatgcaaggaccttattttgggtccctgcaacctccccattccggggttaaaaaaattttcttccccaacctttaaaatgggtgggaattcaaacatgggccctcatggccgggggggtttttttttttttttttttttgagacggagtctcgctctgttgccccaggctggagtgcagtggcgtgataccggctcaccgcaacctctgcctcccgggttcaagtgattctcctgcctcagcctcccaattaactgggactacaggtgcccaccatcacgcccggctaatttttgtatttttagtagagacggggcttcgtcatcttagccaggctggtctcgaactcctgacctcataatccaccagccttggaatccccaagagctgggattacaggcatgagcaccgcacctggccgtcttaccaaaattttcagaggaaaaaaatgtgggattttttttcaatttgttctcaccctccaagcatgctggggtgctgcgctgagccctgtgaggggctggcagcatcgcccccaagaaactgaggcttagacaggaaaggccacctgcctggtcaccgggttctcctacctggaaggaggcagttttagctgaggaaggatatccagatgggccctccatggttccttcccaccagaacttctcagccatgggcaaggaggcagccagggacccagcacctttcattcccttggtttcctgctccccttctgggtagggcacgaagtgacgcacaggtgtgggcatctctgccaagccagctctgcccaggatttaactagagctgtgaggcttgttgacccagaaaacgtgatttgggagacgccaaggcctcccctcccctgacaggactgggggcagaagttctggcctttccagtgtgcagggagaaaggttttacctgataggttcctgccctcatcctagggtcagcccagggacttagcctccctggcgggtttctggagtggagcatgggactggtcagaaccttaccgcgagttaagtaacaactgggtggaggttaaaggtaagcacgcagacaggcaggtggagttaaactgtaacatacttgattcctcgtgcc

SEQ ID NO: 156562 - DNA, 1900 bp, Homo sapiens
atggctgcaagtggccgaggtctctgcaaggctgtggccgcctctcccttcccggcgtggagacgagataacacggaagccaggggaggtctgaagcctgagtatgatgcggtggtgataggagcaggacacaacggactggtggctgcagcgtacctgcagagactgggggtgaacaccgccgtcttcgagaggcgccatgtgatcgggggtgcagctgtcactgaggagatcatcccagggtttaagttctcccgcgcgtcctacctgctcagcctgctgaggccgcagatttacactgatctggagctgaagaaacatgggctgaggcttcatcttcgaaacccctactccttcacccccatgctggaagagggtgcaggcagcaaggtgcccaggtgccttctgctgggcacagacatggcagaaaaccagaagcagatcgcccagttctcccagaaggatgcccaggtctttcccaaatatgaggagttcatgcatcgcttggcattagccattgaccctctgctggatgcggcccccgtggacatggcggccttccagcatggctccttgctgcaaaggatgaggtcgctctccaccctcaagcccctgctgaaggcaggccgcatcctgggagcccagcttccccgatattatgaggtcctcacagctcccattaccaaggtgctggatcagtggttcgagtctgagcctttaaaagccactctagccacagatgcagtgattggagccatgacaagtccccacactccggggagtgggtatgtgctgctgcaccatgtgatggggggcctggagggaatgcagggggcctggggctacgtccaggggggcatgggtgccctctctgatgcgatcgcaagctcagccaccacacatggagcaagcatcttcactgaaaagacagtggcgaaggtgcaggtgaacagtgaaggctgtgttcaaggagttgtgctggaagatggcacagaggtgagaagcaaaatggtgctgtccaacacatcaccgcagatcaccttcctgaagctgacgccacaggagtggcttcctgaggagttcctggagagaatctctcagctggacacccggtcgcctgtcaccaagatcaatgtggccgtagacaggctgcccagcttcctggcggcccccaatgctcccaggggccagccgctgccccatcaccaatgctccatccacctgaactgtgaagacaccctcctccttcatcaggcctttgaagatgccatggatggcctgccttcccacagtgacttaggatctgccaaaatccatactcctaaggacaggaagtgcatcccaggtgaaaaatctgaggatgagggcaggcctgtgattgagctctgcatcccttcctcgctggaccccaccctggctccccctggctgccatgtagtctccctcttcactcagtacatgccctatacgctggctggaggcaaggcctgggacgagcaggagagagacgcttatgcagacagagtgtttgattgcatcgaggtctatgcccctggcttcaaggactctgtggttggcagagacatcctcacaccaccagatttggagagaatcttcgggcttcctggagggaacatattccactgcgccatgtccctggaccagctctacttcgcccgccccgtgcccctgcattctggctaccgctggccctctccagggcctgtatctctgtggaagtggggctcatcctgccccttattctgaaattttaacttcacttactaagcgtgtgcccatccagcacgtccaccctcagccgttgagactgtgggctgtggacctggcccctccccagacctttggtgcaggaagcctggagggagccagaatctattga

SEQ ID NO: 156563 - DNA, 767 bp, Homo sapiens
ggactggcctacccatgcatctttgggatgaattaatcatttgcttgaggactgatttttgtttttcacctattgaggtataatttgcatatgataaaataagcccatttctgtgtgtaatttaatgactgttagtaaatttgccaagttgtacacccatagtgcctcctcttcttcctaacaccatctcatttctctgtttttggcaccccagtgtttgattgcaatcgggtctatgcccctggcttcaaggactctgtggttggcagagacatcctcacaccaccatgatttggagagaatcttcgggcttcctggagggaacatattccactgcgccatgtccctggaccagctctacttcgcccgccccgtgcccctgcattctggctaccgctgccctctccagggcctgtatctctgtggaagtggggctcatcctggaggaggtgtgatgagagctgctgggcgaaatgcagcacatgtggcctttagggacctcaagagcatgtgaccctgaaccagctctgacccaggaagaagactccacccctgaatttccaagtgctccattggatcagcttcccaggaagttcagcttcgggttagtacataaggccaccacaatgctcaagaaattattttagaaaaaaacgtacgagttacatttagtgcaagttgaccttatgcccatgccttcatacatggacttggttctgttttattaaaactaatatttcatacagataaaaaaaaaaaaaaaaaaa

SEQ ID NO: 156564 - DNA, 720 bp, Homo sapiens; identical to SEQ ID NO: 116838

SEQ ID NO: 156565 - DNA, 345 bp, Homo sapiens
catcagagagctgaattgcagggcaattaaatagtttaaaatgaaggaaagagaggtgcctcctacaataacagagatgggctgcaaacattggatgacctgtggcagagcacggaaagaaggcaaggatgacagctacatgcagacaaggtctccagatttgccacccatgctgagtgccgtggtgtgatcatggcttatttcaacctcaacctcccccactcaagcgatcctcctgcctcagcctctggagtagctgggactacaggcacgcaccaccacacccagccataatttgcctcttgctgtaactaaaaggtcacaaaaacaaagaattctaaaaaa

SEQ ID NO: 156566 - DNA, 1101 bp, Homo sapiens; identical to SEQ ID NO: 150698

SEQ ID NO: 156567 - DNA, 953 bp, Homo sapiens
acctcccaggttcaagcgattctcatgccttggcctctcgagtagctgggattacaggtgcacaccaccacgctcagcaaatttttgtatctttagtagagatggggtttcaccatgttggccaggctggtcttgaactcctgacctcagatgacccacccaccttggcctcccaaagtgctgggattacaggtgtgagccaccatgccgggccgcataggttcttaataaatatctattgaatgaattaaccatctttaaaggtttacaagtacccactgccccccgtgccccaccagtctcactgcctgactccaagtctcctacactagatttacaatgtgacttcagactcggtctctttattgggatgggttctggcacagccttaaaacctagacttttcttttgcagcacaagtgcataaatgaagcctggctggaggtccttgtccttgggccatgcacacttctgtgtctccattatagtatctgccaaacatggtcagctaccctgattcttcatctttgtgaactttgaccttcaagtcctgtggatccacacctggccctctgggaatctgtggtcaggcctgctacaactgctcatgaaagtagttcattcatttggagccaatttcatgagggcagacagcacgtctgaccaattagtgtaagctcagcatagtgctgggcacatagtttatagagccaattaatacatccatttttgtcaggtgcatctgcttctgctggacttgtctgtctgttttggtcttcttgccctcctggtagcaagactcttggtataatcctgacatccaagccctgggatggaatgaaactccagacactgacctggagccatcattaatacaacaggctgtcattaatatgtgtgaccttgcatttacatttctataggaatacttctaagcactttttttatggttt

SEQ ID NO: 156568 - DNA, 333 bp, Homo sapiens
attattttatttcatctcatttcattatttcatttcattatgtcatttcatttcatctcattacatttcatctaatttcatttcacctcatttcatctcatcatttcatttcatctcatcatttcatcttttcatctcatttcatctcatcatctcatcaactcttttcatcttatctcatcatttcatcatttcatctcatcatttcatctcatctcgtatcttatctcatttcaatttcatttcattatttcatgtcatctcatctcatctcatcatttcatctcatcacatctcatcatttcatcaatttcatcatctcatcatttcatg

SEQ ID NO: 156569 - DNA, 1509 bp, Homo sapiens
atggggtttcaccatgttggccaggctggtctcgagctcctgacctcaagtgatccgcccaccttggacttccaaagtgctggcattacaggcggccgattcacgattgcggccaagcaccacatctccattgctgagatctatgagacagagttggtggacatcgagaaggccattgcccactacgagcagtctgcagactactacaaaggcgaggagtccaacaggtggtgttacgctgcgctgctggagcagtatcagaaggccattgacatctacgaacagttggggcactcacctcgggacatgaaccagctcccagctggccccccagtgcctggcagtggctctggccctctggctgcttgccctgagctcaccagtgccacttctccatggctacaggtggggaccaatgccatggacagccccctcctcaagtacagcgccaaagactacttcttcaaggcggccctctgccacttctgcatcgacatgctcaacgcctatatgctggctgtccaaaagtatgaggagctgttcccagctttctctgattcccgggaatgcaagttgatgaaagtaagtgctgggtgctccggcctcccccttcccgaacctcagacgggggtggctggggctccaggggatggggacaggaagctaacagccgaggaggaggaggctcggaggatagcagagatgggcaagccagttcttggggagaactgccggctggaggtcatcatcgaggagtcatatgattttaagaacacggtggataaactcatcaagaaaacgaacttggccttggtcattgggacccattcatggagggagcagtttttagaggcaattacggtgagcgcagaatttgccactggcgccaacggctctgtggaaaggacggactatacatcctgtaatcggcggacccagaagcaacggctaagccgggccacgctgcagaggagagcagcagctggagtgagggctctggacacggcacctgctctcagctctacccagtggaggctgtctggcgagcgcagcttcggcacctggtacaagcagcagcgcacgagggtaagcaatactgtacaagagttcgcgaaatcggcgctatacgatggcagtagtcagttagcagccgcccccaccagccgccgcacgccgcccgtgactcgtgaccccccaatcggcgtcaagagacctcaacgcatgcgcacataccggcgaacggcgctccactctctccccagcgctctgtacctcacctcccacgtgaccctgtggaaggcaatggcagtaccccccgccgaggccccgccccacggtgttgctgctggatcctcctccaccaatcagcaggagccctcggctcgcgctggggcggggggtcccccactcgccctccccgcggaactctggcacagtcagctgaccgcagacactcacgtgacagctcggggcccacgcccgggtttgacagttctgcgcagaacttag

SEQ ID NO: 156570 - DNA, 2121 bp, Homo sapiens
gggcgacaagagcaaaactccatctcaaaataaaataaaataaatcaggaacagtaagaactgccgttcattgagtgcttattacatgctgtcacattgctgagcagtttacacacgttgtctctattcatcctcctgcaaccctaacaggtgggacccctcttagcctcattttattgatgaggaaaccaaggctcggagaggttaaggaacttcctgcagctcacgtagttagaaactggcgaagctgattggatctaggcctgtgtgatcctgagcctacactccaggaccgttctgatcctgaccagtacttactgatttggggtcttgagaagacagtaatgagcaagggcccccaggagagttttctgaccttcacaaagccctgctgagatcttgacctctgttcttaaggaggtggatcttgcctcagttatgctcagccatttcattacacaggaagacctcattcttccttacattgcaatttattgttttttaaagaaactggccttgtattgtggaaataacattgggaaaatggagattaaaatgggtaatgggaaataacaatcaagtaatggcttaagaacagaagcttgattggggaaaagtcctcccgaatagaaagatgatcaaagtggggaagaaataaagtgggactttgagtttgaaatggctcactcatgcctgtaatcccagcactctgggaggccaaggcgggcggatcacctgaggtcaggagttcgagaccagcctggccaacatggtgaaacccctgtctctactaaaaatccaaaaaaaaattagccaggcatggtggcaggctcctgtagtcccagctactcaggaggctgaggcaggaggcaggagaatggcatgaaagcaggaggcagagcttgcagtgagccgagattgcaccactgcactccagcctgggcgacagagtgagacgccgtctgaaaaaaaaaaaaaattttcataggccaccagttgcggtggctcacacctgtaatcccagcatttgggagactgaggcgggcagatcacttgagcccaagagttcaagaccagtctgggccacatagtgagacaccatctctacaaaaaaaatacaaaaaattagccaggcatggtggcaggtgcctgtaatcccaactacttgggaggctgaggttggaggatctctgagcccagggagactgaggctgcagtgagccatgatcacaccactgcactccagcctgggggacagagtgagaccctgtctcaaaaaaaaaaaaaaaaaaaaatcttcatagccattattttgtttaactgcctcaaatgcagcccaatttcatcttcttgccccctaaatctgctgccgccctctgtgtctcatgcttagaactcctgtagctgttcagtggcaagggtgggggtgctgagggggcagaggtgaggttgatgatttggagccaagtgatcaggcttcacttccagccctgccatgccgtgtgtgactttggcatatcatttcccctctctgggcttcagtttcccaactgcaaagaggaaaataacacctgccgaacctcacaaggcttacagttcttaaaagggttctgtaaaccatggagggttttgaagaagtgggtcatggataagattcccacctactgggctccaacctgtgatgaagctgaagagggactggatgtgggcccgatccttgaagtaggagcggctgaggctgttccatatgacatcggagaccttcttcaccagctcacggctggagacacccccttctcgaggatagagggacaggtcgacggcgcctcggatctgggcggtgaagcgggcatagagggcggcgatgatagacaggtcggccacgggaaagtaggtgaggccgccaggcgggtcgggggcggggctgggctggaaggtgagctcgggaacgttggtagggatgacgcggttgacagccagaaaatgctccacgaagcccagcaccaaggaaaggagcaccaggtccggctcctctcggcccagctcggcagcaaacaggcgcaccacgtcgtcgatggagcgcagcgggaacagcgtcttctgggcggccttcagccccat

SEQ ID NO: 156571 - DNA, 772 bp, Homo sapiens
agtccagtgcggtggaattcggcccctggagctctgaccctaggaagcgaggcacaaaccttcttccttgccccaaatcagaacaaatgtcctcacttggaagctctctcagaaggacctcatgggcccattctcaggacaagcccagacaagtcgaacaccaagaagtggtcacagcccagaaaatggagtccctggggatacaaccaacggcttctctgggagaggattctgagccagccagctgggagagaagagaggagatgccaggccttaggggaggcaggagagaggggagagggagaggagttccaggcccttgggagggagaaagtgccagcctggcttgccgtgaacgctcaacaaaagctgcttgctttgcaggtggaaaaggccaaggttgaagtcggtgtggccccggcgcttgggatcctggttgttgctggatgctcttttgcgattaggagataccaaaaaaaaagcgacagcctgaagcagccacaaaatcctgtgttagaagcagctgtgggggtcccagtggagatgagcctcccccatgcctccagcagcctgaccctcgtgccctgtctcaggcgttctctagatcctttcctctgtttccctctctcgctggcaaaagtatgatctaattgaaacaagactgaaggatcaataaacagccatctgccccttcagaaaggacttctaccatgtttttatagacttctgaatcacaaaggaggaaggtaacattgagtgaacactcactggg

SEQ ID NO: 156572 - DNA, 775 bp, Homo sapiens
ttgtaagctggaactaacaaagaacattttgtaaaggtaagtggaaaggggcagcaaagatcctaatagatttaaataacttatttctctgcaagttggagcagaaaggtactgacctccctggtgatagcaatggaaaattatggctccttgggcagcaaaaagggtgtagaccttcctggtgactgtggacctgcttgccatgtcagaaaaggacatccaggatctgaagtttggggtagaatgggatgtggatatggtgtttgcctctttcatccatgtggcatctaatgtccatgaaattagaaaggcaattattgcaaactggagcaaggtgcccacttgcccaccagagttaggctcttaccttcccagaggaactgagacccacagctatttttatatatcttacagttcagatcagatacaaatatgtaaacctctacattattcctatggtagaaattatgatactctttaagcctgtcacagattttgttatttaatgcaaagaagcacatatattactatgggacacttttggtttgtttaaatattttgatagttgtattttaatgtaaagggtttcatttgtaatcttatacagatggtccccaacttacaatggttcaacttatgatttttcatctttacaacgggcatgaaagcaatacattttcagtagaaactgtaggtcaaatactcatacaaccattctgtttttcactttactgcagtatttaataaacatatgagatattcaagattttaaaaa

SEQ ID NO: 156573 - DNA, 522 bp, Homo sapiens
gtcggtctccgccagctaggatctcccccgccgtccgcccccgcccctcgtctgcctcccccgcccgcgcctccgcccgcgcttccctttcctgcctcgcgccccactccctttcctcccctccctgtttcccttcctgtccttcccagctcacgctctctttccctgccgcctgcctttcttttttcctttttttgcattggcgtcttggggctgttacacacacgcgcgctgtccattgcagcttacataaaggcgggcgcgattatgcaattatattgttagcgatatttcaagagcaatggctcgttttcttaggatttcaacacgaaggcatcatgcatttttgaaaaactagtattgagaataataccttgcaacgtaaagaatgttttttggtatttttacacaatctctactttgaccaaacgagtctggacagttttcttttaatggaaaataggagaaatggtgagtagtaccatttttttttagcgtagttcacagaactttactataaac

SEQ ID NO: 156574 - DNA, 4237 bp, Homo sapiens; identical to SEQ ID NO: 150706

SEQ ID NO: 156575 - DNA, 637 bp, Homo sapiens
attttattttttgagatggagtttcactcttattgcccaggctggagtgcaatggcgcgatcttggctcaccgcaacctctgcctcccaggttcaagcaattctcctgcctcagcctcctgaatagctgggattacaggcatgcgccaccacgcccggctaattttttgtgttttcagtagagacgaggtttctccatgccggtcaggctggtctcgaactcctgacatcaggtgatccacccaccttggcctcccaaagtgctgggattacaggcgcgagccaccgcaaccggccagtacagagcatcttaaggttggaaggactcttagagaccatagtccagcctcccacttgatactgaaacacgtttgtgaattcatggcagatgtctaacttccctcaccacctttccgatatggacagttctcatgcccagaagcaaaaccttctttattgtgcttgtcctcccttgactgtcatgcatataatcagcatctttcccactaagtgaagggcccagactcgagcacaggagcacagcaccccttaaactcacgaggggctgcattcacaccatcagcagggagattacacttgtgtcatttgtgacactagacaggtcagctagcaccatt

SEQ ID NO: 156576 - DNA, 763 bp, Homo sapiens
ttttttttttggagacagagttccgctccactcagtcgcccaggctggagtgcagtggcgcaatctcggctcactgcaacctccagctcccgggcccaagccattctcctgcctcagcctcccgagcagctgagaccacaggtctctgccaccatgcccgactaatttttgtatttttagtagagatgaggtttcaccatgttggccagtctggccttgaactcctgacaggcgatctgcctgcctcggcctcccaaagtgctgggaccacaggcgtgagccaccgtgcccggccattttttttgtttttgtttgttgtttgtttttgagatggggtctcaaaaaaaaaaaaaaaaaaaaattaccaaggtggagatcatgaaaatggcatgaatagtgtgggattttctctaagattgttgatattaattccattagactcttatgtgagtgaagacgaagacttcccctgagtaagttcagacagcttctgataacatttctacatcgattcctcaggatttaactatatattcttgaaaacatctcaattttaaatgtttctttcaagatggtgaattaaacagagatagcccttcaacaggttgaactcagcatatgctgagtctgaaatggaaatgatggagttagagaaccatacaacaatggtaatgatttcagaaatatggtgttgagcagaacaaagcagacacaaaagagtacctatggcatggcatgcatctgtatacgtgaaattccagaa

SEQ ID NO: 156577 - DNA, 363 bp, Homo sapiens
  misc_feature (1)...(363): n = a,t,c or g
gagcaacgctgctgtctgattgcatcattttcccaagcccatctgcccagctcatttctctgcatgcatacactggccccaacacccacacacgtgtgcatgcacacaggcacacatgtgcaagcccaaacacatcacacacatgcatgcacacacattgtgtactctcaggtacgcacccctgggtgcacacaggtgtgtgcgcgcgcnnnnnnnnnnnnnnnnnnnnnnnnnnnnnnnnnnnntcaggtacacacgccaggtccatgcattgcttcacactgcccagccccagaggctgaaggcctcagagcccacacctgcccagctacaacctggcaggcaggaggggctcactggttt

SEQ ID NO: 156578 - DNA, 859 bp, Homo sapiens
caagcactgccacctgggctggagtgcagtggtgcaatctcagctcactgcaacctctgccttccgggttcaagccattctcctgcctcagcctcccaggtagctgggatcacaggcacctgccaccatgcccagctaactttttgtattgtttttttttagtagagatggggtttcactatgttggccaggctggtctcaaactcctgacctcgtgatctgtgcgcctcggccccccaaagtgctgggagtacaggcgtgaaccaccgcgtccggctggggctgcttatttacatcccctagaaagagggattctccagctacacctcaccctcacttggaaggaccctcctcccagagagggagctgtggaaaaagcctgacctgccccacagggcagtaggtcgagcctggctggtgagcaaggaggtacggggatccctgaggcctcccacccagggcccagggagcctgcctgctgtgagcacttcctccagtcctgatggactcggctctgcccggagcccccggtctctgcacacacagctgactggagaaagccacttccatctcatggacagggacagaacaaggctgagggaggtgagcaatgcagccaggcccgggggctacaatggctgctggcaaaacccaccatctcagcaatagttcagcgcgaagggctgagaactgtgagaagcgaatcgcgacgtttattttgctcttccttagcctcttgtggcagatttggggcaaaacaacagattaaatcttgtgtacatatatttacatgtggatagacacactgcagaagaggtctctgttttgtaaactctaacgacagataactgcgaattcc

SEQ ID NO: 156579 - DNA, 363 bp, Homo sapiens
catttggcaaatgagattccattttcacattggtttgtgctgagcatataaatttcctgcgggccggccagcattggggatgtgtaattgattgcctgcattataataaacaagctgtgacaggtgatcattcatcatattccgctgaacgttccagcacaccagaaaacggaggaagagagggaacgcgcgagcaaggggagaggagaggaggaacctgggggaggggagggggtcggaaagaccgagtattcccgacagacagaaaaaccaggggaggggcgggggagggaatccgctgagcgggcgggggaaagtgaaagcaattactataattcttttgattatctaatttgttctttc

SEQ ID NO: 156580 - DNA, 415 bp, Homo sapiens
  misc_feature (1)...(415): n = a,t,c or g
gagaatcgtccggaattanttggtggaagatttcgtgtggtaccaagcggcgcccaccctcagagcactacttccatctctgataggcttcgctgggtgcccgtcgctactccactcgccgctgataggccattcaaccgccgctctgcgcggcgccggctccgcccccgtcgggtgtttgtggtggggctgcggagtcgccgatcccgccggaagcgccaggacaatggggacccgggacgacgagtacgactacctattcaaagtggtgctcatcggggactcaggcgtgggcaagagcaacctgctgtcgcgcttcacccgcaacgagttcaacctggagagcaagagcaccatcggcgtggagttcgccacccgcagcatccaggtggacggcaagaccatcaaggcgcag

SEQ ID NO: 156581 - DNA, 508 bp, Homo sapiens
attatttatgaaaactgcaatagtcatcatttaaagttatggaactgtgtccggaattggtgggttcttggtctcactgacttcaagaatgaagccgcggacccttgcgatgaagaacacattcatcccgatatatggtcaagagacaggaatagaggaaagttacagattcctctgaaaaatgttaaattaaaaacccctggggaagtagtaaagcgaacgcaatactctattcctttagaagccagggtaaatttaaaacctataattgaagatcttctttgtgatgggcttcttaaaccctgtatgtctccctataacactccaatactgcctgtaaagaagccagatgggtcatatcagttagtgcaagaccttagagctattaatcagatagtccaaactacacaccctattgttcccaatccttatgctattatcagtaggatctcatacagtcaccagtggtttacagtaatagatttaaaagatgcctctgggcttgtcc

SEQ ID NO: 156582 - DNA, 1044 bp, Homo sapiens
atggagactgcaaccgagaaaggggacccagcgctgaggtccccggaaatggtcatttatgggcttggggggcgaccagggcagcgcgcgctgacctatgacgtcatcgggacgttaagcatcgtagcattacctggacgtagccccatttctcttcccggacagagcactacttccatctctgattggcttcgctgggtgcccgtcgctactccactcgccgctgataggccattcaaccgccgctctgcgcggcgccggctccgcccccgtcgggtgtttgtggtggggctgcggagtcgccgatcccgccggaagcgccaggacaatggggacccgggacgacgagtacgactacctattcaaagcacagtgcctgcaggccctgggctccaggcatctctcgactcctccacaccgttggcagccgcgttggtgcagcacccagggaaccggcgggaaggttgtgggggcagtcgtgggtggagtgtggggattcacagaacctcgccttcccgcccagtggtgctcatcggggactcaggcgtgggcaagagcaacctgctgtcgcgcttcacccgcaacgagttcaacctggagagcaagagcaccatcggcgtggagttcgccacccgcagcatccaggtggacggcaagaccatcaaggcgcagatctgggacaccgctggccaggagcgctaccgcgccatcacctccgcaactcagcctcctcccaagctccctgtgggtcctagccacaagctctccaacaattactattgcactcgcgatggccgccgggaatctgtgcccccttccatcatcatgtcgtcgcagaaggcgctggtgtcaggcaagccagcagagagggtgcctctgacagctgctgcaggaaacatggccaagtttgccctgaatcagaacctgcccggggggaaggggaaaccccagaaccagcagatgagaattcagacgccaataccatacggcgtggtagaacgtcaccagaacgtgaacacaccgtacacattccccatcacctaa

SEQ ID NO: 156583 - DNA, 772 bp, Homo sapiens
ccaccacaaacacccgacgggggcggagccggcgccgcgcagagcggcggttgaatggcctatcagcggcgagtggagtagcgacgggcacccagcgaagccaatcagagatggaagtagtgctctgagggtgggcgccgcttggtaccaccctcctcgccctcggtgtcctggagaaaggcggaaggaatgcggacctttttgaagtgacggacgcgccagcctatcaggggcgagctcaagagggcggggcggaagactgcaggaatgaaatggattgacagaccaaataactaatgagaggcttgattgagaacctacccgactatcagaggacctgtccgggaagagaaatggggctacgtccagacagaatctcgctctgttgcctgggctggagtgcagtggcactgttatcacggaattgagggggttcttggtctcactgacttcaagaatgaagccacggacccttgcggtaagtgttccagctcttaaggtggcgcgtctggagtttgtttcttctgatgttcagagatgggggttccaccatgttggcccggctggtctcgaactgctgacctcaagtgacctgcctgtctcggcctcacaaatggctgggattacaggcacgagacaccgtgcctggccctgggaacatgtttacatggactttgttcactttttaaaacaaactgagggtaacttactagatctgtgaactaaagaaagagaaaaaaaagaaagaaaacaaacaagaacaaagaacaaa

SEQ ID NO: 156584 - DNA, 1005 bp, Homo sapiens
ttttttgagacaggctcttgctctgtcgcccaggctggaatgcagtgctctgatcatggctcactgcagccttgccctcctgggctcatgggatcctcctgccttggcctctcaaagtgctgggattacaagtatgagccaccacaaccatccaaaattatttatttgaaaggggcattaactatggtacttctcagaagcatttataaaatatgggactcaaagctcctcctgattctccaatcacagctggttaatgtgaataaatcatgtgaattataaactatgaatgaaagagaagattatgtttttatgataaaatctgtgaaaaccatttatgatgaataaatctgaagaagatgggaattccatgctcattagtgatttgtcctaagagtttgtttatcagcatttaaaacttctaaaaagtatttcaagtttggtgtgacatagctgtgtgtatacccactgccaacttcatcttgggttattcctttattgagggatcaatgcatagataagatctggatggtgaatctgttctatcaagaacagtcaggactacatgggaaagacattacagtgatgtaatgtgtttattagtcactatctgaaatagcatgtgatggtaggaattataaccaattttcaacatgtttgtctaatttttttgtcacaaaagagaaaataggatatcgcaaggaaaataaggaaagcttcaaagacaaaaggtaatttaaaacatctgaaaatactcattcttttagaagctattcaatggtattgttcatattcagagcttgtctaattaatatttttggaaacaataaattcattttaatgggtttcaaggcaaattttcacagactctgaattagttgtttacattatagaaaaaaatcaaaaagaggactggaacagttggaagtctttggaaaaccttatctttttacgatacataatacacagcaaaataaattcaattgagattaaaaagtcaaacac

SEQ ID NO: 156585 - DNA, 972 bp, Homo sapiens
aggaaaactcctattttatgcgacaagccgtgcctatgtggaatctatctgttcgaataattttgacagtttcctacatgaaactcatgaaaacaaatacggaaaaggaatttactttgcaaaagatgccatctattcccacaaaaattgcccgtatgatgccaaaaacgtcgttatgtttgtagcccaagttctggttggaaagtttactgaaggaaatataacagtacacgagccctcctccacagttcgacagctgtgtggataccagatcgaatccctccgtttttgtcatctttcagaaagatcaggtttacccacaatatgtgattgaatataactgaagacaaagcctgcgtggattaggttaggaacccgtggaatacagcgtcagaaggatgccataaccattctgttcctttacagaactaaattgccccagacaggagttaaagttttatattttcctgctcagttatctaatgtcttagatcagtggtccccaaattttgctaccatattagaatcatctgggaggttttaaacaaattctgatgcccaggttgcaccccatgccaatgaaatcatttctgggcgtcagcgccaggcagttgtattttttttttttttttttttttgagactgaatctcactccatcgtccaggctggagtgcagtggcgcgatctcggctcactgcaacctctgcctcccgggttcaagcaattcttcctgcctcagcctcccgagtagctggaactacaggcacacactgccgcgcccagctaattttttgtattttttagtagagacagggtttcactgtgttgcccaggctggtctcaaactcctgagctcaggcaatctgcccgccttggcctcccaaagtgctaggattacaggtatgagccaccatgcccggctggcagttgtattttttaaagcccttctgtcgtcttctcgcacccgtata

SEQ ID NO: 156586 - DNA, 546 bp, Homo sapiens
tttttttttcttttttttcatcttatatataaagggttctccattagctaataaagtcccagaaaggctggctctcctgtaagggcagagcagtgttctgcctagtttcaaagcctcttcaagtggagagcttgacaccaggctgggcggggcaggcctggctgaggtgccctggtgtatatgctccccctggcttctggcctctggttcccacagtgctgaggcatggggtggccctgggatgactaggtggtccttctcgaggcacctggctcaccacttcctcttcctaatagtgagatgggctttgttccaaacagacctgaaatggtgtgccctcgatcaccaaccccatcaaaactgcaaaccaacaccagggcaagaagcaacaccccatccaaggtaatagaacggccccttctagctctgtgtcctacatgaaacgctgtgaactgcttcccaagggcactggtcttgaagtcgtaagggaatcaggctagtgagctgtcaccaggcactcattactctcatacatgtctggcctgt

SEQ ID NO: 156587 - DNA, 2228 bp, Homo sapiens
atgggcctgctgcagggcctgctccgagtccggaagctgctgctggtcgtctgcgtcccgctcctgctgctgcctctgcccgtcctccaccccagcagcgaggcctcgtgtgcttacgtgctgatcgtgactgctgtgtactgggtgtcggaggcagtgcctctgggagctgcagccctggtgccggccttcctctacccgttcttcggagtcctccggtccaatgaggtggcggcggagtacttcaagaacaccacgctgctgctggtgggggtcatctgcgtggcggctgccgtggagaagtggaacctgcataagcgcattgctctgcgcatggtcttgatggccggggccaagccgggcatgctgctgctctgcttcatgtgctgtaccacgttgctgtccatgtggctgtccaacacctccaccaccgccatggtgatgcccatcgtggaggccgtgctgcaggagctggtcagtgctgaggacgagcagctcgtggcgggcaactccaacaccgaagaggccgaacccatcagtctggatgtaaagaacagccaaccttctctggaactcatctttgtcaatgaagacaggtccaacgcagacctcaccactctgatgcacaacgagaacctgaatggtgtgccctcgatcaccaaccccatcaaaactgcaaaccaacaccagggcaagaagcaacacccatcccaggaaaagccacaagtcctgacccccagccccaggaagcagaagctgaacagaaagtacaggtcccaccatgaccagatgatctgcaagtgcctctccctgagcatatcctactccgctaccattggcggcctgaccaccatcatcggcacctccaccagcctcatcttcctggaacacttcaacaaccagtatccagccgcagaggtggtgaactttggcacctgggttcctcttcagcttccccatatccctcatcaatgctggtggtcagctggttctggatgcactggctgttcctgggctgcaattttaaagagacctgctctctgagcaagaagaagaagaccaaaagggaacagttgtcagagaagaggatccaagaagaatatgaaaaactgggagacattagctacccagaaatggtgactggatttttcttcatcctgatgaccgtactgtggtttacccgggagcctggctttgtccctggctgggattctttctttgaaaagaaaggctaccgtactgatgccacagtctctgtcttccttggcttcctcctcttcctcattccagcgaagaagccctgctttgggaaaaagaatgatggagagaaccaggagcactcactggggaccgagcccatcatcacgtggaaggacttccagaagaccatgccctgggagattgtcattctggttgggggaggctatgctctggcttctggtagcaagagctctggcctctctacatggattgggaaccagatgttgtccctgagcagcctcccaccgtgggctgtcaccctgctggcatgcatcctcgtgtccattgtcactgagtttgtgagcaacccagcaaccatcaccatcttcctgcccatcctgtgcagcctgtctgaaacgatgcacattaaccccctctacaccctgatcccagtcaccatgtgcatctcctttgcagtgatgctgcctgtgggcaatccccctaatgccatcgtcttcagctatgggcactgccagatcaaagatatggtgaaagctggcctgggagtcaacgttattggactggtgaatagtaatggtggcccatcaacaccctggggagttagccctcttccacctggacacttacccagcatgggcgagggtcagcaacatcactgatcaagcctaacgcccaagtgtacaaactggcccaaccacaggagctgccagtatccagcagtatttggacccacaggcaaagaaaaccactaggaccacccaggagcacacaaccccagacccacgccggagggcatccctccaccagaagattccgccaccttcaagttgaactgcaggaattcttccaacaaccacaaacacatgcttcgctgttagtgtcttcttcctgccctcagcaccacagctcaagaaaacctaaagtttcaatacaagccataggctcacagaaaaagaaaaagaacctaacaattaaattaaaaaaaaagaagacaaaaaaaccctaaa

SEQ ID NO: 156588 - DNA, 907 bp, Homo sapiens
cgtcgacaaaaaaagaaaataaagaagtacaagagtataatcccttcatgacagtacagctgactcaatccggaccacgtgtcaaggtgtaatctcgaccttgaaagctcattatctgagaaggacttttcagcacatcctagaagcagcggatggtgaggacccaagttatatcaagggaattttggagaaactacagcatcatggatgctgtggacatggccatcgcatgggaggagctcaaaccagcactaatgaacagcatgtggaagaagatttggcctgagtgtgttcaggcccagcgtttttcccaggcagataacattgcacagcttcaaaaaaacattgtgacccttgccagaaatgtggcctttgaagaggttgctgaggctgctgtggaccagttgctgcagtcccatgaagaagatctctcaaatgaggaactgatgcggctggaacaggagctggcagtgggggaggaggagagggaagatggtccctgggcactgtggcagctaaccacaggaagactgtcggcagccctctcacattttgaggctggcttgtaggtccttgctagtaacagccctaatgatgactggaaactgagaggttccagaaaaatcagtgttgcaagtaaactgctagcaggagctgtacaatgagaaaaagcgccactcaaaacaactctcttaggtcatttttcaatgtgtgtaaccaaaagttaatcagaataaagcggaagcaccatgatgacctcaacagtggaggcccagccaggcctccctgctctgtggtgttggacatccctggaaaccttgctgttggtatttccattttgatacttgagagcatcaaattttgtcattaaaatgttatttaaatatatgcttttaaaagctcaaaa

SEQ ID NO: 156589 - DNA, 851 bp, Homo sapiens
cccacgcgtccgcccacgcgttcgggcagctttcatgtgtatccaagttaatgagggatgtgtgtgggcagccctgcttcagtccccgtggcatggtccatacctgcagtgggggaaaaggaagtattccagaaggaaattcatcatggcagataaaagaaaaggtatggcgatttagtactgcattttgttctgttaatgaatggaaatttgctgacatcctaagcatggcagaccacttgaagaaatgcagttacaatgttgtcgagaaacgggaggaagcaatccctttgccatgtatgtgtgtgacacgagaactcactaaagaaggacgttcactacgctcagttttaaaacctgtactttaaaagttgtaatattactagcacatatattgcaagcacctagtataattcctttgtaatatgtgaaactttattaatgtattaaatattacaactagctaaatttattgtcactgtgtatataatgttttgaagtgacatctatttttataaagtactgtttagttggaaaaagttgccttaatgtttgaaatgtgtgaaatttttggaacttgctggacagggtgatttaatttttagctacataattttaagaattagtattttcagtggtgtgcatattttggttcttaaatttttgcttcttaaactaaaaaaatcctgaccaatttatttgttgttttctgtgggttgcgacccatgcaatcaaaaagcaaaattttgattgagatttttttacagcataggtttttcatataaaaatattctgaatttgttaagcactgccataatatcattataatgtttttgtcttttagtgcttcc

SEQ ID NO: 156590 - DNA, 435 bp, Homo sapiens
  misc_feature (1)...(435): n = a,t,c or g
nnnnnnnnnnnnnnnnnnnncctagtcaaaaatttactacacatactcagtagcggaaaaacatatcccataagcagaggacaaatcacagatgctcctcgacttacgatggagctacatccgaacaagctcatcgtcggccgacagatcgcacgcaagtggtccacggatcgcacataagtggtccacagtcgacagaaacagacctagatatgacagtaataatgaattagcagaaaaggaacaattatcttaaatttgctccatatgctcgagggtattttttaaagcatgattatgattaaaagagaaatggaagacactggtgtgctttttttttttttttttttttttgagaccgtcactctgtcacaaaaaaaaaaccagatacaatgaccaaattttcttcatcaattaaagaggtagaacaaagtc

SEQ ID NO: 156591 - DNA, 578 bp, Homo sapiens
acattccttggactttgttctacctctttaattgatgaagaaaatttggtcattgtatctgggcgacagagcgggaatctgtcttaaaagaaaaaaaattggccgggtttggtggcacgtgcctgtggtcccggctgctcggggggctggggtgggaggatcgcttgagcctgggagtttgaggctgcagcgggccgtgattgcgctactgcattccagcctgggtgacagagtgacggtctcaaaaaaaaaaaaaaaaataaagcacaccagtgtcttccatttctcttttaatcataatcatgctttaaaaaataccctcgagcatatggagcaaatttaagataattgttccttttctgctaattcattattactgtcatatctaggtctgtttctgtcgactgtggaccacttatgtgcgatccgtggaccacttgcgtgcgatctgtcggccgacgatgagcttgttcggatgtagctccatcgtaagtcgaggagcatctgtgatttgtcctctgcttatgggatatgtttttccgctactgagtctgtgtagtaaatttttgactaggaaa

SEQ ID NO: 156592 - DNA, 556 bp, Homo sapiens
tttcgtctggccacctccatagcaagcagtgatgatgacagcctcttcatctatgactgcagtgctgcagaaaagaagtcacaagaaaataaaggggaggacgcgcccttggaccaggggagcggtgcgattctggcgtccaccttctccaactctggcagctatttttgctttaaccgatgacagaccgtggcaaggaggtgtacagccctgactttcatagcctcggaggagaaggtcttggtggccgacaagtctggagacgtctactccttttcggtgctggagccacacgggtgtggccgtctagagctggggcacctgtctatgctgttagatgtggctgtgagtcctgatgaccgcttcatcctcactgccgaccgggacgagaagatccgagtcagctgggccgcggcgccccatagcatcgagtccttctgcttggggcacacagagtttgtgagccgtatctccgtggtgccaactcagcccgggctgcttctgtcctcctctggggacaggcaccctgaggctctgggagtacaggagcggccgc

SEQ ID NO: 156593 - DNA, 1490 bp, Homo sapiens
gcgggcgggtacatggcgggctctgtgggactggcgttgtgcgggcagacgttggtggtgcggggcggcagccgattcctggccacctccatagcaagcagtgatgatgacagcctcttcatctatgactgcagtgctgcagaaaagaagtcacaagaaaataaaggggaggacgcgcccttggaccaggggagcggtgcgattctgggcgtccacctttcctccaactctgccagctattttgctttaaccgaatgacagtaagcgtctgattcttttccgtacaaaaccatggcaatgtctgagtgtcaggaccgtggcaaggaggtgtacagccctgactttcatagcctcggaggagaaggtcttggtggccgacaagtctggagacgtctactccttttcggtgctggagccacacgggtgtggccgtctagagctggggcacctgtgtatgctgttagatgtggctgtgagtcctgatgaccgcttcatcctcactgccgcccgggacgagaagatgcgagtcagttgggccgcggcgccccatagcatcgagtccttctgcattggggcacacagagtttgtgagccgtatctccgtggtgccacactcagcccgggctgcttctgtcctcctctggggacggcaccctgaggctctgggagtacaggagcggccgccagcctgcactgctgtcaccgtggccagtctgcaggagctcggtggacccccaggccccccagaagtttgccgcgtccaggattgcattctggtgccaggagaactgcgtggcgctcctgtgcgacggcactccatgtggtctacatcttccagctggacgcccgcagacagcagttggtgtacaggcagcagctggcgttccagcaccaagtgtgggacgtggctttcgaggagacccaggggctgtgggtgctccaggacttgcaagaaagcccccctggtgctcttacaggcatgtgggcgaccagtggcagtctgttcctgagagcaccgtgttaaagaaagtctctggtgttcttcgtggaaactggcccatgctggaaaggctttgccggcgcagacgccagctttcagcagtctcttacaaggcccacgttccgacaacgtgaacctcctacctgaagaagaaagaggagaggctgcagcagcagctagagaagaagcagcggcgccggagtccccccgcttgggcccgcgggccatgccaagaagatgagaccgggggaggcgacgctaagttgctgatcgtggcggtctgtttctgtcgactgtggaccacttatgtgcgatccgtggaccacttgccgtgcgaatctgtccggccgacgaatgaacttgtttcggatgtaactccatccgtaaatccgaggagcatctgtgatttgtcctctgcttatgggatatgtttttccgctactgagtctgtgtagtaaatttttggctaggaaaaaaaaaaaaaaaaaaa

SEQ ID NO: 156594 - DNA, 391 bp, Homo sapiens
  misc_feature (1)...(391): n = a,t,c or g
gcccccatggctggctgcctgtctttttattacttgatccagcaggggaangacaaggggttttccctttacactcgggatggggctggcctttacaaggaaatctggaaagcagacaggccagggaatgctgcctggaaccttgcggagggcgagttcaatgctccttaccccatggaggttatttttgaagatgctttcaatggtcccaagggaggttatgttgccctggatgatatttcattctctcctgttcactgccagaatcagacagaacttctgttcagtgccgtggaagccagctgcaattatgagcaagatctctgcaacttttaccaagataaaaaaaggccagggtggaccccgagtgaaaggaaaaccaaacatgttg

SEQ ID NO: 156595 - DNA, 1460 bp, Homo sapiens
agaaacttccacctccacctggagagtgtactttcgagcaagatgaatgtacatttactcaggagaaaagaaaccggagcagctggcacaggaggaggggagaaactcccacttcctacacaggaccaaagggagatcacactactggggtagttgtttccagccaccttgctagtgagtgtccatttggcctcaatagtgatgcactcctgcctaagaagatatgcagcttggtcctactgctgacctcttttcttgctgcttcagcagattctgggacaatgttgcttcggtggggctgcttaaagtccaagatcaagatgtcggtagggttggttccttctgaaatttctctccttggcttgcagatggctgccttcttgcttcacatggcctttcctctgtgccagtgcacccccgatatgtatcttcttctgactgtgggtaaccgaaaccatggaaggcaaaaacagataaagggggcactactatattggacatttaccacgtgtaggcactgcgctaggaacctcaacatcctttccacaacctgtaaggacaaagttggagaatttgctaaactcagcaaaattgaactcctcgaagccactgaaaagtcaattggtcccccagaaatgcacaaatatcactgtgaactcaaaaacttaagggagaaagaaaaacagctcgaggatttattggctaccaaaattgcctctaaggttgctaaactgggaatcctactagggatgccaactttggaaattgggggaaaagagggtgggggttggggtactggatattggcttagagcagaaaaggaggatggagattatttgtgtatagaagggagtgaaggactgaatactgagaaaatagtgcctgtgatgcaagaaaggaacagtatcaacatcaataaaaaggacgtccactcagagaccccagccaaaggtcaccaacttcaaagaccaaaggtagataaatctatgaagatggggagaaaccaacacaaaaaggctgaaaattccaaaacccagatcacatcttctcctccaaaggatcccaaatcctcgccagcaagggaacaaacatgtatggagaacgagtttgacaagttgacagaagtaggcttcagaaggtgggcaataacaaactcccccgagctaaaggaggatgttctaacccaatgcaaggaagctaagaatcttgaaaaaaggttagacaaattgctaactagaataaccagtttagagaaaagcatgaatgacctgatggagctgaaaaacacaggacgagaactttgtgaagcatacacaagtatcaatagccgaatcgatcaagtggaagaaaggatatcagagattgaagatcaactcaatgaaataaagcaagacgacaagattagagaaaaaagagtgaaaagaaacaaacaaagtcccaagaaatatgggactctgtga

SEQ ID NO: 156596 - DNA, 396 bp, Homo sapiens
atgtatggagggggcactggcctgctgagtgtttatctgaaaaaggaagaagacagtgaagagtccctcttatggaggagaagaggtgaacagagcatttcctggctacgagcactgattgaatacagctgtgagaggcaacaccagctactgcgtgtaaagtatactgcaatgggacaaggagactttgggggctgctgcagtagccctggcaagaggagtgatggcttaggctatgcagcagagataatttttgaagccattcgaggagtatcaataagaagtgatattgccattgatgatgttaaatttcaggcaggaccctgtggagaaatggaagatacaactcaacaatcatcaggatattctgaggacttaaatgaaattgagtattaa

SEQ ID NO: 156597 - DNA, 1140 bp, Homo sapiens
atgaaaagaaaacatgttccaattgatgacaaaatgttgcaacagaaagcattgagactacatgaagacttcagcaagggatcccctgaaacaagtgacaccaagccatttactgcaagtccagagcaactgcagagctcagaaatttctgctcaaaagggaggggatgaggttacatggcagtttccttcctctacctcttccatgagtggttcgcttaagccccctcctttagatcaaggccactacatgtacgtggactcagtttatgtgaagcacttccaggaggtggcacagctcatctccccgttgaccacggcccccatggctggctgcctgtcattttattaccagatccagcaggggaatgacaatgtcttttccctttacactcgggatgtggctggcctttacgaggaaatctggaaagcagacaggccagggaatgctgcctggaaccttgcggaggtcgagttcagtgctccttaccccatggagcccttcccccttggcaaagacaaacttctaggcttccccgtggattttggagagtttaggtaccaggtccttatgggaccattactgttaaggttattaactcacacaagaggaatgcatacctgggtggtttttccagcacaggtgaaggctgtgctgacatctgattcccccatggtcacaggcagaaggtggttgactgagctcacagttaaagttgctggtagagaagaaagcaaaactaaaggggttatttttgaagttgctttcaatggtcccaagggaggttatgttgccctggatgatatttcattctctcctgttcactgccagaatcagacagaacttctgttcagtgccgtggaagccagctgcaattttgagcaagatctctgcaacttttaccaagataaagaaggtccaggttggacccgagtgaaagtaaaaccaaacatgtatcgggctggagaccacactacaggcttaggtaaatcagagatctgtctatgtggggacatcttgggtagtcgtgagctttattggccattcctacttcacacctgcaaagacatcgacttaaagaaaaaaggcagctgtgaagaagcaaagacaatcagtagtcttgtgtttgaccatttttaa

SEQ ID NO: 156598 - DNA, 2754 bp, Homo sapiens
atggcggaaacagcggttatcaatcacaagaaacgtaaaaatagcccgcgaatcgtccagtcaaacgacctcactgaggcggcatatagtctctcccgggatcaaaaacgtatgctgtatctgttcgttgaccagatcagaaaatctgatggcaccctacaggaacatgacggtatctgcgagatccatgttgctaaatatgctgaaatattcggattgacctctgcggaagccagtaaggatatacggcaggcattgaagagtttcgcggggaaggaagtggttttttatcgccctgaagaggatgccggcgatgaaaaaggctatgaatcttttccttggtttatcaaacgatgcgcgacggcggtggggagacagcgaacgcacgcggacaaagagcgaggggcgcgagaaaagggaggagaaaaaaaagcgaaagcgaaaaaaactagcgggacgcgaaaaagaggaggggggagagagaggaagaagaagggggaacaggagggcaaggatgggcagagaaacgcacaaaccaagggagagaaacgacaaccgcacaaagcgaacaccccgccgaaaaccttacagcagcgaaaggaaaaaaagacgggagatagtcacagaaggaaaaaaaagctgtttaaagagagtgagaaagtgttatcccaggaatgggagcatgattttgtcattgagaccatggccactggagcaagaccacaacttctgttcagtgccgtggaagccagctgcaattttgagcaagatctctgcaacttttaccaagataaagaaggtccaggttggacccgagtgaaagtaaaaccaaacatgtatcgggctggagacccacactacaggcttagggtattacctgctagccaacacaaagttcacatctcagcctggctacattggaaggctctatgggccctccctaccaggaaacttgcagtattgtctgcgttttcattatgccatctatggatttttaaaaatgagtgacaccctagcagtttacatctttgaagagaaccatgtggttcaagagaagatctggtctgtgttggagtccccaaggggtgtttggatgcaagctgaaatcacctttaagaagcccatgcctaccaaggtggttttcatgagcctatgcaaaagtttctgggactgtgggcttgtagccctggatgacattacaatacaattgggaagctgctcatcttcagagaaacttccacctccacctggagagtgtactttcgagcaagatgaatgtacatttactcaggagaaaagaaaccggagcagctggcacaggaggaggggagaaactcccacttcctacacaggaccaaagggagatcacactactggggtaggctactacatgtacattgaggcctcccatatggtgtatggacaaaaagcacgcctcttgtccaggcctctgcgaggagtctctggaaaacactgcttgacctttttctaccacatgtatggagggggcactggcctgctgagtgtttatctgaaaaaggaagaagacagtgaagagtccctcttatggaggagaagaggtgaacagagcatttcctggctacgagcactgattgaatacagctgtgagaggcaacaccagataatttttgaagccattcgaggagtatcaataagaagtgatattgccattgatgatgttaaatttcaggcaaggcctctgtggagaaatggaagatacacctcaacaatcatcaggatattctgaggacttaaatgaaattgagtattaagaaatgatctgcatttgtttttactatacaaaaaccatacctctctttaatcaaaatgaaaacaaagcaaatgaatactggacagtcttaacaattttataagttataaaatagactttaaagcaccctccttcattacttttgcaaaaacatactgactcagggctcttttttttctttttgcatatgacaactgttactagaaatacaggctactggttttgcatagatcattcatcttaattttggtaccagttaaaaatacaaatgtactatattgtaggcattttaaagtacacaaagggcacaatcaaaatgagatgcactcatttaaatctgcattcagtgaatgtattgggagaaaaataggtcttgcaggtttccttttgaattttaagtatcataaatattttttaagtaaataatacggggtgtcagtaatatctgcagaatgaatgcagtctttcatgctaatgagttagtctggaaaaataaagtcttattttctatgttttattcatagaaatggagtattaatttttaatattttcaccatatgtgataacaaaggatctttcatgaatgtccaagggtaagtcagtattaattaatgctgtattacaaggcaatgctaccttctttattccccctttgaactacctttgaagtcactatgagcacatggatagaaatttaacttttttttgtaaagcaagcttaaaatgtttatgtatacatacccagcaacttttataaatgtgttaaacaattttactgatttttataataaatattttggtaagattttgaataatatgaattcaggcagatatactaaactgcttttatttacttgtttagaaaattgtatatatatgtttgtgtatcctaacagctgctatgaaattataaaattacctaataaaaataatttgaaaatcttaaaaaaaaaaaaaaaaaa

SEQ ID NO: 156599 - DNA, 396 bp, Homo sapiens
aagaaataaaaagcaaggctatccagcatttcatgtattcagtactttcttctatcctaaatgaaagtctgggggttaccaagcagtgaaacgatggaccaaaggggtaaatctctttgaacaagaaattattctggtgcctattcatcggaaggtacattggagcctggtgtcagtatttacaggatgaaagtaagaccaaaagaaatagtgatctgaatcttttagagtggacccatcacagcatgaaaccacacgagattcctcaacagctgaatgggagtgattgtggaatgtttacttgtaaatatgcagattatatttctagggacaaacctatcacatttactcaggtgagtgaagaccctcttcatccatttacttgttactaagcaa

SEQ ID NO: 156600 - DNA, 1805 bp, Homo sapiens
catgaatcttctggtggaaagaaataaaaagcaaggctatccagcacttcatgtattcagtactttcttctatcctaaattaaagtctgggggttaccaagcagtgaaacgaatggaccaaaggggtaaatctctttgaacaagaaattattctggtgcctattcatcggaaggtacattggagcctggtggtgattgacctaagaaaaaagtgtcttaaatatctggattctatgggacaaaagggccacaggatctgtgagatgggtccttgggtatttacaggatgaaagtaagaccaaaagaaatagtgatctgaatcttttagagtggacccatcacagcatgaaaccacacgagattcctcaacagctgaatggggagtgattgtggaatgtttacttgtaaatatgcagattatatttctagggacaaacctatcacatttactcagcaccagatgcctctcttccggaagaagatggtgttggggaatccttcattcagcagttgctgttgaggaaaactttgcctggtccctctagctgctggtgggttctttcacagacatttccatatacctcatgcattgtgggttaaaaagtccctgcatcacttctgttctcacaggtactgagctgtcaaaagtgcatgaaggcctctcactgttactctagtcctgacttggggtgcagagggctgcttgcaatcctgtttgtaaaggctgtgcctgctcagagctttggactgttcaacccacacaagaacaaacgctaactaatattttttttaagagattcttttccctatgaatgtgggaaatgcaggatttatcctgtgaatcgggtgtttctgagagtaggctaagcgaattgattcactcactcgtttgcaaacataatgggcaggggtcatttactgctgctcttttacagtgagctctaaattacttgtttgaactatatatttctgaaaggaatgttactcaagctgccactccctggtggaaaaccaggagggaactctcactggggccgaaagataatggaccttgaaccataactggccacaatgaagctggagggtttgggattttttttgtttttgtttttttgaggctcaaaaaatgctgggagaaatgaaaatgctgtgggatagggctcctgttgcctttgcagaggaagtctgacactacagcgttggcacagtgccgtgaacagtggaactgtgcccaagggacttctgattatccaagcatcttccgaagagtggtgtggccaccttaaagagaactccctttctgggaaagggggggattgggcttaagccttgaaattggaattcatggatttgaagtaactgtaaaccctaaatcttcattttcatcccacatctggttgagtataaaccctcagaaattgtaggggctggccctgagcctgtttatttccaaaagatacctattcaatttaaagcctatttttccctcagagtttttgttttctatatattaagtcctaaattaagttttcctacctcattaagacctaacattttcgcccactcccatcccccactgaaatttgtggaagaaaatttagtacttggcctctgaggttgcccagttatacaataatcctattttgcatatgaaagtttgtatttaacttttttgttcattaaaaaccttactgatatggttataacttcagacagtttagagttggtcagaacatattttgcaagatctagtggcagaccaccttttattacatcagaaaagcaacactaggcactaggtcgac

SEQ ID NO: 156601 - DNA, 424 bp, Homo sapiens
tcggtgggggtgtcttaacactactggtggaagtcagcaacatcttcctcaccattcgcatgatgatgaaaatcagtaatgcccaggatcatctcctctaccgggttaacaaaggaccctgggcaccttcctgctgggtatcctgctcatgctggacgtgatgatcataatctacttttcccgcctcctccgctctgacttctgccctgagcatgtccccaagaagcaacacaaagacaagttcttgactgagtgaggggcacagagcctgggacaacaaaaacggacaaggccagaaacagcttcatatggacactgggacttagccccaagcctgggtgtcctctgaggccagcctctcccccttttgagcctgcgcccacactattgaaaacactaatgaaagtaaaaaaaaaaaaaaaaa

SEQ ID NO: 156602 - DNA, 833 bp, Homo sapiens
  misc_feature (1)...(833): n = a,t,c or g
gcacgaggcgcgccgaccccctgcgcacctggcgctggcacaacctgctcgtctccttcgctcactccattgtgtcggggatctgggcactgctgtgtgtatggcagactcctgacatgttagtggagattgagacggcgtggtcactttctggctatttgctcgtttgcttctctgcggggtatttcatccacgatacggtggacatcgtggctagcggacagagcgcgagcctcttgtgaataccttgtccatcacgtcatggccatgggtgccttcttctccggcatcttttggagcagctttgtcggtgggggtgtcttaacactactggtggaagtcagcaacatcttcctcaccattcgcatgatgatgaaaatcagtaatgcccaggatcatctcctctaaccgggttaaacaagtatgtgaaacctgggtccatgtaccttttctcttcacgcctggcaccctcaggccctaccctcaacccatttcttctttgcgttatgtgaaccaggaggaccctgggcaccattcctgcttgggtatcctgctcatgctggacgtgatgatcataatctacttttcccgcctcctccgctctgacttctgccctgagcatgtcccccaagaagcaacacaaagacaagtttcttgactgagnnctgagtgaggggcacagagcctgggacaacaaaaacggacaaggccagaaacagcttcatatggacactgggacttagccccaagcctgggtgtcctctgaggccagcctcctccacccttctgcagcctgcgcccacacatattgaaaacactaatgaaagtaaaaa

SEQ ID NO: 156603 - DNA, 400 bp, Homo sapiens; identical to SEQ ID NO: 123796

SEQ ID NO: 156604 - DNA, 1120 bp, Homo sapiens
atgcggcgatcgaggagctctgcggccgccaagctgcgcgggcagaagcggtccggggcctccgcggcccccgcggcctccgcggccgctgccttggcacccagcgccacccgcacacggcgctccgctagccaggccgggagcaagagccaggcggtcggagaagccgccgtcggagaagccgcggctgaggcgctcgtcgccgcgggcccaggaggagggcccgggggagccgccgccgcctgagctggcgttgctcccgccaccgccgccgccgccgccgactcccgcgaccccgacgtcctcggcgtccaacctggacctgggcgagcagcgggagcgctgggagacgttccagaagcggcagaagcttacctcgaaagggtgccgccaagctcctgctagacacctttgaataccaagggcctggtgaaagcacacaggaggctgccacttgtggaagcagttcgtttttgaaagttttgggcctcagcagactttgcatatatttgactgcaattgcagcattttgcaagaagaagcagaatagacacttcattgttccagcttctcgcttcaagctcctgaagggagctgagcacataacgacttacacgttcaatactcacaaagcccagcataccttctgtaagagaatgtggcgttcagagcttctatactccacgatcaaaccccggaggcttcggaattgccccccactgcctggatgagggcactgtgcggagtatggtcactgaggaattcaatggcagcgattgggagaaggccatgaaagagcacaagaccatcaagaacatgtctaaagagtgagcttctggcctctcctgccctgaaaaggaggaatgattggggccagcaactttgctctccctgccgtgcctcggtggtgctcctgaatgtggctgacctgggctgctggttccgtggactagggtcatcttgatctctgcagattactccagctaccagtttctttaggcagctctttgtcctccctctgcccagattttgatgtagtctaattgacatccttctcttcccaacttttgtgtgatcttttaggaaaaaaaataaatatttttaacattaaaaaaaaaaa

SEQ ID NO: 156605 - DNA, 1213 bp, Homo sapiens
gcggccgctgccttggcacccagcgccacccgcacacggcgctccgctagccaggccgggagcaagagccaggcggtggagaagccgccgtcggagaagccgcggctgaggcgctcgtcgccgcgggcccaggaggagggcccgggggagccgccgccgcctgagctggcgttgctcccgccaccgccgccgccgccgccgactcccgcgaccccgacgtcctcggcgtccaacctggacctgggcgagcagcgggagcgctgggagacgttccagaagcggcagaagcttacctccgagggtgccgccaagctcctgctagacacctttgaataccagggcctggtgaagcacacaggaggctgccactgtggagcagttcgttttgaagtttgggcctcagcagacttgcatatatttgactgcaagtaccggaattatatatgaataataagcacatacgatggaattactcaaatggagaactgaccaggctactaacaatagagtccagattggaaaagaagcactgtggaataacttgtgagaggattctgtgctaaattagaactttttcaaaggtggcctgaaaagaggggacttcagtttaattccagagatggtaattctggggacgtgttttacttggagctggacttcttgtgacgtggtgatgaagaaagagggaaacctaaacttccttgtccatttttggtgtggatgtctcagagacatcaggttgtagcagcgtctgaaatttgtttcctaagtgtctctgaagtccagcgcttctcttcactgtaaagaactgaggggtgggcagtacagacctgtctgttggtcctgtgttctgagcaatgcacaacctcgactgctgacttggcacccccctgggctctgctgtacctgcaaaccacaggcactgctatccaggcctttgccccagctcctcggccctggatggtgcagaaaggggcatcatctgtggggacggctggctctcatggctgcgccgctcacgcatagaggatgcacgtggctgctcacaatctggaatttgctctgtctttctgtaggtgcagcatttgccataagaagcagaatagacacttcattgttccagcttctcgctataagcttctgaagggagctgagcacataacgacttacacgttcaatactcacaaagcccagcataccttctgtaagagag

SEQ ID NO: 156606 - DNA, 1681 bp, Homo sapiens
  misc_feature (1)...(1681): n = a,t,c or g
ttttttgatggagtctcgctctgtcaccaggctggagtgcagtagcacaatcacggctcactgcaatctctgcctcccggtttcaagtgattctgctgtctcagcctcccaagtagctgggactacaggcatgcgccaccacgcccagctaatttttgtatttttagtagagacggggtttcaccatgttggtcaggatggtctccatctcttgacattgtgatccacctgcctcggcctcccaaagtgctgggattacaggcatgagccactgcacccagccttgaatttttaattttatctctgatatacttcattaagtgtctggagacctaattatcctaaaagatcatacattttctacctatgaattttgctgcatacagaaagtgccctttcctcaggaagttgctgtggtttcattttctttgggatggattcttatctagaataacatagcagctctgcaaagggaccagtttttaaaaatgggaactttctaacattgaaaagtccccatttttgtgccaactatgattagtgagaggaagaaatcttattctatgggcatatgtatggaagggtgtaaagatcccttttgaaaggtttattcacattgtaggaacagcaaatgacatttttacagtatttttttgtaaaggcaaactattttgtgccttggaatttgggtatatgtgtattagtgaaacattgtaaaggtgaacttctacctctgtatcctaaatgtataccatccacttgtaaatgactataaactattatgtgattgcttttttttttagaatgtcttgtttaaatagtggccaatgtttaaggctgttaaaataagccaacttttactaattggggagttttataaatgactgattaaatttaaagaattaacttacatgcaattgtgtgattattagttatcagcagtgttgtaaggaaaattattgtgtttttttttatgatcattatcccactttaggtaaagaaaaatattggaatgggaatagtgttgggaaacagacattaacaacctagggtgcctgcactcaaatagccgatgttactgtccctagattagagacttgattaagggcttgtttgtaccaaaagttggggaaacaatgccattgacctgtgttttagtttgggctgcacccacagatccaaatctggcactgtgtctacatataggaaaggtcctggtgtgtgcttanggtccccaatgccgggacttgagggaaagagctctgttaatatgtttcccatttcccctttatccaaagataacccaaaccttatggccccttataaccaatggaggcactggctgccctccttaattttcaatcatggaccctaaagaagtactctgaagggtctcaacaatgcccaggtggggacagatatactcagagattatcccaggtctgcctcccagcgagccctggagtacaccagaccctcctagagaaatctgtatataatttaacaacccacttatccacccttaaacactgaggaaagttcgtcttatacatcataattttattcttgtgtgttataacttaaacctatttctatttttgtttgttattgacaattataacggtgtccatctccaagttcaataaactaattcagttaactgtaaaaaaaaaaaaaaaaa

SEQ ID NO: 156607 - DNA, 780 bp, Homo sapiens
tggttggttggttttggttttggtttttttgagatagagtctcgccctgtcgcccaggctggagtgcaatggcgcaatcttggctcactgcaaccttcgccttccaagttcaagcgattctcctttctcaaccttccaagtagcttggattacaggcacacgccaccaagcctggctaattttttgtatctagtacagatggggtttcaccatgttggccaggatggtcttgaactcctgacctcatgatccgcccaccttggcctcccaaagtgctgagattacaggtgttagccatcgcacccagcctaggagtgctattcttcttcagtcccaatcatcactccttcctttgctaagaacttttattagctctgtaccagtcacagaataaaatacaagtattttacaacggcattcaattccctccataatctggttccaatctattttccagttctctaattctgcccctcttatactgtatctctataagtcagctactcaaatgcctccagccccagggtggtgttacgtatgtgtgaaaaggtagacaaggtgtaagataatagggaatggtaggaccaatatctagctataaatatctgtataaaaaaaattttttctaactatgcaacccagacaaaaaacatctacaaacagatctcagttactagccaagccttttacaactcctgcaagttaagccaaatagtttcctgctattaaaaataagctctgggctttcctactactaaatactttgtgcccacgcgtccg

SEQ ID NO: 156608 - DNA, 1969 bp, Homo sapiens
ggcacgagatttccttaggagcaatttgtgcagtgttgctggttattatggggctatttgcaactaggtgtaaccgcgagaagaaagacactagatcctataactgcagggtggccgaatcaacttaccagcaccacccaaaaaggccatcccggcagattcacaaaggggacatcacattggtgcctaccataaatggcactctgcccatcagatctcatcacagatcgtctccatcttcatctcctaccttagaaagagggcagatgggcagccggcagagtcacaacagtcaccagtcactcaacagtttggtgacaatctcatcaaaccacgtgccagagaatttctcattagaactcacccacgccactcctgctgttgagcaggtctctcagcttctttcaatgcttcaccaggggcaatatcagccaagaccaagttttcgaggaaacaaatattccaggagctacagatatgcccttcaagacatggacaaatttagcttgaaagacagtggccgtggtgacagtgaggcaggagacagtgattatgatttggggcgagattctccaatagataggctgttgggtgaaggattcagcgacctgtttctcacagatggaagaattccagcagctatgagactctgcacggaggagtgcagggtcctgggacactctgaccagtgctggatgccaccactgccctcaccgtcttctgattataggagtaacatgttcattccaggggaagaattcccaacgcaaccccagcagcagcatccacatcagagtcttgaggatgacgctcagcctgcagattccggtgaaaagaagaagagtttttccacctttggaaaggactccccaaacgatgaggacactgggggataccagcacatcatctctgctctcggaaatgagcagtgtgttccagcgtctcttaccgccttccctggacacctattctgaatgcagtgaggtggatcggtccaactccctggagcgcaggaagggacccttgccagccaaaactgtgggttacccacagggggtagcggcatgggcagccagtacgcattttcaaaatcccaccaccaactgtgggccgccacttggaactcactccagtgtgcagccttcttcaaaatggctgccagccatggaggagatccctgaaaattatgaggaagatgattttgacaatgtgctcaaccacctcaatgatgggaaacacgaactcatggatgccagtgaactggtggcagagattaacaaactgcttcaagatgtccgccagagctaggagattttagcgaagcatttttgtttccatgtatatggaaatagggaacaacaacaacaacaaaaaaccctgaaagaactggcattgccaaatagttgcatttatcataaatgtgtctgtgtatattgaatattaaatactgtattttcgtatgtacacaatgcaagtgtgattattttaatctgtattttaaaaatacatttgtaccttatatttatgtgtaatttaacaaacaaattttattttttttactcccatgacagacatgtttttcctagtcgtgtagaaactagccactgttcaaatctgatacactattcaaccacaaagtgtaaaggcactgcttagattagttttgttggggaagaattattatgttgtatggacaaccccactgaagcatttatacaattcttaattccattaagtgatcccactttttttcaataactttttagaaattaaggaatcattaaaattgttaaggctattttattgttattttctctactttctactagccccaatagttggaactcttataggggaaaatcggaaagataaagtggaaaggtttatttcaggactgaggaaatatcttgaaggttatttattaggatggactatctccaaatggaactttttatagacatgatgataa

SEQ ID NO: 156609 - DNA, 375 bp, Homo sapiens
ggcacgaggagtgctcctgaggcgtctccacggtagggattgggagaggaagcagactggaactgtgggctccaccagagaaatacacccctccaggaagacccagccaccctctatggctctggggcgagggagggggaagcatcaggcgggagattgacaccacatcttccccccaccaggtgcctgtgcagtcctggtttgatgacatgggaaacactgagttgctgaacctgatcccaatctttgaggagctgaacggagcaaaggacgtttacaccagccttgggcagctgcgggccccttagactgccctgctttcaagcgacggccattccactatgggactttcccacactgtgcctttacgatcag

SEQ ID NO: 156610 - DNA, 830 bp, Homo sapiens
cccacgcgtccgcccacgcgtccgctcaccaggtgtatgtgctcaagaggccttatgtggatgagttcctgagaggcatgggggaactctttgaatgtgttctcttcactgccagcctggccaagtatgccgaccctgtgacagacctgctggaccggagaggggtgttccgggcccgcctattccgtgagtcttgcgtgttccaccagggctgctacgtcaaggacctcagccgcctggggagggacctgagaaagaccctcatcctggacaactcgcctgcttcttacatattccaccccgagaatgcagagcctgtgcagtcctggtttgatgacatggcatacactgagttgctgaacctgatcccaatctttgaggagctgagcggagcataggacgtctacaccagccttgggcagctgcgggccccttagcctgccctgcttccaagcgacggccatcccagtaggggactttcccacactgtgcctttacgatcagcgtgacagagtagaagctggagtgcctcaccacacggcccggaaacagcgggaagtaactggaaagagctttaggacagcttagatgccgagtgggcgaatgccagaccaatgatacccagagctacctgccgccaacttgttgagatgtgtgttttgactgtgaggagagtgtgtgtttgtgtgtgtgtttttgccatgaactgtgggccccatgtatagtgttttcagtggggggagaagctgaaagaccaagacttctccgcaattggcttgactcctctcctgtcactttattagccactagattgtgttagggtgatgatg

SEQ ID NO: 156611 - DNA, 1956 bp, Homo sapiens
atgaacaaattacggcaaagttttaggagaaagaaggatgtttatgttccagaggccagtcgtccacatcagtggcagacagatgaagaaggcgttcgcaccggaaaatgtagcttcccggttaagtaccttggccatgtagaagttgatgaatcaagaggaatgcacatctgtgaagatgctgtaaaaagattgaaagctgaaaggaagttcttcaaaggcttctttggaaaaactggaaagaaagcagttaaagcagttctgtgggtctcagcagatggactcagagttgtggatgaaaaaactaaggacctcatagttgaccagacgatagagaaagtttctttctgtgccccagacaggaactttgatagagccttttcttacatatgccgtgatggcaccactcgtcgctggatctgtcactgcttcatggctgtcaaggacacaggtgaaaggttgagccatgcagtaggctgtgcttttgcagcctgtttagagcgcaagcagaagcgggagaaggaatgtggagtgactgctacttttgatgctagtcggaccacttttacaagagaaggatcattccgtgtcacaacagccactgaacaagcagaaagagaggagatcatgaaacaaatgcaagatgccaagaaagctgaaacagataagatagtcgttggttcatcagttgcccctggcaacactgccccatccccatcctctcccacctctcctacttctgatgccacgacctctctggagatgaacaatcctcatgccatcccacgccggcatgctccaattgaacagcttgctcgccaaggctctttccgaggttttcctgctcttagccagaagatgtcaccctttaaacgccaactatccctacgcatcaatgagttgccttccactatgcagaggaagactgatttccccattaaaaatgcagtgccagaagtagaaggggaggcagagagcatcagctccctgtgctcacagatcaccaatgccttcagcacacctgaggaccccttctcatctgctccgatgaccaaaccagtgacagtggtggcaccacaatctcctaccttccaagctaatggcactgactcagccttccatgtgcttgctaagccagcccatactgctctagcacccgtagcaatgcctgtgcgtgaaaccaacccttgggcccatgcccctgatgctgctaacaaggaaattgcagccacatgttcggggaccgagtggggtcaatcttctggtgctgcctctccaggtctcttccaggccggtcatagacgtactccctctgaggccgaccgatggttagaagaggtgtctaagagcgtccgggctcagcagccccaggcctcagctgctcctctgcagccagttctccagcctcctccacccactgccatctcccagccagcatcacctttccaagggaatgcattcctcacctctcagcctgtgccagtgggtgtggtcccagccctgcaaccagcctttgtccctgcccagtcctatcctgtggccaatggaatgccctatccagcccctaatgtgcctgtggtgggcatcactccctcccagatggtggccaacgtatttggcactgcaggccaccctcaggctgcccatccccatcagtcacccagcctggtcaggcagcagacattccctcactacgaggcaagcagtgctaccaccagtcccttctttaagcctcctgctcagcacctcaacggttctgcagctttcaatggtgtagatgatggcaggttggcctcagcagacaggcatacagaggttcctacaggcacctgcccagtggatccttttgaagcccagtgggctgcattagaaaataagtccaagcagcgtactaatccctcccctaccaaccctttctccagtgacttacagaagacgtttgaaattgaactttaa

SEQ ID NO: 156612 - DNA, 541 bp, Homo sapiens
ctccacccactgccatctcccagccagcatcacctttccaagggaatgcattcctcacctctcagcctgtgccagtgggtgtggtcccagccctgcaaccagcctttgtccctgcccagtcctatcctgtggccaatggaatgccctatccagcccctaatgtgcctgtggtgggttttgtatgttcaaactgtcattttatttttacgttgttagatatgggaactgtttgggtttagggcatcttagagttgattgatggaaaaagcagacaggaactggtgggaggtcaagtggggaagttggtgaatgtggaataacttacctttgtgctccacttaaaccagatgtgttgcagctttcctgacatgcaaggatctactttaattccacactctcattaataaattgaataaaagggaatgttttggcacctgatataatctgccaggctatgtgacagtaggaaggaatggtttcccctaacaagcccaatgcactggtctgactttataaattatttaataaaatgaactattat

SEQ ID NO: 156613 - DNA, 462 bp, Homo sapiens
atgaacaatcctcatgccatcccacgccggcatgctccaattgaacagcttgctcgccaaggctctttccgaggttttcctgctcttagccagaagatgtcaccctttaaacgccaactatccctacgcatcaatgagttgccttccactatgcagaggaagactgatttccccattaaaaatgcagacagtggacttgttcacaagtattcattacctttcagaaccgtctcacaggcctttgtgtggcctctgtacagctatgccagcctctataggtctatcctcgtcataaaatctgtagctaaagtattagatctggacctcatagttgaccagacgatagagaaagtttctttctgtgccccagacaggaactttgatagagccttttcttacatatgccgtgatggcaccactcgtcgctggatctgtcactgcttcatggctgtcaaggacaca

SEQ ID NO: 156614 - DNA, 869 bp, Homo sapiens
  misc_feature (1)...(869): n = a,t,c or g
atggtgaaacccctgtctctgcagatggtgccactgcactccagcctgggcaacagaggctccctctcagaaaacaagaacactggagtctgggagtctgcagcttcctgttgcatggctggctgtggaggtcctgcagatggtatctgttcagagccacttgggcacgaccaagatggcagagctcaaagcctgctgctctgggcaaagctgacaaggaaggacagattcagcagccaaccaaggagcataccttcatttgatttccttaaggcaaaagcactggctaaacaaagggagactatctgggagaaggtgttttcaccctttcaagctggggtgctttcaccaccgggaagtgccacgctgctttccacgctggaacaaggagctgttggccagaagcctccctcggtgccctgcctcatgggcctcttcgttgagcatctcacaacgtggcagcttacttcatcagtgcaagcaagcaagagcaagagagaggactcaccagagacagtaatagcaaaacagaaggcacagtctttcgtaatccaatcacagatnnnnnnnnnnnnnnnnnnnnnnnnnnnnnnnnnnnnnnnnnnnnnnnnnnnnnnnnnnnnnnnnnnnnnnnnnnnnnnnnnnnnntgtaaagaccagcaagaggatcattgggagctattttagaagcagcctactctaagataataataacatctagggtttgtttaaaatttaaattaaagactgcannnnnnnnnnnnnnnnnnnnnnnnnnnnnnnnnnnnnnnnnnnnnnnnnnnnnnnnnnnnnnnnnnnnnnnnnnnnnnnnnnnnnnnnnnnnnnnnnnnnnnnnnnncacaattttt

SEQ ID NO: 156615 - DNA, 3783 bp, Homo sapiens
atgtggagtgtcccatgcttggagaaggttgatgtgcttgcatggactgtcctgtgcctggctgtaaaaattaaaatgaacaaattacggcaaagttttaggagaaagaaggatgtttatgttccagaggccagtcgtccacatcagtggcagacagatgaagaaggcgttcgcaccggaaaatgtagcttcccggttaagaactggcaaaggctatttattcagagcttgctagcaatgaggagcctgtctgcctcctgctgccatcaacctgctgtctatagctcccatggcacccaggctgttcatgccaaagggtgcctgcaggcccacgctcacagagcatgctgccccagctgcacctcccctgctgcagctgccatctttgcagcagccactccagatgggccgctgctgccatcaagaccactagtaaacctgatagaaaagtcacaagctctggtgcgagagacactgaccagccaggcctcagctcccaactctggccgagcaggacagcccgtcacagtctgcctttcagtgccaatgctgcctggaggcctgcgctggaggccccagtcgacacgggtctttggcccgagacacaggctgtctctcaatgtctgggctgagaaccattcagcctgtttagagcgcaagcagaagcgggagaaggaatgtggagtgactgctacttttgatgctagtcggaccacttttacaagagaaggatcattccgtgtcacaacagccactgaacaagcagaaagagaggagatcatgaaacaaatgcaagatgccaagaaagccccaaacaagtgtgaactgaactgcattcccaagggggagaacttctactacaagcacagggaggctgtggttgatgggacgccctgcgagcctggcaagagggatgtctgtgtggatggcagctgccgggttgtcggctgtgatcacgagctggactcgtccaagcaggaggacaagtgtctgcggtgtgggggtgacggcacgacctgctaccccgtcgcaggcacctttgacgctaatgacctcagccgagctgtgaagaatgttcgtggggaatactacctcaatgggcactggaccatcgaggcggcccgggccctgccagcagccagcaccatcctgcattacgagcggggtgctgagggggacctggcccctgagcgactccatgcccgggccccacctcggagcccctggtcatcgagccccggcttcagctggagccacggctcatggagtgactgcagcgcggagtgtggcggaggtcaccagtcccgcctggtgttctgcaccatcgaccatgaggcctaccccgaccacatgtgccagcgccagccacggccagctgaccggcgttcctgcaatcttcacccttgcccggagaccaagcgcgggcctcctgggatggtggcggacttggctttgcatggggccacagggctgctctttcctctgggtccttgcacccggggcctgcagagccgctccacgcatggctggaaggcagggccatgggcaccctgctcagcctcctgtggaggaggctcccagtcccgctccgtgtactgcatctcgtctgacggggccggcatccaggaggccgtggaggaggctgagtgtgccgggctgcctgggaagccccctgccattcaggcctgtaacctgcagcgctgtgcagcctggagcccggagccctggggagagtgttctgtcagttgtggcgttggcgtccggaagcggagcgttacttgccggggtgaaaggggttctttgctccataccgcagcgtgctccttggaagaccggccacctctgactgagccctgtgtgcatgaggactgccccctcctcagtgaccaggcctggcatgttggcacctggggtctatgctccaagagctgcagctcgggcactcggaggcgacaggtcatctgtgccattgggccgcccagccactgcgggagcctgcagcactccaagcctgtggatgtggagccttgtaacacgcagccctgtcatctcccccaggaggtccccagcatgcaggatgtgcacacccctgccagcaacccctggatgccgttgggccctcaggagtcccctgcctcagcagcccccataccagcaatccctgcggtcgggctcagggccccacgactgcagacacagtcctcacgggtgctgccccgatggccacacggcatctctcgggcctcagtggcaaggctgccctggggccccctgtcagcagagcaggtccacaacacccaccagccccaggcccagcagaatgagcccagtgagtgccggggctcccagtttggctgttgctatgacaacgtggccactgcagccggtcctcttggggaaggctgtgtggccagcccagccatggtgccaggccagagagcagtgccagagtgttctcgcatccagcagtttgaacctgtggccttctggctgcttctgggaactggggaggcctaccccgtgcggtgcctgctgcccagtgcccatggctcttgcgcagactgggctgcccgctggtacttcgttgcctctgtgggccaatgtaaccgcttctggattagcttggcaggtgtggagccctcgttggtgcaggcagccctggggcagttggtgcggctctcctgctcagacgacactgccccggaatcccaggctgcctggcagaaagatggccagcccatctcctctgacaggcacaggctgcagttcgacggatccctgatcatccaccccctgcaggcagaggacgcgggcacctacagctgtggcagcacccggccaggccgcgactcccagaagatccaacttcgcatcataggtctctgtccccaccccatccaccactcacaccttgtttctcctggcctcatgacagggggtgacatggccgtgctgtctgaggctgagctgagccgcttccctcagcccagggacccagctcaggactttggccaagcgggggctgctgggccctggggccatcccctcttcacacccacagcctgcaaacaggctgcgtttggaccagaaccagccccgggtggtggatgccagtccaggccagcggatccggatgacctgccgtgccgaaggttcccgcccccagccatcgagtggcagagagatgggcagcctgtctcttctcccagacaccagctgcagcctgatggctccctggtcattagccgagtggctgtagaagatggcggcttctacacctgtgtcgctttcaatgggcaggaccgagaccagcgatgggtccagctcagagttctgggggagctgacaatctcaggactgccccctactgtgacagtgccagagggtgatacggccaggctattgtgtgtggtagcaggagaaagtgtgaacatcaggtggtccaggaacgggctacctgtgcaggctgatggccaccgtgtccaccagtccccagatggcacgctgctcatttacaacttgcgggccagggatgagggctcctacacgtgcagtgcctaccaggggagccaggcagtcagccgcagcaccgaggtgaaggtggtctcaccagcacccaccgcccagcccagggaccctggcagggactgcgtcgaccagccagagctggccaactgtgatttgatcctgcaggcccagctttgtggcaatgagtattactccagcttctgctgtgccagctgttcacgtttccagcctcacgctcagcccatctggcagtag

SEQ ID NO: 156616 - DNA, 1545 bp, Homo sapiens
atggtaattttactccctggtgaaattctgatctacaacgaagaaagccccaggaatttctctaagcacatcatcagtacatttttaaacactaatgagccaagcaaagtaaagcagactggaaagaaagcagttaaagcagttctgtgggtctcagcagatggactcagagttgtggatgaaaaaactaaggacctcatagttgaccagacgatagagaaagtttctttctgtgccccagacaggaactttgatagagccttttcttacatatgccgtgatggcaccactcgtcgctggatctgtcactgcttcatggctgtcaaggacacaggtgaaaggttgagccatgcagtaggctgtgcttttgcagcctgtttagagcgcaagcagaagcgggagaaggaatgtggagtgactgctacttttgatgctagtcggaccacttttacaagagaaggatcattccgtgtcacaacagccactgaacaagcagaaagagaggagatcatgaaacaaatgcaagatgccaagaaagtgccagaagtagaaggggaggcagagagcatcagctccctgtgctcacagatcaccaatgccttcagcacacctgaggaccccttctcatctgctccgatgaccaaaccagtgacagtggtggcaccacaatctcctaccttccaagctaatggcactgactcagccttccatgtgcttgctaagccagcccatactgctctagcacccgtagcaatgcctgtgcgtgaaaccaacccttgggcccatgcccctgatgctgctaacaaggaaattgcagccacatgttcggggaccgagtggggtcaatcttctggtgctgcctctccaggtctcttccaggccggtcatagacgtactccctctgaggccgaccgatggttagaagaggtgtctaagagcgtccgggctcagcagccccaggcctcagctgctcctctgcagccagttctccagcctcctccacccactgccatctcccagccagcatcacctttccaagggaatgcattcctcacctctcagcctgtgccagtgggtgtggtcccagccctgcaaccagcctttgtccctgcccagtcctatcctgtggccaatggaatgccctatccagcccctaatgtgcctgtggtgggcatcactccctcccagatggtggccaacgtatttggcactgcaggccaccctcaggctgcccatccccatcagtcacccagcctggtcaggcagcagacattccctcactacgaggcaagcagtgctaccaccagtcccttctttaagcctcctgctcagcacctcaacggttctgcagctttcaatggtgtagatgatggcaggttggcctcagcagacaggcatacagaggttcctacaggcacctgcccagtggatccttttgaagcccagtgggctgcattagaaaataagtccaagcagcgtactaatccctcccctaccaaccctttctccagtgacttacagaagacgtttgaaattgaactttaa

SEQ ID NO: 156617 - DNA, 2310 bp, Homo sapiens
agggtgcttcagtgtggctgacacagcagcatggtcttgacaagttttcttcatcctaccacaaaatcccagttggtaatagagactttactcctacctatcaaaaccacaaaatgtcccattagggggggacatgttgtacatgttaggatcattcaaataaccaagattataaggtgaggaaagatgcccctaactgattcttttgtctctcatcttgttggttccagggaccgagtggggtcaatcttctggtgctgcctctccaggtctcttccaggccggtcatagacgtactccctctgaggccgaccgatggttagaagaggtgtctaagagcgtccgggctcagcagccccaggcctcagctgctcctctgcagccagttctccagcctcctccacccactgccatctcccagccagcatcacctttccaagggaatgcattcctcacctctcagcctgtgccagtgggtgtggtcccagccctgcaaccagcctttgtccctgcccagtcctatcctgtggccaatggaatgccctatccagcccctaatgtgcctgtggtgggcatcactccctcccagatggtggccaacgtwtttggcactgcaggccaccctcaggctgcccatccccatcagtcacccagcctggtcaggcagcagacattccctcactacgaggcaagcagtgctaccaccagtcccttctttaagcctcctgctcagcacctcaacggttctgcagctttcaatggtgtagatgatggcaggttggcctcagcagacaggcatacagaggttcctacaggcacctgcccagtggatccttttgaagcccagtgggctgcattagaaaataagtccaagcagcgtactaatccctcccctaccaacgcctttctccatgtgacttacagaagacgtttgaaattgaactttaagcaatcattatggctatgtatcttgtccataccagacagggagcagggggtagcggtcaaaggagcaaaacagactttgtgtcctgattagtactcttttcactaatcccaaaggtcccaagggaacaagtccaggcccagagtactgtgaggggtgattttgaaagacatgggaaaaagcattcctagagaaaagctgccttgcaattaggctaaagaagtcaaggaaatgttgctttctgtactccctcttcccttacccccttacaaatctctggcaacagagaggcaaagtatctgaacaagaatctatattccaagcacatttactgaaatgtaaaacacaacaggaagcaaagcaatgtccctttgtttttcaggccattcacctgcctcctgtcagtagtggcctgtattagagatcaagaagagtggtttgtgctcaggctgggaacagagaggcacgctatgctgccagaattcccaggagggcatatcagcaactgcccagcagagctatattttgggggagaagttgagcttccattttgagtaacagaataaatattatatatatcaaaagccaaaatctttatttttatgcatttagaatattttaaatagttctcagatattaagaagttgtatgagttgtaagtaatcttgccaaaggtaaaggggctagttgtaagaaattgtacatragattgatttatcattgatgcctactgaaataaaaagaggaaaggctggaagcatgcagacaggatccctagcttgttttctgtcagtcattcattgtaagtagcacattgcaacaacaatcatgcttatgaccaatacagtcactaggttgtagttttttttaaataaaggaaaagcagtattgtcctggttttaaacctatgatggaattctaatgtcattattttaatggaatcaatcgaaatatgctctatagagaatatatcttttatatattgctgcagtttccttatgttaatcctttaacactaaggtaacatgacataatcataccatagaagggaacacaggttaccatattggtttgtaatatgggtcttggtgggttttgttttatcctttaaattttgttcccatgagttttgtggggatggggattctggttttattagctttgtgtgtgtcctcttcccccaaacccccttttggtgagaacatccccttgacagttgcagcctcttgacctcggataacaataagagagctcatctcatttttacttttgaacgttggcgcttacaatcaaatgtaagttatatatatttgtactgatgaaaatttataatctgctttaacaaaaataaatgttcatggtag

SEQ ID NO: 156618 - DNA, 2238 bp, Homo sapiens
  misc_feature (1)...(2238): n = a,t,c or g
tttcgtgaggtggtggcgcttggtggccactggcggccgatgtagatgcagtggcgcttgagttggtcgggggcagcggcagatttgaggcttaagcaacttcttccggggaagagtgccagtgcagccactgttacaattcaagatcttgatctatatccatagattggaatattggtgggccagcaatcctcagacgcctcacttatgnnnnnnnnnnnnnnnnnnnnnnnnnnnnnnnnnnnnnnnnnnnnnnnnnnnnnnnnnnnnnnnnnnnnnnnnnnnnnnnnnnnnnnnnnnntgtaaaaattaaaatgaacaaattacggcaaagttttaggagaaagaaggatgtttatgttccagaggccagtcgtccacatcagtggcagacagatgaagaaggcgttcgcaccggaaaatgtagcttcccggttaagtaccttggccatgtagaagttgatgaatcaagaggaatgcacatctgtgaagatgctgtaaaaagattgaaagctactggaaagaaagcagttaaagcagttctgtgggtctcagcagatggactcagagttgtggatgaaaaaactaaggacctcatagttgaccagacgatagagaaagtttctttctgtgccccagacaggaactttgatagagccttttcttacatatgccgtgatggcaccactcgtcgctggatctgtcactgcttcatggctgtcaaggacacaggtgaaaggttgagccatgcagtaggctgtgcttttgcagcctgtttagagcgcaagcagaagcgggagaaggaatgtggagtgactgctacttttgatgctagtcggaccacttttacaagagaaggatcattccgtgtcacaacagccactgaacaagcagaaagagaggagatcatgaaacaaatgcaagatgccaagaaagctgaaacagataagatagtcgttggttcatcagttgcccctggcaacactgccccatccccatcctctcccacctctcctacttctgatgccacgacctctctggagatgaacaatcctcatgccatcccacgccggcatgctccaattgaacagcttgctcgccaaggctctttccgaggttttcctgctcttagccagaagatgtcaccctttaaacgccaactatccctacgcatcaatgagttgccttccactatgcagaggaagactgatttccccattaaaaatgcagtgccagaagtagaaggggaggcagagagcatcagctccctgtgctcacagatcaccaatgccttcagcacacctgaggaccccttctcatctgctccgatgaccaaaccagtgacagtggtggcaccacaatctcctaccttccaagctaatggcactgactcagccttccatgtgcttgctaagccagcccatactgctctagcacccgtagcaatgcctgtgcgtgaaaccaacccttgggcccatgcccctgatgctgctaacaaggaaattgcagccacatgttcggggaccgagtggggtcaatcttctggtgctgcctctccaggtctcttccaggccggtcatagacgtactccctctgaggccgaccgatggttagaagaggtgtctaagagcgtccgggctcagcagccccaggcctcagctgctcctctgcagccagttctccagcctcctccacccactgccatctcccagccagcatcacctttccaagggaatgcattcctcacctctcagcctgtgccagtgggtgtggtcccagccctgcaaccagcctttgtccctgcccagtcctatcctgtgggccaatggaatgccctatccagcccctaatgtgcctgtggtgggcatcactccctcccagatggtggccaacgtatttggcactgcaggccaccctcaggctgcccatccccatcagtcacccagcctggtcaggcagcagacattccctcactacgaggcaagcagtgctaccaccagtcccttctttaagcctcctgctcagcacctcaacggttctgcagctttcaatggtgtagatgatggcaggttggcctcagcagacaggcatacagaggttcctacaggcacctgcccagtggatccttttgaagcccagtgggctgcattagaaaataagtccaagcagcgtactaatccctcccctaccaaccctttctccagtgacttacagaagacgtttgaaattgaactttaa

SEQ ID NO: 156619 - DNA, 2729 bp, Homo sapiens
ttttattatatataacagttatatattacataacatatgctggccctgaattgaacatattctctaatttgatttttgaatatttaaaaatatacacatatatttgtttttttttttaaagagatggaggagtttcaccatgttgcccaagctggcctcaaacccctggcctcaagtgagcctcccacctcagcctcccaagtagctgccaccatgcagtctctaatttaaattttaaacaaaccctagatgttattattatcttagagtaggctgcttctaaaatagctcccaatgatcctcttgctggtctttacatccttgtgtaatctccttgagtgtgggctggacctaatgacttacttctaactcacaggatgtggcaacagtgatgggatgtcacatctgtgattggattaccaaagactgtgcccttctgttttgctattactgtctctggtgagtcctctctctttgctcttgcttgcttgcactgatgaagtaagctgccacgttgtgagatgctcaacgaataggcccatgaggcagggcaccgagggaggcttctggccaacagctcctggggaaccaaggccttaggaagtgagtcctgccaacaataacgagagccttgaactttgaaaccacagtaccttgttccagcgtggaaagcagcgtggcacttcccggtggtgaaagcaccccagcttgaaagggtgaaaacaccttctcccagatagtctccctttgtttagccagtgcttttgccttaaggaaatcaaatgaagatttgaggcttaagcaacttcttccggggaagagtgccagtgcagccactgttacaattcaagatcttgatctatatccatagattggaatattggtgggccagcaatcctcagacgcctcacttaggacaagctgtaaaaattaaaatgaacaaattacggcaaagttttaggagaaagaaggatgtttatgttccagaggccagtcgtccacatcagtggcagacagatgaagaatgcgctcgcaccggaaaatgtagcttcccggctaacgaccttggccatgctgaattttttgaatcaagaggaatgcacatctgtgaagatgctgtaaaaagattgaaagctactggaaagaaagcagttaaagcagttctgtgggtctcagcagatggactcagagttgtggatgaaaaaactaaggacctcatagttgaccagacgatagagaaagtttctttctgtgccccagacaggaactttgatagagtccttttcttactatatgccgtgatggcaccactgcgtcgcatggattctgtcgcatgcttcatggctgtcaaggcacacaaggtgaaagagttgagcacatgcagtagatctgtgcttgttgcagccttgtttagacgcgcaagacagaagcgggagaaggaatgtggagtgactgctacttttgatgctagtcggaccacttttacaagagaaggatcattccgtgtcacaacagccactgaacaagcagaaagagaggagatcatgaaacaaatgcaagatgccaagaaagctgaaacagataagatagtcgttggttcatcagttgcccctggcaacactgccccatccccatcctctcccacctctcctacttctgatgccacgacctctctggagatgaacaatcctcatgccatcccacgccggcatgctccaattgaacagcttgctcgccaaggctctttccgaggttttcctgctcttagccagaagatgtcaccctttaaacgccaactatccctacgcatcaatgagttgccttccactatgcagaggaagactgatttccccattaaaaatgcagtgccagaagtagaaggggaggcagagagcatcagctccctgtgctcacagatcaccaatgccttcagcacacctgaggaccccttctcatctgctccgatgaccaaaccagtgacagtggtggcaccacaatctcctaccttccaagggaccgagtggggtcaatcttctggtgctgcctctccaggtctcttccaggccggtcatagacgtactccctctgaggccgaccgatggttagaagaggtgtctaagagcgtccgggctcagcagccccaggcctcagctgctcctctgcagccagttctccagcctcctccacccactgccatctcccagccagcatcacctttccaagggaatgcattcctcacctctcagcctgtgccagtgggtgtggtcccagccctgcaaccagcctttgtccctgcccagtcctatcctgtggccaatggaatgccctatccagcccctaatgtgcctgtggtgggcatcactccctcccagatggtggccaacgtatttggcactgcaggccaccctcaggctgcccatccccatcagtcacccagcctggtcaggcagcagacattccctcactacgaggcaagcagtgctaccaccagtcccttctttaagcctcctgctcagcacctcaacggttctgcagctttcaatggtgtagatgatggcaggttggcctcagcagacaggcatacagaggttcctacaggcacctgcccagtggatccttttgaagcccagtgggctgcattagaaaataagtccaagcagcgtactaatccctcccctaccaaccctttctccagtgacttacagaagacgtttgaaattgaactttaa

SEQ ID NO: 156620 - DNA, 1826 bp, Homo sapiens
  misc_feature (1)...(1826): n = a,t,c or g
atgaacaaattacggcaaagttttaggagaaagaaggatgtttatgttccagaggccagtcgtccacatcagtggcagacagatgaagaaagcgttcgcaccggaaaatgtagcttcccggttaagtaccttggccatgtagaagttgatgaatcaagaggaatgcacatctgtgaagatgctgtaaaaagattgaaagctcaaaggaagttcttcaaaggcttctttggaaaaactggaaagaaagcagttaaagcagttctgtgggtctcagcagatggactcagagttgtggatgaaaaaactaaggacctcatagttgaccagacgatagagaaagtttctttctgtgccccagacaggaactttgatagagccttttcttacatatgccgtgatggcaccactcgtcgctggatctgtcactgcttcatggctgtcaaggacacaggtgaaaggttgagccatgcagtgggctgtgcttttgcagcctgtttagagcgcaagcagaaacgggagaaagaatgtggagtgactgctacttttgatgctagtcggaccacttttacaagagaaagatcattccgtgtcacaacagccactgaacaagcagaaagagaggagatcatgaaacaaatgcaagatgccaagaaagctgaaacagataagatagtcgttggttcatcagttgcccctggcaacactgccccatccccatcctctcccacctctcctacttctgatgccacgacctctctggagatgaacaatcctcatgccatcccacgccggcatgctccaattgaacagcttgctcgccaaggctctttccgaggttttcctgctcttagccagaagatgtcaccctttaaacgccaactatcccctacgcatcaatgagttgcccttcccactatgcagaggaagactgatttccccattaaaaatgcagtgccagaagtagaaggggaggcagagagcatcagctccctgtgctcacagatcacaaatgccctcagccccacctgaggacccctttttcatctgctccgatgaccaaaccagtgacaggtgntggcaccacaatctcctaccttccaagggaacgaagtggggtcattcttctgggtgctgcctctccaggtctcttccaggccggtcatagacgtactccctctgaggccgaccgatggttacgaagaggtgtctaagagcgtccgggctcagcagccccaggccccagctgctcctctgcagccagttctccagcctcctccacccactgccatctcccagccagcatcacctatccaagggaatgcattcctcacctctcagcctgtgccagtgggtgtggtcccagcacacatgcaaccagcctttgtcccctgcccagtcctatcctgtggccaatggaatgccctatccagcccctaatgtgcctgtggtgggcatcactccctcccagatggtggccaacgtatttggcactgcaggccaccctcaggctgcccatccccatcagtcacccagcctggtcaggcagcagacattccctcactacgaggcaagcagtgctaccaccagtcccttctttaagcctcctgctcagcacctcaacggttctgcagctttcaatggtgtagatgatggcaggttggcctcagcagacaggcatacagaggttcctacaggcacctgcccagtggtttccttttgaagcccagtgggctgcattagaaaataagtccaagcagcgtactaatccctcccctaccaaccctttctccagtgacttacagaagacgtttgaaattgaactttaa

SEQ ID NO: 156621 - DNA, 386 bp, Homo sapiens
  misc_feature (1)...(386): n = a,t,c or g
gggacaactatgatgtctcaatgtaggttcctcattttaacaaaggtactaccatggttgggggaggtgttgaaaagggcgaaggatacatatatatgtgcattagggtatataggaaatctatgtacttcttaattctgctgtgaagttaaaactgccttaactaatgaagtatatttattctaaaaaggaatctaaccatctaaaaatgtttttaataacaaaaattaaatcaatattaaaagccctatcgccatttgtaataagaactctccctaatnnnnnnnnnnnnnnnnnnnnnnnnnnnnnnnnnnnnnnnnnnnnnnnnnnnnnnnnnnnnnnnnnnnnnnnnnnnnnnnnnnnnnnnnnnggcttataccagaaag

SEQ ID NO: 156622 - DNA, 391 bp, Homo sapiens
cagtgttccggtttattatctgagggacaaacattcagactagaggaggagtgttctgaaatcctgtgtgaggtacaatcattcagaccgcagcagcagtgttctggaatcatatgtggggggcaatcattcagacgacagctggggtgttctagaatcctatgtgtgggacaggcattcagaccctcgtagcattgttctggaatccagagatttattcattgtttgctgatcgtgaaaatgcacagagcactctggaagcatagcttgggataacagtcgaatggagtgggttaaggagagaactgatgtggcttggtcctagattctcctgcccaaaatgttctacacaatagctggaaaagactgcagggacaaagacccgaacccc

SEQ ID NO: 156623 - DNA, 1356 bp, Homo sapiens
tttttttttttttttttaacaggggatttatagcagctttattcaaaataactaaaatttggaagcaaccaagatgcccctcagtaagtgaatgggataaactatggtacacacaatagaacataattcagcactaaaaagaaatgggctatcttgtcctcaaaagatgaggaaacttaaaagcatattactaagtaaaagaaggcagtctgaaaaggctacttactatataactgcaactatgtaacatgcgaaatgatggagatggtttgcagggttaaggggatgatatgtaataaacaggaagagcagggatgacttttagaacaaagtgttctgtgaggtactataaggctgggatacatgtccattatacatttactccaaacccataagcatgtaaaaccacaagagttaacccctaatggtaaacctatgggcccttgggaccacctatggatgtctcaatgtaggttcctcatttttaacaaaggtactaccatggttgggggaggtgttgaaaagggcgaaggatacatatatatgtgcattagggtatataggaaatctatgtacttcttaattctgctgtgaagttaaaactgccttaactaatgaagtatatttattctaaaaaggaatctaaccatctaaaaatgtttttaataacaaaaattaaatcaatattaaaaaccacttcgccatttgtaataagaactctcactaataatgaatgcataaagaaaatgtggtctatacatgcaatgaattattactcagccttaaaaaggaagaaaatcttgccatttgcagaaacatgcacataccagaaagatattgtgctaagaaataagccaaacaggaacaaagtattacataatcccatctgcaataagtctggatgtatgtattcccctctaattcctatgttgaaatcttatcaccaagggtgatagtattagaggttaagggcctcagggaagtgatgaggtgagggctcttccctctcgaatggactgggagtatattcattctctgccactcttttgtcttccaccatgtaaggatgcaggaagaagtctctcatcaggtaccagatgacagtgccttgatcctggacttcccagcttccagaacagagatttattcattgtttgctgatcgtgaaaatgcacagagcactctggaagcatagctgtgataacagtcgaatggagtgggttaaggagagaactgatgtggcttggtcctagattctcctgcccaaaatgttctacacaatagctggaaaagactgcagggacaaagacccgaaccccagagcttccagaacagcctcttattgcagcaggagcc

SEQ ID NO: 156624 - DNA, 1236 bp, Homo sapiens
cgagtccctgtcggtgtcctttgagcacggtgctgccgccatccgcccccaccagtgaggctgggctgagcctcccgctgcgtggcccccgggcgcggcgctcggcttccccacacgatgtggacctgtgcctggtgtcaccctgtgaatttgagcatcgcaaggcggtgccaatggcaccggcacctgcgtcccccggcagctcgaatgacagcagtgcccggtcacaggaacgggcaggtgggctgggggccgaggagacgccacccacatcggtcagcgagtccctgcccaccctgtctgactcggatcccgttgcccctggcccccggtgcggcagactcagacgaagacacagagggctttggagtccctcgccacgaccctttgcctgaccccctcaaggtccccccaccactgcctgacccatccagcatctgcatggtggaccccgagatgctgccccccaagacagcacggcaaacggagaacgtcagccgcacccggaagcccctggcccgccccaactcacgcgctgccgcccccaaagccactccagtggctgctgccaaaaccaaggggcttgctggtggggaccgtgccagccgaccactcagtgcccggagtgagcccagtgagaagggaggccgggcacccctgtccagaaagtcctcaacccccaagactgccactcgaggcccgtcggggtcagccagcagccggcccggggtgtcagccaccccacccaaggtccccggtctacctggacctggcctaccctgcacagcgggagcagcgcccacctggtggatgaggagttcttccagcgcgtgcgcgcgctctgctacgtcatcagtggccaggaccagcgcaaggaggaaggcatgcgggccggtcctgacgcggctactgggcagcaaagcagcatttgggaccgtgacctgcaggtgcgtgtcaccccagggcctctggtggtgaccctgatccccactttcgactcggtggccatgcatacgtggtacgcagagacgcacgcccggcaccaggcgctgggcatcacggtgttgggcagcaacagcatggtgtccatgcaggatgacgccttcccggcctgcaaggtggagttctagccccatcgccgacacgccccccactcagcccagcccgcctgtccctagattcagccacatcagaaataaactgtgactacacttggcaaaaaaaaaaaaaaaaaaa

SEQ ID NO: 156625 - DNA, 1015 bp, Homo sapiens
ggactagccggggttgtatttggaaacgcggagtgacgtttttccgtgctgtgtaggggctaacaatggacacccagaaggacgttcaacctccaaaagcagcaaccaatgataatatatctgtggagagtgtcaccaccggaaaatgaaataaaatctaggggatccaatccagatgcagagaatgtggataccagaataatgtacaagaaaaggactaaaagattgggtcggtttttgatggctcgatggaatgctggggaattccagagggaatggccttcaccttataccttgggatttggctctcttccccatttctggattgtttgttatagcttttcgatttttgctttacagtaagttccccctttatctttcgggggagatacattcccaagggccccccagtggaactcctggaaaccttcaaacagtacccaaacctttgttacactggttttttccatatatatatacctatggataaagtataatggtataaattaagcatagcaagagattaataataatggtaatagaccaatgataacatacctataataaaagttagcgtgaatgtggttggtctcctcttgcttttcaaaatatcttcttgtacagtactccacctattttagaatgtggttgacctaccgggtaaccccaaaacccacagaaaggggaaacctttggatgaggggggcacctactgtaccttaggaatacaacctatatacatatgattttatttttaagacccatattatatttgggtatcctacctaatattttgtataaagcaatttttttgttcccattacggtgactttttgttttattgtatatgtaatttaacacacaataaagggtaaagttgcttccccaaaccacacttttaatcaaaacctaggaatcatctgcagtccttgttaaaaatgcaggtttctaggaaccctctggaagttctgattaaataaaaatattccaaaccacaaaaaaaaaaaaaaaaaaa

SEQ ID NO: 156626 - DNA, 4006 bp, Homo sapiens
  misc_feature (1)...(4006): n = a,t,c or g
ggacaaaactatgctactttagaaacgcagtctgtttttcaccaattgacatactactgatctgaagtaaccagtgccatcataagaaattactgcattaagaaaatccttgctgtgccctttgaaaagctgttcagaaatcatttacagtgatctttcatctcggtcgctgtagtgaaacattttagtgtgataaatttcaaaattctaaacaaattacccacttttatattggaaatctctaccagaactccctcttcattttttaaggcatacatttgcttgttttcaagatcaagaattctgagctagctttaagtagcaaactgatttatatgtgcaattataggatgcattaagatgaatgatagcctttacatattgaaaactttgcagacgttttgttttgaaaatggcattgtatagtaaatgcaaattaattttgtaaaattatgttaaagagtatgttcagacactttctgccatggccaaaaagtatgtatgaaagtatgtgtgtatttgtttgtaaaaggatgccaatgttttacctgatatcttagtgacacttcagttatctatgcattctttagatctgtgattcggtaaacaggcagccatgttcacgatgccttctatgtcttaccatatttttaattaacctgttaaatacagcttaaaatatttttattttatttattctatttttactgaaatatactgcattattgtgttaatgtattatctttcctggatattatctcccagtgtatccagatctaagtaatctcagtgaactatacattgcctaaaaagtggttttgtaatgatttgtagtcacatttctattgggatatgtagaagaaaaggcaaaatgcttaaagttccttttattttttaaaagcagctagatagacacagacttgccacctcatacatctgctccttggcaacatcaaggggaacgactagccaacatgcctatggctaaaaactttcctttgcagactaaagcactgcttggtgcttcgtttttctacccttcacaacatgtgtgatttcatctaagagatatatacatgtacacatgccctttgtttccacctggatacaagatcactcatagctaattaggaccattgttttttgttcatctgtcttgttgcatgaagggacattagacccatttccattaaaataagttcttggtgataaactgtggcactgctacttctttttaaatccactttatgaatttcaagatgggacacttgttaagatgaactcgaacacaaggccattgccctggaagcccccagagctttccctctgtttgtaatggcccgttccatgtccccaggcattgcaacacaaactcctcaagatttcaccacaacatgacaagcattttcctaactgatattagcacaattttaactaataagccccttcgctctctagttggccaggcttaacctaatacacatctaacgtgtgtgccacacggccagtagaaagtttaacttcagcttcagggcaaagatacccactcacaccgtgtcaacgcaagcagtagttcctggcctccagagcagcttacttcccctgaaagaacgctttgttttcctttatgcccttttccctgttgaccacttttacacatttaaatgtaatttgttgtgagaataaatttagctgcataaaacgttcggctcatttatctgacatcttagtcacatatacaaggaatagaaatagaaactcggtgtctctagttatttttaaattattcttacctcagacttcttagaaatcactttagtaatggagcattttgctttgattagttactacatatttctgcctggtaagaactaggaagtaacttcaaattttgagtaatcaccctgtacttatttggtgatcancgaaggccagctggccttccggacatagaagcctatttagtcaccaactcgagtcttttgtaagcggtcttgctaggattgtgatattttagcacgaagaagtttatcacttcctttaagaacctgacatcaaagaataaagaatagaggtgtacacacactaaatccaaaatgaaaggtaactagagaaatcagttgaatctggtttagcttaactgttaggcgcaggaaggcagataaacagaatttaaagtatgtccccgctttttgttcatcttgcacttccacagtggtttctctctagtcagtaacaaaatttcattatggtttcaggcattatatggtggtaaataatttcagattaaaaatgtgtttgctattggagtatctgaatactagtaatttcattatttagaattttgcagcacttttatctcaagaagaagtccaagaatgtaaaatgccaaatgaaacatgtcagtggaatcaatattctccttcattagaattccctcatattgctttttttttttttcttcagacagaggagtcttactctggagtgcagtggtgtaatttcagctcaccacaacctccacctcccaagttcaagcaattctcgcctcagcctcctgagtagctgggattacaggcatgcaccgccacgcctggccaatttgtatatttttagtagagacagggtttcgccacgttggccaggctggtctcgaactcctgacctcaggtgatccgcccgccccaacctcccaaagtatgtgagccaccacgtccggcctcatattgcttttatccaaaattcttttcccttttcactctaccaaagtatttaaataatcctgtccttcatagaagattctcaaagaagaaaactgcagtgtaattaatgaatggtttaattcagaatcttcatatacttctaaagagaaaaataatttagtgccaaatgcatgttaggagataatcaatgtaagtggcaacaaattgtgacttcacatgctactgtagagatcagaaaattatcctaaactattccataacaatgagacaacatcacagaaaatacacttgaaaataaaaatctcaagaccagctacttctggacaatggaatacttttcagtctggtatggtggagggcccgaaaaggataagggattcttatgatacacaatgggattctttactgaacaatatgttaaattaagctgcaccgccttccttgaggcatggactaccctaaccaaccagatagaaatctgggtgggataagaggatgagccacacgctataattttagggcaaggagatagtgtttgattttcaaaatcagcaaaataagctgagcactttatatctttctgtacaagagtgataacatgaagaattcttcttcagggatttaaaatacaataagcctggttcaactataaaaagtcttgtttcctttcttcattgacacttttttttttttttttttttgaggcaaggtctcactctgcttcccaggctggagtgcagtggggcaatattggctcactgcaacctgcacctcctggactcaagagatcctcgtacctcagcctcctaagtagctgggactacaggcgtgtcccaccacacccagctaatttttgtattttttgtagagatggggttttggggtttcgccatgttgtccaggctcgtctggaactccggtgctcaagtggcgtgcccacctcagcctcccaaactgctgagattacagatgtggagccactgcacccagcccacttgacacgttttactgataaatgtaaatctaagctaaaataaaaataatgtattaccgctataatacaattcaccattctcttttctcacttcaagtaagaaagtaaaaatagaatatcagagctgaagtagacctaagtattcatcttgaagaagataatattctaaaaatcatgccacctgaattgagcatttaggaatttatgtaacatttctatacaactgaattgcaaaaataaaactttaaattcaaactttaaaaaaaaaaaaaaaaaaaaaaaaaaaaaa

SEQ ID NO: 156627 - DNA, 1050 bp, Homo sapiens
  misc_feature (1)...(1050): n = a,t,c or g
aaataccgccaggacctgactgtgcctccaggctactgcacaggtgagcaaggggcaggcggcaggcccggggagacggagccctggctaaggccgccggccctgctcccctccagacttcctgctgtgcgccagcagctctggtgctgtgcttcccgtgaggacccaggaccccttcctgccatacccaccaagggcctgcccacagggccaggctgcctctagcgccactacttcgagaccctgcccagaggtaaaggaggcagggtgggggagccctggccaccttgcccgccatgccctgagccacgtccctccccctgcaagggtggtgctggtgttgcgggaacgctggcatttctgcggggacggccgggtgctgctgggctcgagggccctgagggagcggcacctaggcctgatgggctaccagctcctgccggtgagtggccctggcctggcccgtggcgcatcctcactcccagcctgcgggtaacctgccgccctctcctctccccacagctacccttcgaggaactggagtcccagagagggcctgcccccagctcaagagctacctgaggcagaagctccaggccctgggcctgcgctgggggcctgaagggggctgaggggatgatgtggggttcaggatggccccccccatggggggtggatgatttgcactttggttcccctgtgttttgatttctcattgaaagttcctttccttcccnnnnnnnnnnnnnnnnnnnnnngggcggccgttttaaaggacccctgggggggcccaagtttacccgggcaggcaaagacatacctttctccctatagggagcggttttttaagctacctgggaatcttgggaaaggacccttactttgggggggggacatattgggccaacctccctccagaattttaaggctttaaggaaaatttaaattttttaagggtataaggggttaaacaacctgcttatgctcgtggctggaaagtttggctccctgggtatcttttataaaaatttcatccccggagactggggc

SEQ ID NO: 156628 - DNA, 476 bp, Homo sapiens
tgaggtacgagtgtatgacctgacacaatatgagcactgcccagatgatgtgctagtcctgggaacagatggcctgtgggatgtcactactgactgtgaggtagctgccactgtggacagggtgctgtcggcctatgagcctaatgaccacagcaggtatacagctctggcccaagctctggtcctgggggcccggggtacccccccgagaccgtggctggcgtctccccaacaacaagctgggttccggggatgacatctctgtcttcgtcaatccccctgggagggccaggcagttactcctgaggggctgaacaccatccctcccactagcctctccatacttactcctctcacagcccaaattctgaagttgtctccctgacccttctttagtggcaacttaactgaagaagggatgtccgctatatccaaaattacagctattggcaaataaacgagatggataaaggaaa

SEQ ID NO: 156629 - DNA, 531 bp, Homo sapiens
ttacaaattggttgatgcattaaccacgtacatgacgttccacatgagcaccagcaataagcaagttgggtagattttgttgtaagaggagtacatgctgcctgggcgtctgtgaagacaaccatgtgcgggggaatggcctttgttggttgcttgaacacagttgttggttcccatgtcactaacgtatttcccacccgggttacccagtggccccacaataaacacataaaagatctccagtaatgaaaggtagcacgtgctaagttctgtatagtgaaagtggatgagagcctgcgaattcagggaaggtttgtgctggaagcatcgtctgagcagggcagagcaaggtggctgggtgagggatggatctgagcttctttgcttcaggatgccatgaaaggcactgatttctcctttctcattgcccctctcagtagtgccatccagccccaccatggcctcctccacaagcctcccctccaactgcagcagctcctcgggcatcttctccttctcaccagccaacat

SEQ ID NO: 156630 - DNA, 867 bp, Homo sapiens
atggcgggtgttcctgtggggagcacacagccaccaccctgtcagccacagaaaattcttaaggaaaggctcagctctcccaaaacggaaggagcgctcaacgaacccaccatcgattatggtttccagaggttacagaaggtcattcctcggcaccctggtgaccctgagcgtttgccaaagcttggtgaacctccttggagtatcagttcgtcatcaaatcctacccgtgtgctggctgcccttgtaggcagggccacctgtcagaactggccctgtctgggagaaatccacccctcaggccactacacagagccacttgatcgtgcaagggctggccggagcccaccccaggaagctctcagtgtgactcagagccgagtggctgtcctcttggctttgaatgttaaagtggagcgagagttcaagggcaggcatcattctccaagtacattccatggagcactagttctggaagatgctaatgagtgttaccaaaaagaagttggggtttctcattcagttatatttggaaaagactggatgacatacattaagcctttattatgtcaagcacacattgttatcctccagacaggtgactctctgtttcccacaccaatgggaaagacatggagctttctgtatcccgggttcttgccttggtgttctggaagaatcggatcacgtgtgggcttggagaatgagtgcaaggtttcattgagtggaagtagctctcagccaatgggagagccagaagggagatggtcttcccctgaagttggaccactcgccagccccggctctcccctgatagcctgggccaaactccgctttgtcccgcctgtcgatgacctgccagtgtga

SEQ ID NO: 156631 - DNA, 1273 bp, Homo sapiens
gtaactagtacatcgtaaccacattacgccagcttggcacgaggggaacaccaggcagattcatttatacagcgctcaacgaacccaccatcgattatggtttccagaggttacagaaggtcattcctcggcaccctggtgaccctgagcgtttgccaaaggaagtaatactcaaaagggctgcggatctggtagaagcactgtatgggatgccacacaacaaccaggaaatcattctgaagagagcggccgacattgccgaggccctgtacagtgttccccgcaaccacaaccaactcccggcccttgctaacacctcggtccacgcagggatgatgggcgtgaattcgttcagtggacaactggccgtgaatgtctccgaggcatcacaagccacgcgatcagggtttcacccgcaactcaagcagcgtatcaccacacgggtacgtgccgagcaccactccccagcagaccaactataactccgtcaccacgagcatgaacggatacggctctgccgcaatgtccaatttgggcggctcccccaccttcctcaacggctcagctgccaactccccctatgccatagtgccatccagccccaccatggcctcctccacaagcctcccctccaactgcagcagctcctcgggcatcttctccttctcaccagccaacatggtctcagccgtgaaacagaagagtgctttcgcaccagtcgtcagaccccagacctccccacctcccacctgcaccagcaccaacgggaacagcctgcaagcgatatctggcatgattgttcctcctatgtgaaagaattgccttgaagaattgtattaatgaagaggttggattctgctacagagagtaatctgatacaagtcccagagtggaacttttaactcaggcctttttaagaggaatcacaataactgcagatttttaaacaaacaaaatcaccgaccttgcaaatactgaaattggaagagggatctgcaagtgcagggtgttggttaaagttgtacctcccaaggtatttggggggatatatttattctgtattgacaaaagcaaatccactttttctttttctttttttttttttaagcttaattctgcaatcatttgtcttttataacccgtaaagctctatacaagggacactataaataagactccatgttttaatttatgatgtttttaaagctgtgtaaaggaagaatgaagtggtgatatttacaaaaaagtaaaaaaaaaaaaaaagaaaaaaagt

SEQ ID NO: 156632 - DNA, 1907 bp, Homo sapiens
  misc_feature (1)...(1907): n = a,t,c or g
cccttncattnncccannnnttncaaannnatanccntttggccccttccccnagttttttaccccnnggccttccctnaaaangggncttccagnaanccnnnttaacccancnccatttggnttaaangncccncntgcccttggttggaaaanngattttttctggcntanacaagctttttntaggcncccattaagggggggacccntnnggncnagttattcnccacagaaccntttcttgnatnaaaggaaaatggccccaattttnctttcccggaatttggttgccnacttggagggccattgccataatctcagctcactccaaatctctgcctccctgggtttcaagcgattttccctgcctcacctccccaagcagctggggattncaggaacacaccaccatgcccagctaatttttgtggtttttagtagaaaatgggtttcaccatgttggccaggctggtcttaaactcctgacctcaagtcatccgccctctatggcctcccaaagtgctgggattacaggcatgagccaccaggcctggccgacatttccagtcttgattaattttaattcattaaaaatgtgtcgcatgtgcccaatggctacccatcttggacagtgtccgtctagagaatacaaaatccattcttgcagttgtgctgagctggagggccaagcccatcacgaaccagacgtgggagtgactatctcgataagaaagtgcccagtgcccaatgccctgtggtggaaagagctggtcccaggtgctcaaggccatgggccccatttggagccagaaggtctagggtgaagtcagagaagacgtcccctgcccatatcccatttccagccttgctgaaaagggcaacagaggcctctccctgaggtccctagcctgcgagacccccattctctgcctgacctctgtgttactccttagtgaacaagaaacccagagagaagagaagcccaagaccaatgtgccgaccttggcttccaggagaacagagccttggtcctaaccatctagcagggtggctgagggccctgccatgaaagaggcacaccaggatgaagcaagaggaggtgtttaatgagttctggttcaacacagaggccgccaacggggtctagctatgagtctgtcctgggacccgttcccaccaggccccttgtgggcagtggccaccatccctccctcaggctgtcctggccctcaaggaccccatggcagggccttttccaccatggcctccactgtgctgccatctcttgggaacagggggtcatcccatcctcccaagaaacacttcctcaggcctggccccgatgggctcaggcacacctggcggacatcagaaatggggccctggagtccagaccacaggccagtagttttggggggacagctcctccacctccttccaccggcctatctggggggctctgggtgcccaggggagccgggcacctgaaagggacaaaaagcacagctgaggctcagcctcttgcgctcactggtcaagtggcaaattttggaaaagccagacctcagaggatccttaccagtacgtgggtgagtacgtgggcccagcacagggacaggggcggggacagaaaggtcccttcgctgtcatggggctgtcacggggctgagcctggctcgaggaagcccccttttccagaagagatgtgaaacaagacatacaatttcacagattccagagctctgggtacggccggccaatgctgctccccacccaaccccacccctgggactcttaaaagagggaaacagaacaactgcctagccagacccaggggcccatgaccaagaagaaagcaagccccatgaatgggtccaggccggacgcgtgggcggacgcgtggg

SEQ ID NO: 156633 - DNA, 7641 bp, Homo sapiens
gcctccaggattcagcaccatggcggaagacatggagaccaaaatcaagaactacaagaccgccccttttgacagccgcttccccaaccagaaccagactagaaactgctggcagaactacctgggtaagcaggacctttccctggccacatacctcgagtcactcaccgcttgcctcttcctaggggacccatccaccccagcctcctcccttttattctgaacatccttactctggaaggcccatgcctctcatcacctgctgttcaggtccaggctagggttacaaactttagttcctgcaatgattttttttttaatttaaattttttattattattatggtttggttttgtttttttccagagatggggtctcactttgtcacctaggctggagtgcagtggtgcaatcatagctcactgcagcctcaacctcctgggctcaagaggtccccctacctcagcctctcgagtagctgggaccacaggcccacactactgtacttggctaatttttttgtagagaagaggtctcagtttgttgcccaggctggtctcaaactcttggcttcatgcgctcttcctgcctcagcttctcaaagtgttgggattataggtgtgagccaccgtgcctggcccctacaatgatttttttttaagctgtatgtgtgtgcgtactgtaacatgtacagaaagcacataacaaacatgtacagctaaatgaataattctaaagtgaaccccttgtgcaaccataacctggagagaaaagcagacattgcccacactctcatctccctgccttcttttttttttttttgagatggagttttgctcttgttgcccaggctggagtgcaatggtgcaatcttggctcactgcaacctccgcctcccaggttcaagcaattctcctgcctcagtcccccaagtagctgggattacaggcacctgccaccacacccagctaattttttgtatttttagtagagacggggtttctccatgttggtcaggctggtctcaaactcctgacctcaggtgatccacccgcctcggcctcccaaaatgctgggattacaggcatgagccaccgcgcctggcctccccaccttctttatgtcctgtctggaacacagcaccccgctctccccagtagagaagtgacgccactaactgggggttatcacatctttgtttttggttttggtttttgtttttgagactgagttttttgttttcgttgcccaggctggagtgcaatgtcacgatctcggctcactgcaacctcttctgcctgctgggttcaagcaattctcctgtctcagcctcactagtagctgggattacaggcacccgccaccatgcccagctaattttttgtatttttttttttttttagtaaagacaaggtttcaccatgttgatcaggctgatcttgaactcctgacctcaggtgatccacccacctcagcctcccaaagtgctggaattacaggcgtgagccactgtgcccggcctcacatctttgttttttaccaccatgtttattattttattttattttatatatgttatgttgttatgttattgatggagtctgtttcttgttgcccaagttggagtgcaatggcacgatctcagctcattgcaacctctgcctcccgggttcaagtgattctcctgcctcagcctcctgagtagctgggaatacaggcgctcgccaccacacccagctaatttttttttttttttttttttgagacggagtctcgctttgtcgcccaggttggagtgcagtggtgcaatctcgactcactgcaacctccgcctcccagcttcaagcacttctctgcctcagcctgccgagtagctgggattacagtcgcctgccaccatgcctggctaattttttttttttgtatttttagtagagacagggttttaccatcttggccaggctggtcttaaactcctgacctcgtgatccacccccctcagcctcccaaagtgctgagattacaggtgtaagccaccatgcctggccaattttatttatttatttgagacagagtctcgctctgttgcccaggctggagtgcagtggtacaaccttggctcactgcaacctccgcctcccgggtttaagcaattctcctgcctcagcttcctgagtagctgggactacaggcgcgtgccaccatgcccggctaattttttgtgtttttagtagagacaggatttcaccatgttggccaggctggtctcgatctcctgacctcatgatctgcctgcctcggcctcccaaagtgctgagattacaggcgtgagccaccgtgcctggccaattttttgtattttttttttttttttgagatggagtctcgctctgtcgcccaggctggagtgcagtggcgtgatctcggctccctgcaagctccgcctcctgggttcacaccattctcctgcctcagcctcccgagtagctgggactacaggtgcccgccaccgcgcccagctaattttttgtatttttagtagagatggggtttcaccgtggtctctatctcctgacctcgtgatctgcctgcctcggcctcccaaagtgctgggattacaggcatgagccactaggtccagccacttttttgtatttttaatagagacagggcttcaccatgttgtccaggctggtctcgaactcctaccctcaagtgatccacctgccttagcttcccaaagtgctgggattacaggcctgagccaccatgcccggctaccaccgtgtttagattcacctctttgtgaactttatacatactgtgtgtattcttttgtgtttggattttttcattcagtaccttctcagatccatacatgctgtggcatatagcttgctcattttcattgctgtccagttttctacaatttattctatgcctgtacacttgtgtgatttccattttggagttcttacaaatggtgtggctgtaaacatctttataaatgtaattttgctgggtgcagtggctcacgcctgtaatcctagcactttgggaggccgaggtgggcagatcaagaccagcctggccaacatggcgaaaccctgtctctactaaaaatacaaaaattagctgggcatggtggcaggtgcctgtaatcccagctacttgagaggctgaggcaggagaatcacttgaacccaggaggaggtagaggttgcagtgagctgagatcgcaccactgcactccagcctgagtgacagattgagaccctacctcaaaaaaaaaaaaaaatgtgttccaactcttgatctgggctgacttgaacccctttcttcacagacttccaccgctgtcagaaggcaatgaccgctaaaggaggcgatatctctgtgtgcgaatggtaccagcgtgtgtaccagtccctctgccccacatcctgggtatgtgcctcctgccagggcccttgggatgctggggtggggtcttagcagaggggagtgtggtggcttggtgggagctcatctgtgaggggcagagggaggacagggcaccacactgtcccaggactcagtgcctttcctcccgcctagaattacctccctgtctccttctgctgatgcctctcaaccagtcagggctctcagctgaggcgaccagggtgctttgctagatgtagctcactcatgcactctccaaatacacactcagcactgggctcccatccctgtgtagctcacaattctgtgcagtcctgtccttttttattaggaacatttttttttctttttttttttctttttttttttttagacaagggtcttgctgtgttgccaggctggaaaggctggagtgcagtggcgcgatcttgcctcactgcaacctccgcctcctgggttcaagcgattcccctgcctcagccttccaagtagctgggactacaggtgtgcaccaccatgcccagctagttttttgtattttaatagaaacggggtttcaccatgttagccaggatagtctcaatctcctgacttcatggtccacctgcctcggcctcccagagtgctgggattacaggcgtgaaccaccgtgcccggccctattatgaacattttcaaagcagagataataattcattgacctcaaatacatccatcacccaaagtgaatagttatcaggatttatccacggtttcttcatctaccccttttcgttttcttctttcctttgctgaagtattctaaagcaagtcccagacacgtcatttcacccctgcctacttcagtgtggacttctaaataatgacacagtaagacagtcctttcagccctgatctgaccaaatctgtcgtcaatatttaatagctctttgctatgcccctgccctttgtttaaaaaaaaaaaaaagtttttaaagacaaggtctcatgatgttgcccaggctagactcgaactcctgggctcaagtgttcctcctgtctcagcctcctgagtagcttggactacaggcatgtgccactgtgcctgtctctctctctctctctctctctctctctctctttgtcgccctctcgctctctcttgctctctttctctctcgctctctctttctcactctttctctctttctttcctttctttcttttctttcttgagccttgctctgttgcccagactggagtgcagtagcatgatctcagctcactgcagcctcagcctcctgaatagctgggactacaggcatgagccaccacacctggcccaatttttgtattttttttgtagaaatggggtttcgccttgttgcccagactggtctcgaactcctgagctcaaagcagtctgcctgcctcagcctcccaaagcgctgggattataggcatgagctaccgcacccagctgaatctttcaaaataaaaaaaattaccctttaacttggcaattccacatctagggatgctacaaaaatcttcatgtacaaagatgcccattgcagagttgttcgtaatggagaatatttggaaataacccaagttaaaacattgatcttgatagtctttatggagactatggtgatctacatgctagcacacagaaagaatgctaagacacaggaaaagtaagttgcagaacaatctatatagtaggagtcaatttgcaaggatggagtttttatggtgtggtatgtgtatgtaaataaagtaggcacataccgctggcacttattatgggccagctatgttgttagacctttttttttttttttttttgagatggagtcttgctctgtctcccaggctggagtgcagtggtgcaatctcagctcactgcaacctccgccttccaggttcaggcgattcccctgcctcagcctcccgagtgtctgggattacaggcgcctgccaccatgcccagctgatttttgtatttttagtagagacagagtttcaccatgttggccaggctggtctcaaactcctgacctcaggtgatgcacctgcttcggcctcccaaagttctgggattaccggcgtgagccaccacgcccagccatgttagcactttacatcacataaggtcaacatgctaacacaaccgtatgaggtaggtactattgttagtatcctcattttacaaaattggaaactgaggcccagaaaggttgagtaacttgcccaaagtcacacagctaggaagtgatggagcagggattcagattcagcctctctgttatccatgctttcatccactgttcgttcttgcaccagtggtcctcaccctttttggcaccagggatgagcttcatggaagacagtttttccacagacagggttggggatggtgtaaggatgagtccagcatattacatttattgtccactttatttctgttattattacattatataataaaataattatacaactcaccatactatagaatcagtgggagccctgagcttgttttcctgcaactagatggtcccatctgggggtgatgggagatagtgacagatcatcaggcattagattctcataaggatcatgcagcctagatccctcacatgcgcagttcacaatagggttcgcactcctaagagaatctaatgctgccgctgatctgacaggaggtggaactcaggcagtaatgcgagcattagggagtgcttgtaaatatagttgaagcttgtctcgctcacctgccactcacttccagctgtggggcccagttcctaacaggccacagaccagtacctggtaggcactggttggggctcggggacccctgccttatagcataaaatgtgagcgtgtatgtatataaaaacgtttatgcttgtaactgcttgtgaggtccacaaagagtagagtgttactttcagggagtgttaacttgacataggccttatatgggccttttcattttttttttttttttttttttagagacagtcttgctctgtcaggctggagtgcggtgtgcagtggtagcatcatagctcactgcagcctcgaactcctgggttcaagcagttctcccacctcagcctccctagtagctgtgactacaggtgcatgccaccatgcctggctaagttttgtattttttgtagagacagggttttgccacattcaccaggctggtctcaaactcctgggctcaagcgatcctcccacctttgcctcccaaagtgctggaattataggcgtgagccaccatgcccggcttattttttattttttgtagagatgggggtcttgccgtgttgtccaggttggtctcaaactcctgagctcaagcagtcctcccacatcggccccgcaaagtgctgggatgacaggtgcgagtcaccacacccagcctccatcattgtttatactgagcatcgcctgtggtcagtggtgggattgcactgtgtattgtttggcaccttttttgcacttgactatgtatcttgaagatccatccattcatgccagaacataaatcagcctcgttttttttcacagctgcctgctattccatctcccctgtttggacaaacagcatagtgttgacttgaggttttcaaagcagggcccacccttggagctctgtacagtgacacatctccccatcgacagctctgcagtgggcctggggttttcctgcccattactctcctcccagcatgtcagcttgttcagaacagtgatttctgtcttttggggtcactgctgattccccggcctctagaatagaggttggcacacagcaggtacctgtggatattggttgaacaaacaggtgggcaaagtgaggaagataagaagtccatccgttcagtttccccactgcggagggaataacactgtctttccacaggtcacagactgggatgagcaacgggctgaaggcacgtttcccgggaagatctgaactggctgcatctccctttcctctgtcctccatccttctcccaggatggtgaagggggacctggtacccagtgatccccaccccaggatcctaaatcatgacttacctgctaataaaaactcattggaaaagtgagactatgcgtgtgaacgggccaggcagtggcaagaagctgggctggaatcagtgccctgaccagggaggggcttgaatgagta

SEQ ID NO: 156634 - DNA, 703 bp, Homo sapiens
ggccagactgggcaacatggtaagaccctgtctctacaaaaaatacacaaattagccacatgtggtggtgcacacctgtagttccagctactcaggaggctgaggcaagagaatttcttgagaatttcttgagcccatcaacaggttttgaatgttccagtcttttttttttttttttttttttttttttgagtcaggggtctcattctgtcacccaggctggggtgcagtggtgcgatcatggctcactgcagcctcaacctcctcgggcgcaagccatcctcccctctctgcctcctgagtagctgggacaaccatgcccggctaattttttttacaagaccactgttaaaagcccggaagaatcctgcagctcgctgtggtgggctgttttgcgtgtgctagagtctattcagcatttcagacagaaaagcctcagcattcctcttctgtgggtctccaccgtagctcctttgaaatctctgctttctcacactttcccatctgagtctttgtgccatggccgtcccctcctctccaatacgaagagcccacactcagtttccctccctcctcctccatcccacactgcccgagcacctcacctcccaatgactgactcgtccccggtcttgcacacacctggggagtgtagctggcctgtcctgcacaccagccttgcaggctcagtgagtagaccatc

SEQ ID NO: 156635 - DNA, 6998 bp, Homo sapiens
agtggccgcaatcttcggctcacatccaacctccacatcactgggttcacgccaattttcctgcctcagcctccctgagtagcgtgggacataacagcagcccgccaccgcgcccggctaattttttgtatttttagtagagcacggggtttcaccttgttagccaggatggtctcgatctcctgacctcatgatccacccgcctcggcctcacaaagtgctgggattacaggcgtgagccaccgcgcccggccaaattttttttttttttttttttttgagatggagtctcacactgtcacccaggctggagtgcagtgatgcaatcatggctcactgcaacctcaaactcctgggctcaaggaatcctcccacctcagcctcctgagtagtctaaagattacagcacacaccaacaggcctggctgatttcttatttttatttttatagagacagggtttcgccatgttgccaaggctggtctcaaactcctgacctcaagtgatccacccgcccctgcctcccaaagtgctgggattaaacgtgtgagacaccatgtctggccttctttctcttatgtaaacaaacatcttttctctagaggtctcagggcactgtcttacaaacttaagtaacagatgcagctgttttttaacttcttgtcgatcctaagccatgattttgttgctgtcccatcttgtcatgacccatttacgctcacccgagacttgtcactagtgatgctcagtgactcatttagaaggcttgcaggttcatttttagctttaagatgtgattcccgttttaatccaaggtgtgtcattaaatagctcttcatcttcatttttagaagagtcacaataggacaatttgattttgtctagagaatggggtagccattctaatctgagctattacgaaagtaattatgtgacatctgacagctacttcctcatgtgacactgaattagcctctgcttctgtttaagtgctttcttaaccgttatgactcaggctaagtcgatgaagtttttaaacatttctgtggcttctttttagagacaggatcattcagataattttttgtttgtttttaaagagatggagtctcgctctgtcactcaggctggagtgcagtgggaaatcatggctcattgcagcctcaaactcctgggctgggctctgacacagaatctttttttttttgagcacgggtctcactctgtcacccagggctggaggtgcagtggtgcaatcatggctcactgcaggcctcaaactcctaggctcaagtgatcctcccaccttagctccccaactagctgagactacaggcatgcaccatcatgcccggctaattttgtttttgaattttagtagagatgaggtcttgctatgatgcccagcctggtctcaaactcctgagctcaagcaatcatcccgtcttggcctcccaaagttctgggattacaggcatgcgccactgtgcccggctgggcagagaatcttaatttgatccattacactagactgtttgccccatttgtaatttttttttttttttgagacggagttttgctcttgttgcccaggctggagtacaatggcgtgatctcagctcactgcaacctctgcctctggggttcaggtgattctcctgtctcagcctcctgagtagctgggattacgggcacccgtcactacgctcggctaatttttggtatttttagtagagatgggggtttcaccatgttggacaggctggtcttgaactcctgacctcaggtgatcctaccacctcagcctctcaaagtgctgggattacaggcgtgagccactgtgcccggccaccccttggtaattgggaacatatgagttagaatggctgagatctagaagtgaggactagccacttttggaaatgttgacccgcatcaagaacacaccgattggtttagttgccacaactgggacagggaagccacgcaccattccttctgagccttgaatcaaaaaaatactaagcagaaagcagcattcaacattaagactgcccaatttctagtgctgatacttccttaacccagtatggaggtcacacgtctgagtatggtcatccgaggtcctgggagagagttttttgaatgtcccacttagaaaatgcacagagagggagttggggaggggggtgggctagggagatgggggttggttcacagtgatcaaacagaagtctcacaacccgtcatgtagcaaaacctagcaatattctgttggagcagatcctgggaagtgcttgatggctaccaccaatgagttgctatagataaagaaggaagacgctgttttcccaagatcagaaggtcacttaaatgctggggtccatctagaagaggaaaagtgctgttgggctgcccatccctggcaagctgttcatgtgccctctgtcctcatcctgtccacagggcagcgagagcctggggcatgtggctgaaaggagttggagccgctggctctgtcctttctcattttctctgacccaagagctccaaatgatctccttgctttgggatccaagtcagtaacagtccagcaccttggctttcttctgattcttgaaggctgatgtagccgggcagaaagatgagctttgctagagtcacacctgaagttctgattgctccaagcatctctttgtaggctgttgctgcttaagggaggttagtaataaatactaagggtagcaaaccaagtatagggttcttccctgatgggagcaattgcatctgatcttccgggtttgtcaattgcgtagaaagtggaacgatcttcctattcaagaggatgccaaggcagacgtctgcagaaaggagttgggaatcactcccacactccgtctctgggccaagggagacggcccgcttgacagagaccattcacggacagttcattccggcagggaagtagtgttgttgatctcaccagctccattcaagcatgtgatcaagtttttgagcctcgtcacgggaactgggctgtgtgaaccctcttgtccctctttctgttgtcttctcccttgtaaaggcggacagaggctttccgccgggattcagctttaggagggaaaggcactcactctccttctgctttttgaggaaagctgtcactcagcagctccgcctgaccctggagcatggactgggtgggccagcacttggtcagtgtggaggcggagatggagcaccgagaggcctgggcagcaccatcgctggagctaccacagttggggggccctggagactcagccccaggggtgtgccctttgggagagttggctatgtgagtgaaacttaaaaaaaaaaaacaaaaccaaaaaacccaaccaaccaccataagaagcagtggaaatccatggcactgcccaaagagggggagaatggctttggcattcacagccaggacactcctgccgtccttctgactgtgcagatctcagggtagtgtcctggtttggaatccatcagccctctgatgctcacaagtttgtgcaaatgatgaaactgaaaagactgagaagaaaacagaaaagaaaaggcataagatcttccctttccaagctgtcaacaaacaacaagcagctcctctattaaggatacccattgttgtgggggtcaaatagtcagcaggactggatgttggtcctctctgttgagtggccctgccccccaccacccctcttcgtacctaggcttgctcatgggcagcactggccagcctggatgctaactagggaggcgggaaaagaacagagatgaccatgggtccaaacagaaagggtgtcgctatggagggagtctttgggaagtgtcatgcatgtcctcggcactgggtaatggcagtggtgtggctgcccctgggactccaaggatttggcctgtggctggggaaataacacacacgagataggtaacaaggatttacactgacatatggggtgttggtttggctctattctttttcggttaccacttcttgcagtgtaggtggagatgcctctgttccttcttcccagccctcagcaacaccagcaagctcgtagtgctttttccgaagctctcccagtttttgacgctccttctgcaattcattttctagctctagcaccctaacctgagaatccatctcttggcgtttgatctgtgtcagcgtcatgcttgagaagtccatgttgtctgtctcttcgatctgtgatttgccggaaatggttgaggccacaacgccggcagtggcctggttcactccccgagaggcctgctgcagctgggctaggttggggctgtccttatcagctttcaccttggatgcagccacaagctgggctgtgctagcagcaatttcatgagaacacaccattagctcctcaaatttccctctgccttgtaccaccagatcagctgcatccaccatgacagtggctccccagcccacagccttggaggctgagataagtccttctgtccatcgagagttcttggcataaaactctttaggggatgctgtacccctgccgctctccacaatctctctctggaggtccttagaggccacgatgagcacctgaatagcttgcatgaggctggtacagcaaccaaggatcctttcattcacctccaatttgactcctgtgtctcctgctcgggatttgctgagcatctcctctattctggccgtggcagtttcaatagcagctgaagtggccgccatctccttgtccaccaggtcccccagctcctcctgcttgatgtccagtcccctgggcaggagctcctcgccgatggccttgatcttgctcaggcagttcctcatggctgtgctgtcggcattctcaaggcttccctcttcctccagggaggccaggtaggcgagggtttccctgccatactgcttacaggcctcggtcagtgagtcggcaggctcaggtggggctctgaggcaggtggtggcaccatgagcaatggcgtcgctggtcaagtgggccagcagggttatggaatggagaagtccactgatgtcttctgggcaggccagatactggctccagcttttctccagttgctcgatgcagctggaaatggatgtgaccgtggagaggaggtgatctgcagacccagcgcagctgatgagaggaggttcttcaagctggttcagggcgtcttgtatcacctgctccgcagccttcctggaccccaccagaagcatttttcgttggtctttggcaagctggcacatagattcctctgtgctggccagtttgagctgagtgtcctgcagttctttccgaagagcagataattcctcctccctatgagctgcgccactcaccaggctgtcccgctccttctctagctcggcgaactcggctgcccagtttgcttctgactgggcagaagtttccaggctgccttgcagaacctgaagctcccgttggcttgtggcaagttcctgcttcaagctctctagaacttccagctgttcttgagtcttccgctggccctggtcactgatgcgctccaacgaatcctccagctcttttttctctcgttccaaatctacctgggcttgtctggccatggacacctgtttggtcacctctgcattcttccgcagcaggtcagcgtggttctgaaccagctcgctgtacttctcctttagcttgctatatcgctgttcattggcttgagctttcctttctatctcagacaggctccgctgagccttctcggtgtcctcccgctgcctcctgagctcgtccagttctgcccgcaggaattcacagtcgtcggccgcctgctgccgcaggtgctgctgctcggccagatctgcttccagctcgctgacgtggcccttcagctgcagcacaacccgctggctctcagtcttcatgttttctagctgtgccttcaatccactgatctctctgtatagtcgctcaattaagtggtccttctcatccttgttcacaccattttgactgttgaaattgaagggatcactgctgaatgaactgccaaagatgtcatcaaacttgttgtcaaataaattctgctgagaggcatccatgtccatgaggtcatccttctctaggactggctcgctgtcgggggatgaggcctctgcagggatcaccaccacagggctgatatgttctgacagggctgaggctcgcaggaagttgggtgggttctcaggcagctgggggatctgaatgagccgcttgaagtactgcaggttgctggagcggtagaacagatctttcaactttgtaaactgctccatgaagcggtcccggtggccttgcagggtgtcagctgggaggcaggagtggagtttgaagagaagcttgacagtgtagtcataaaggtggctgcagtccaagatgacctggatcagcggggcgaggcggcactgccctgctgccgtcacggacacagagcgggacatgtccagggagttgaatactgtttggaagaggttgagttcacactccaggtagtcaaacatctccactgttaactggaaaaagttgttcacgtcactttctccagcctcgtccagctggcggtcactcatctgcaggttgcctgggaacctgggatttttggtgtggtactccatcttggttcttagcagtttcaggtagatgctgcacagctggccatacccctcgctcaggtggccccacatcctgctcatgtcactcaattcatttctgtatctcagagagtccttcaggacgttcgggtgtccatctcggaggagtttgtggaacacatggcagaacttccagcagagcactgggttgctagacagaggcaggcggttgacaacagaccagaaggtctgtgcccctttctcatggtgggtgcccagtatgcacgttctggcgtgtttttcctttacagccacttcctgcgtattaatggccttattgatgctg

SEQ ID NO: 156636 - DNA, 422 bp, Homo sapiens
cctcgagcacgccctcaggcccagcagtaagatgctgttaaaatgctcacaggggggcaccccccaggagccccctaaccccagaataaagcgggccagttccctcaacttcctcaacaagagcgtggaagacccgacccagcatggaggcccaggtctttttgtcagccgctctctcagctccagctccatggacctctccccattaagctccctggtgggctagtgttgaagggacagccagtccccagagcgaccacgtggcacacccccctcaccccagccttgcgaatgggcctgttgcttgtcccgcgtgtctctcccccagcccctgtcttttctgttcaatctcagggttactttggccctcgtcatctcagctagagccatggagagtgggcaagcccggtccagctccatcc

SEQ ID NO: 156637 - DNA, 616 bp, Homo sapiens
tcagctttctcggtggcagtgaccaagaagctacccacgggagcggcctgcccaatcaagtttgacaaagattctgatgaacgagggtggccactacaatgcttccagcggcaagtttcgtctgcggcgtgctggggatctactactttcacctacgacatcacgctgggcaacaaagcacctggccatcggcctgggtgcacaacggcccagtaccgcatccggacctttgatgccaaacaccggcaaccacgatgtgggctcaggctccaccatcctggctctcaagcagggtgacgaagtttggctgcagatcttctactcagagcagaacgggctcttctatgacccttactggacagacagcctctttacgggcttcctaatctatgccgaccaggatgaccccaacgaggtatagacatgccacggcggtcctccaggcagggaacaagcttctggacttgggcttacagagcaagaccccacaactgtatgctgggggtggggggtcgagtgagcggttctagcctcaggctcacctcctctgcctctttttttccccttcattaaatccgaaacctttttattcatccaaccatctatttattcactt

SEQ ID NO: 156638 - DNA, 2353 bp, Homo sapiens
ttaaccgtacgctcatctaacatgatttgagaaattcataaccaggcactcaaatatccttgtagcctacgaaaagtgagtagggtaataatttttgctttgtagggagaactacaaattgatatcttttaatctggccattttttaacatttagctcaatattaacagagaaatgtagtcagtatttagtaaaataaatgtatttttaaaatatttttaggaagctgcagaatggcgactgagtgcttcttgataagtctgcaggtgttagttctatataggctccctttccgtgcttctgtttttgcaaagaccctgattaaatttatttccctcagcagcctgatccttggccccttgagccgactggccatctgggatggagcacgtgatacagctgggaccaagttggttgcatcatcgattaaagctctctgaatctgggtcaatcagcaaaccatcaatctttttattatttacaaaataccacaccatttccaccaaagtatcttgttgaacgtaaaaggtcatattttccacgtttatctatatcttcataggtcttgtgatgaacctatccacataaaatgcaactcttcagaaacatgaaaataagaagtatgcagcattattcaacgtacactgattagcatgagtgctgcccaagcaagtaaaaccaggtctacttacagttgcctccatatcattaaccaattggtatgatttaaaccattcctagtacaacccaccttaggtgggaaggaggattctattaagaaagaattttggccaggcacagtggctcatgcctataatcccaacactttgggaagctgaggtgggaggactgcttgagcagtcctcatctctaggaaaattttttaaaaaattagctgggcatggcaggccacagaataagaccctgtctttaaaaaaattaaaagagaagaatttgtctaaatgacagcaagtctgtgccttctccactgtagaagtatgtggcagcctgaagcaaaataccaaacatttatagccatattaagtactttttggcaggccaactacaatttattaagcaccgattatgcatatagagaccactggaaataatgtagcacccacttcttggtcactatggcagaaaagaaatcaagtattttttcactactctccctttcccctatccctccccccatcaactaccctattctaccagctagcccattccatcttattaactaaaggtccttcagtcctccttccagattgatcttcctaaatgaaggttctgatgggggcattcctctgttcaaaaggctttcaaaggtctgctgactgaattccagattcctcagcctagcatctgaggtcacctatgatgtggctacatccaccttcctaacttaatctttaatcactcccctacatatgcatggcatatataagcaaaccagatcactggccgtttctcaagcctccttttttcctgcctgttgcttatactgttctctctacctgaaacacctcacccagctccacctgccacaacatttcctgcacttctagaaccctcctttacacccctatgaaggctttcttcaaagaatttgtaatcttctcttagtgtctagcattttaggcctgaggagataattatttgtatacttactagcacctttccccacagccatatccggactgctggctttggcacagcatactctatcctagttcgtggcatcacctatactacccaagataataccttacacatagaaggtactaatgaatacttactgagctgtaagacaaacacactgtacttcagcaaaattttagtaaataatttgattcctatacggtaaactgaaaagagaataggctttgtcatcaaacttgggtcctaaccctaccacttagtagctatgcaactttcagcaagctacttaactctacaagcttaaattccctcatctttaatcaagggttgttgtgattataaaatatatatctggcacacaactgtactcaatagattttcaggtatttctcttccctttcccctgtatcaaaacttacaacgaaattcattgagctagattaaaaatcttactcataaccatacttaagcctatattttagaaactaaaatctactcaccctgatatactctgtggaatctggctcaaactgggcaaagcagagattgaggacatcaacatgcctgtcctggctatacatagtctaaaaccacacagcagagttagcatcacatgagaacactgaagttcagcacctgtcctgatgtcatgacaggcctgcccacccacatactggccactctgtgctccc

SEQ ID NO: 156639 - DNA, 2136 bp, Homo sapiens
cagaagcagcagatcccttctgacctacagagtatgaaacttgttccttgcataaaagaagcctttttgttgaagaatgggtgaaggaaacacttgctgttctgtgccagccaaacaatacccatttgtcaccccaattgaagagagaattctcatggaagagggaaaagccttccccccctcaagatctacagctaaacagaaacttgatggaaaccctgtttctcctactccggtttattggcctctcccccacaccaaacaaagaagaaaagcagcctgatccttggccccttgagccgactggccatctggatggagcacgtgatacagctggaccaagttggttgcatcatcgattctgagaatgaaagggtttaatggtatctaggggttttcttcatttgattcacagtcctataaaagtgtgtgccaacttcaaactaaattacatttcagactttcctcaggctgggagggatttggggaaggaccttcagttttacagtttcaaaagcattttcaggaaaattgactaatttaggcctcacaccaactccgtgaggcagctagggcaggagtcactgcaggaagtgtccaatttatgaaagtgaatatattccaaatgtggctatattctttttggaaaaagagcaccatttctcacagaaacagcattcctaatggtagacaatttccaggccagcttacttcaccagcatgtaatagtctaatccaactcagaggacagaaacacagcttcatcccacataagcaggagggtggtggtcacagggatctcaaagtcacttgcctctaagtgacattttgctaacagacaaatgcctctacaagaggccccctaagattcccaaggaaaggattcacaggaacgcattagtaaaatagcatcctagtgaagcaaatttgaaattatacacacacatcagacaaaaaggaaaatcgggttctacatcagcaatcttgtcttaactttcagcatcacacaactacctatgaagaagacagaacaagaattcagttcttctggtctgtacttctcagaaatgtataaacaatttttatcaacattaaaactgtcctagcaaaaccaaacaatcactatcttttcacacagctgacactttcccaccatttgccatctcatcgctgggaggggcacaggaaaaacggacacttcaaaatgcttgtgcttttgagggtctgctatatacacttaggtggaactactgggcttccagttggggaatgggaggggctgaggacaccctaattcagtgcttccgcagctagcactcttcagccttccctgacgttccccttacctgaactgggggatgaaaagcaaggtgaacagtgggaagaaggacaagaattattcaagccttggtagccttagagaaatgctctgggcttatactgaggctcatctaccctaaaggccatctctcaggaaaacagagctgttgtatcataaagcttttcagggggaaaaaaataaaaaatgttcatcacaaatctattgtgcttgttataatctaacaaagtccactaaatgtagtaacgaaatgtctccccaataaaaaattaagattccctttggagcttaggcatgtggccttataaagagcttaactggactgctacctgttggtatgttcagggcttcattaggttcatgcttaagtataatgcctgtgccctcacggacccattttaaatttggcttaacaccccacccatacttaaagagcaaataaattatatttcggaaaagattttaaaataatcctcaatataaaaacccaacagtggggaactgagtctggaataaatgtgtgcagaatccctaattcttttcctgagctcccactcagtgaggatatggcacccctcctactgtcccagccctgtggtttgcagtaagctcactccttctgttcagaatgaccacaggagggcctttacctaggaatagcaggaaaagctaagtaagtactcaaacttccctcccagtaagcatgaattgcttcagatgtaaagcttacatgtgatgagtaatactataatatcatacattaatatatcctaactaaactttaattttcaaacatt

SEQ ID NO: 156640 - DNA, 722 bp, Homo sapiens
  misc_feature (1)...(722): n = a,t,c or g
ttgaaataaactttccgcccccttaaattnaaagatcttttttttttttttttttttgcccccccaattcaaaattttattcaaaagacccacggggttacgggttccaggaaagggaaggagggccctggggggaagccccaaaggggcaaagaaagcatggccaacccgaaggcttccaagctttaacgggtatttggaaggttcaagcaacggtgcttcaacagaaagcccaggaaactttgtcccagggaagacgttgcaaccgccaggggttgaactcggccggggaaggtggacggcccagggtcaaccaagcaggccagtggctttaggagcttgaaagttgaaccgggtccacccgaaagcttgtgcgccgtgcaggtcgctcaggggcggacagcgccgtttgggcatgtcgtcccacgttggccacggcgtttggtcagcgcgttcggccaccttctttgccgtggcccctttaacctgggcagaaaccgtggctcaggttcgaagtgcgggaagtaaggcttgggtgtggggggagggaacaggaccattcctctccagggcctccgcacacatactgcgcacagcgtgcgcgcccgacctttacccccaggcgggcccttgacgttggtctttgtcgggcaggagacagcaaccatgggtgggttctctctgagtctgtggaattccnccacatggaatatggtctcgat

SEQ ID NO: 156641 - DNA, 401 bp, Homo sapiens; identical to SEQ ID NO: 148715
  misc_feature (1)...(401): n = a,t,c or g

SEQ ID NO: 156642 - DNA, 401 bp, Homo sapiens; identical to SEQ ID NO: 125097
  misc_feature (1)...(401): n = a,t,c or g

SEQ ID NO: 156643 - DNA, 410 bp, Homo sapiens; identical to SEQ ID NO: 125098
  misc_feature (1)...(410): n = a,t,c or g

SEQ ID NO: 156644 - DNA, 439 bp, Homo sapiens; identical to SEQ ID NO: 125099
  misc_feature (1)...(439): n = a,t,c or g

SEQ ID NO: 156645 - DNA, 454 bp, Homo sapiens; identical to SEQ ID NO: 125100

SEQ ID NO: 156646 - DNA, 5349 bp, Homo sapiens
gcagccgcagctcgggggcggtgcctgccttgcagcctcccctcggcgatcgcgcagccccatctttgtccggcctccgcgctttgttctcggcgcccgggccttggccagcctggccagccgccgagcagcccccacgccgcgctggcgtcgtcctcgcctccctcgccgccgccccccgcgcgcggccgggccttgccccccatggtgtcccggccagagcccgagggcgaggccatggacgccgagctggcggtagcgccgccgggctgctcgcacctgggcagcttcaaggtggacaactggaagcagaacctgcgggccatctaccagtgcttcgtgtggagcggcacggctgaggcccgcaagcgcaaggccaagtcctgtatctgccatgtctgtggcgtccacctcaacaggctgcattcctgcctctactgtgtcttcttcggctgtttcacaaagaagcatattcacgagcatgcgaaggcgaagcggcacaacctggccattgatctgatgtatggaggcatctactgttttctgtgccaggactacatctatgacaaagacatggaaataatcgccaaggaggagcagcgaaaagcttggaaaatgcaaggcgttggagagaagttttcaacttgggaaccaaccaaacgggagcttgaactgctgaagcacaacccgaaaaggagaaagatcacctcgaactgcaccataggtctgcgtgggctgatcaaccttgggaacacatgcttcatgaactgcatcgtgcaggccctgacccacacgccacttctgcgggacttcttcctgtctgacaggcaccgctgtgagatgcagagccccagctcctgtctggtctgtgagatgtcctcactgtttcaggagttttactctggacaccggtcccctcacatcccgtataagttgctgcacctggtgtggacccacgcgaggcacctagcaggctacgagcagcaggacgcccacgagttcctcatcgcggccctggacgtgctccaccgacactgcaaaggtgatgacaatgggaagaaggccaacaaccccaaccactgcaactgcatcatagaccagatcttcacaggcgggttgcagtcagacgtcacctgccaagtctgccatggagtctccaccaccatcgaccccttctgggacatcagcttggatctccccggctcttccaccccattctggcccctgagcccagggagcgagggcaacgtggtaaacggggaaagccacgtgtcgggaaccaccacgctcacggactgcctgcgacgattcaccagaccagagcacttgggcagcagcgccaagatcaagtgcagcggttgccatagctaccaggagtccacaaagcagctcactatgaagaaactgcccatcgtagcctgttttcatctcaaacgatttgaacactcagccaagctgcggcggaagatcaccacgtatgtgtccttccccctggagctggacatgacccctttcatggcctccagcaaagagagcaggatgaatggacagtaccagcagcccacggacagtctcaacaatgacaacaagtattccctgtttgctgttgttaaccatcaagggaccttggagagtggccactacaccagctttatccggcagcacaaagaccagtggttcaagtgtgacgatgccatcatcaccaaggccagcatcaaggacgtcctggacagcgaagggtacttgctgttctatcacaaacagttcctggaatacgagtagccttatctgcagctggtcagaaaaacaaaggcaatgcattggcaagcctcacaaagtgatcctccctggccccccccctcccccaagcctcccaccgcctccccggcctggtgacaccacctcccatgcagatgtggcccctctgcacctgggacccatcgggtcgggatggaccacacggacggggaggctcctggagctgctttgaagatggatgagatgaggggtgtgctctgggtgggaggagcagcgtacacccgtcaccagaacatctcttgtgtcatgacatgggggtgcaacgggggcctcacagcacagagtgaccgctgcctggcgttccccagcactcggtgtggaaaggcccctacctgctgtaagattatgggtccatgaaagcagtaagctggacacagaggtgtagtgtgcgggacagagggccttgcagatgcctttctgttggtgttttagtgttaaaatacggagagtatggaactcttcacctccattttctcagcggctgtgaagcagcctcctagcttcggaagtacggacactacgtcgcgttttcaagcgtgtctgttctgcaggtaacagcatcaagctgcacgtggaagcatctcgcggttttctagaaacaggcattttcttatccctctcccgctcctttttccacaaaggtgaatttcataaatgtaatactagtaaagtgaatgaattactgagtttatacagaaatttaggtaacttctcctttagtctcaagagcgagtcttgctttttaatgggtgccgtttatgttgctgcccgccctgtgtgcctggctcctctgggtgccttggtgtctgctggtggctggcagtgggcgcagcggaggagagttgtgctgcagctcatacggtgtgtctgtcatctcagtctggagtaaatgcagtgtctgccggtgtctgatgggttctgtccctcgtattttctttgccttctatcccattgcctggctaccgctgcctggcagccaagggtgttggtcgcgaagctggagtggcctctggtggagcctgcatcttgtctcgtctgcctctgctttacatttggtgtactttcgggcgtggtggcagtaaaatgacaccgtgattgagcttgtcagcagagctgaaagagaaagtagaaggatgtgcattgtttcttgtaagatatcttgcatgtatctgtgtattcaaattcaaacagagatggtttgtccatttgtccactgagaaattataaactagggacaagggggaggaaaagtactgaaatacagtttatgaagcaagtgtgtctcgggctgtgcttgtcccaggagccccagcagcatctgaactgaggcttcttcagtcctgcaggaacaggatcatctgtctcagcggtgggcagatgttttcatagacagccagggagtaaacactgttggctctgtgggctgtatggtctctgccataaatagtacagagatgtggctgtgtctagtacaacttttagacacagaaatctgaatgacatatattgttctgtgtcaagaaacttagattttttttttaactatttaaaaacgtgaaacctattcttagctcacaggccatggagaagctggtggggaccagacccagctccttagctggctgggctggggagggggcagtgacagtggcagctgctactcactgctcagtgtggaaaacacaggacttggcaatcacagcccgcagaaccatcatgtgtggcagaagcctgagggatgcggtttcttgcccacgtgctctgttcattttctgttgtttttctgcacttaaagaattcacatggaagcatgttttataaaatgaattaccagagaaacagagatgggccgagattctcagaaatggtcccatgtgaccaagttctgctgtttgggtgacagtgctttgaagatctcctttgaggatgtgcagtctttttttttttttttttttttttgagatggagtttgttgcccaggctggagtgagtggcacagtctcggctcactgcaacctccacctcctgggttcaagcagttctcgtgccgcagcctcccaagtagctgggactacaggcatgcaccaccacgccaggctaatttttgtatttttagtagagatggggtttcaccatgtctcaaactcctgacctcaggcgatccacccacctcagcgtcccaaagtgctggggattatagggcgtgacaaccggcacctgggccttatggagtggtctttttaattagggaacaaatctaatggaaaggagagttgactgaagttggcccacaggattgtgagcctgggcagtgccttcatgaaggcttgccaccttgggacgccccagtttactgggggtgtcttgcggagtgcagaaggcttttctggcagctgctagggttttggccagaccctgcctcccctcccgccggccaacccctaagtccccttccctgtcttccacttggcattcaggggtgggctgctgttctggagaacatttagaactgggaagagagaatggagtcacatggatttttggtgggcattaattctgaacttttcgtatccaagttaagtcccccttaattccactgtgggcattgcctttctaaagcagttacctgattgcctgcttgcttgaagaagctgcttcacaggaggccggcggcggccctgggcactgccccttgcattacggtcttgagctttgatgtgttcttgtgaatttactttgtcagaacaaaatatttacggcgttggggttcagggaatttcttttaagctccccatctgggctgtggaaattcagggaaacctccccgttgcctagtaattcacccccatgtaggggtgttacaattgtgaccaaagtggcatcttgacccactaaggggggcccccttgggtgaacccccagccacattccacagcaatgttaaaaatggccctgccattttggaagaatgcctggcctggccttttcaagtgcctccccaggaagacaacatggccctttccctctttcagatgccctgaaggggagtggttttgagggcaggtgaatgtgctggggaagtgtggggcgggccctcccctctgggccccggggccctcctggtggacccttggctcccctccgttggacctggggcttccgtggtgaagcactgcaagcctcccctgggcattcccctccagcgcccagcacccactgcaacatataagacctgagtgctattgtaattttggcttggtgtgtaatgctcttcattgtgtaaaattgctgttcttttgacaatttaagtgattgttttgtttactgtaagtttgaaaataaaaatgaagaaaaaaaattccaaatgactgtgctgtggttgggaagactttatttaccaagatgtttactcttcctttccccttccattttgaggagctgtgtcactcctcctcccgaagcagtgctttgtagtctctcctatgtcataataaagctacattttctctgagaaaaaaaaaaaaaaaaaaa

SEQ ID NO: 156647 - DNA, 408 bp, Homo sapiens
cagacaccatggtgcacctgactcctgtggaaaagggtgccgttactgccctgtggggcaaggtgaacgtggatgaagttggtggtgaggccctgggcaggctgctggtgggctacccttggacccagaggttctttgagtcctttggggatctgtccactcctgatgctgttatgggcaaccctaaggtgaaggctcatggcaagaaagtgctcggtgcctttagtgatggcctggctcacctggacaacctcaaaggcacctttgccacactgagtgaactgcactgggacaagctgcacgtggatccttgaaacttcaggctccttgggaaacggcttggactgaatgctagcccataaatttgggaaaaaaatttcccccaaccagggcaagcttggttaatag

SEQ ID NO: 156648 - DNA, 779 bp, Homo sapiens
ccactgaagcgctcagatggctgtaacgacggccgacccacgcgtccgcccacgcgtccggacacaactgtgttcactagcatcgctcatacagacacgcatggtgcatctgactcactgaggagaagtctgccgttactgccctgtggggcaaggtgaacgtggatgaaagttggtggtaaggccctgggcaggctgctggtggtctacccttgggacccagaggttcctttgagtcctttggggatctgtccactcctgatgctgttatgggcaaccctaaggtgaaggctcatggcaagaaagtgctcggtggcctttagtggtgggcctggctgcacctgggacaacctcaagggcacctttgctcacactgaagtgagcttgcactgtgacaaagctgcaccgtggatccctgaagaactttcaggctcctggggcaacgtggcttggtcttgtgtgctgggcccattcacttttgggaaaagaatttcaaccccaccagttgcaggcttgcctaatcaagaaaattggttggcttggtgttggctaaatgcccttggccccacaagtaatcacttaagcctcgctttccttgctggtccaatttccaattaaaaggttcctttggttccctaagtccaactactaaactggggggatattattgaaagggccttgagcatctggattctgcctaataaaaaacatttattttcatcgcatacaagaataaaacaagcgcggccgattaagaggatacttcaggggcgcaagat

SEQ ID NO: 156649 - DNA, 337 bp, Homo sapiens
  misc_feature (1)...(337): n = a,t,c or g
aataaaaaaagccttatagcatgaataactaagggagaaaaagaagagtccaataaggacttcgcaatcatcaaaggccccttaaaatttaccccgtagcnnnnnnnnnnnngaatcctcaaacaattatcaactcttataagcacacaaactgcaaaaagtaaaagaaatgggtaaactcctggaaacacccaacctcccattattgagccagaaagtagctgaacccctgaaccaaccaataacaagttctaaaattgaaacactaataaaaaaaccctaccatccagaaaagagctatgggcatgatgaagtcacagccaaattctctcgtgcc

SEQ ID NO: 156650 - DNA, 2790 bp, Homo sapiens; identical to SEQ ID NO: 129221

SEQ ID NO: 156651 - DNA, 1804 bp, Homo sapiens
gtatctacaggaggtgggttatacagatactattctagatgtgaaatctaaacgagtgcgagctttgttgggcttttcaagtgatgtcacggacagggaagatgacaaaaatcaggactcagttgtaaatggcacagaggctgaagttaaagagacagcaatgattgcaaaatctgagttaacagattctgcctccgtgctggataatttcaaattccttgaaagtgcagctgcagatttcagtgatgaagatgaagatgatgatgttgatggaagagagaaaagcgtcattgatacttcaacaattgttaggaaaaaagcattgcctgacagcggtgaagatcgagatacaaaagaagctctaaaggagtttgacttcttggttacatcagaggaaggagacaatgaatctagaagtgcaggcgatggaacagactgggaaaaggaagaccagtgtctcatgcctgaagcctggaatgtggaccagggagtaattaccaaactcaaggaacaatacaaaaaggagagaaaggggaaaaagggggtgaagaggcccaataggtcaaaactacaagatatgcttgctaatttgagagatgttgatgaacttccttcattgcagccatctgtgggttcaccttccagacccagcagctccaggcttcctgaacatgaaattaatagggcagatgaagtggaagcattgacatttcctccttcttctggaaagtcattcatcatgggagcagatgaagcccttgaaagtgaactgggacttggagaactagcaggccttacggtggccaatgaagcagactcactaacttatgatatagcaaacaataaagatgcattgaggaagacatggaaccctaagtttacattgagaagtcactttgatggcatccgagcccttgctttccatcccattgagcctgttttgataacagcatcagaggatcacacattaaaaatgtggaatttacagaaaacagccccagccaaaaaaggtccagtgctttgtgtggtaatgagcagcaatggtgagcagtgttacagtggtggtactgatggactgatccagggctggaataccactaatcccaacatcgacccctatgattcttatgatccttctgttttacgaggccctctgctaggccacacggatgcagtctggggtttggcttatagtgcagcacatcagcgtttgttgtcctgttcagcagatggcactctgcgtttatggaatacaactgaggttgctccagcactaagtgtatttaatgatactaaagaactgggaatccctgcctctgtggatctagtgagcagtgacccgagccatatggtagcatcattcagcaagggatatacaagcatttttaacatggaaacacaacaacgcattctcactttagaatccaatgtagatacaacagccaactcttcctgccaaataaatagagtcatcagtcatcctactcttccgatcagcatcactgctcatgaagacaggcacatcaaattctatgataacaatacaggcaaactgatccactcgatggtagcccacctagaagctgttacaagtttagcagttgatcccaatggcctttacttgatgtctggcagtcatgactgttcaatacgtttatggaatctagaaagtaagacgtgtatccaagaattcacagctcatcgaaaaaagtttgaagaatcgattcatgatgtagctttccacccatccaaatgctatatagccagtgctggagctgacgcactggctaaagtctttgtatga

SEQ ID NO: 156652 - DNA, 5833 bp, Homo sapiens
cacctgagtattttgctttattcaatctaataaacattttatttatgtaaaagacaaacaatgcataggataaaaattaaggtgcttgagacttttgatataaaaagagtatatagcattcacattcctattttaatacatgagtacagctgaagtgttccataaaagaataaaactttcccctttatgtatagtagtgaaaaaaggtcagtattttttaggaactaccggaatgttatttccttgggtcttttttcttggaataagaaaaaaaaaacataaacaaaacaggcccaccagtatcctctgacactacattcccagtttaatgctgaataaccccagaagtgagaatacttcttgaatccttggaatatctccatgaatggaccagtattcctagaaactcaccacctaggaggtccaatggggcaacagctattggggatggtatcaggcaatgccctacgggtgcaagtggaatttctaggcgccttctaatgatactgcagccacactgtcttttaactcctcaagccccaccccacactgaggagggtgccctagaggttcctatttcccaaaccttttgcatgtatccttaaaaatctcaataaaatgagaccttccaccatccaaacagagctgaaaatcctcaactacccagtcccccctcctaatattccctatttgggctgaaaaataagtagcttcaaaaagttttaaaaaagagaattacttgcagcattaaccacttctttgttgattaaccaagtttcctatggagttttaaagctcatactttgttcttgtccttgtggacacaaattttctaactgcaaatgggacctttgtgtcccacattcaaatcctctctagtaatttctgcaaaggttgagaaggctggcatgatggagagaacggtaaccatgaggaaagcttcttggagtaaagcactcctctctccaatgcagagggtaaaactattaacatataagcaaaagaaacttgggctaactgagacccttaaaggagttcccctttagtccaataaaaggccaacttcaaatcttaacaccagataaggtagtcaaaatcatattatatacccagagaatgactgcttgaatggacatttcttacaagggaccttggttaggtgcagatttaattcctagactggggtccaggtaggcagtggaaagagctaatgtttacagtgagaagtgaggcagctttgtaagtgtctccacaccttcacattttgtgaacgtggactggagataactgaaaaccatctgctatccttacctggggatccagattttcctgcaaaatctccaaatatttataaagtggcttcactttttgaaacgctgtgctgaccaaacaaaacatatgtttagagtgcctgaggtcatagtcctgacaatgatagtattgtgtagttgaaatcctcttcatcaggccaaactgtgcttgagcaatcaggagcccagaaagatggaacccattggtgtttgtatagaaaactagaaaatcaagtcaagtgtaatgaaaaagtaaacacgataaagcctagagtgagaatttgctcctttttagaaaaggatgaaggctgggagcagagaatagtaacataagtgcaggggaaagatgaaaaaaagaacaatttttcattagtagatggtggggcaatcgcatggatggggacatctgttctgatttttctgcaacccatgaaggtaaaaagtggggttcaaaacattcaaggtattaaagatggggtagagtttctaaactaggttgagggagagtttctaaactagccccccagatttggggcttggagcttaaatgaaaagtccaggagaaataagggcacacaggaaccccgggaacactggtcctcaaacagtgccactgtacttagttccatggccagaagagaagtgctaggcagggaatgattattttgcaaaagcaagtgcaatgtggtcatagctggctgtgagacatggagcctctttcctcatgcaaagttcactgttttacagtcagagaaccactgcatgtgtgattgtcaaatgctaatgctgtcatgggtcccttccttctctgcttggttctggagttctccaataaaaccaatttcctgggaatatttgatgtttttccttgtctcttttcaaggtatggctatatatatagagctatagacatatatagatatatatatatatatataaaacatagctattcatatttatatacaggcattaataaagtgcaaatgttattggctattgtaaaatcaatctcatttcctgaggaagtgctaacacagcttatcctatgacaatgtaaaaggcatagaatgctctatgtcacccactccctgctgctgttgtttctgcttatccccacagcttacagggaggggagtgacccccttggttttccaggaagcatcagttcaggggcagcttcctgctgcctctgttctttggtgagaggggcagcctctttggacatggcccagcctgccccagaagagctatttggtagtgtttagggagccgtcttcaggaatcttctcctccgagcagctcctccccgagagcctgtccagatgctccagctcactgaagcgttctgccacacactgggctgtgagacgggcctctgggtcgtggtcccagcactcagtcaacgtctcacacaccatctggatgccctggtggttgagccagaagctgggaatttctggtcgccctcgatctctcaacacgttgtccttcatgctttcgacacaggggtgctcccgcaccttggaaccaaatggaggctcataatcttttacttctcccactgcattacagcgagatgtcatttcccagagcaccagagccatggagtagacatcggtctgcttgaaggactcagcattctccaaattcatcctggattctaggacttctggagccatgtatcttgcagttcccacctgcccactgttagccaggtcatccacagacagagtagggtccagacgcagggaaagcccaaagtcacacaggcagcaggttaggtcgttcttcacgaggatattggagctgttgaggtccctgtgcacgatgggcatcttgggcctcccacatggagtgtgatcactgtggaggtgagcaatcccccgggcgagggagctgcccagcttgcgcaggtcctcccagctgatgacatgccgcgtcaggtactcctgtaggttgcccttggcgtggaaggcggtgatcagccagtattgtttccccaactccgtcttccgctcctcagccgtcaggaactggagtatgttctcatgcttcagattgatgtctgagaagatgtccttctctgtcttccaagaggcatactcctcatagggaaagatcttgactgccactgtctcaaactgctctgaagtgttctgcttcagcttggccttatagacctcagcaaagcgacctttccccaccagggtgtccagctcaatgggcagcagctctgtgttgtggttgatgttgttggcacacgtggagctgatgtcagagcggtcatcttccaggatgatggcacagtgctcgctgaactccatgagcttccgcgtcttgccggtttcccaggttgaactcagcttctgctgccggttaacgcggtagcagtagaagatgatgatgacagatatggcaactcccagtggtggcaggaggctgatgcctgtcacttgaaatatgactagcaacaagtcaggattgctggtgttatattcttctgagaagatgatgttgtcattgcactcatcagagctacaggaacacatgaagaaagtctcaccaggcttttttttttccttcataatgcactttggagaagcagcatcttccagaataaagtcatggtaggggagcttggggtcatggcaaactgtctctagtgttatgttctcgtcattctttctccatacagccacacagacttcctgtggcttctcacagatggaggtgatgctgcagttgctcatgcaggatttctggttgtcacaggtggaaaatctcacatcacaaaatttacacagttgtggaaacttgactgcaccgttgttgtcagtgactatcatgtcgttattaaccgacttctgaacgtgcggtgggatcgtgctggcgatacgcgtccacaggacgatgtgcagcggccacaggcccctgagcagcccccgacccatggcagaccccgctgctcgtcatagaccgagcccccagcgcagcggacggcgcctttttttttttttttttgacatgtgacccaaaggagtggagctccgataaggacccaagcaagtagaaccagatttagctttgtgacttttaaagggtttatactaactcatgtctatccatgcttagacaggaactaaagggccaaggtgagcactagcagtcatgttagcctctgagtctagacatattggtgggtatggaaagtacctaaagtctcaaggccaaaagacaagaccaagaccctccacccatcccagtgaggcttttctctgctccatctcataagtctaaatctagtaaacaatggggcaaggtggaggtggacatttgattattttaaagatgcatatacctgtttacaagaacagtccaaaccttcagtatagacaaggggctccccaaatatagcagccatttaaaaatactgttatgtataaagactgtaatcagtattcacaaaccctggtgaaaccaaaagataataccatatcttcctaagcatcagttttctaacctagcattaggttgtataaatggaaaaacacaataaattacatgacatggaagaaagaactagaagaaatgtttgggaaatttaacagaaatcataaaatatgtagttttctgctgaaaatgttacttaaaatattcaaataatgttaaagtagaatattctcactttttggctggggctgttttctgtaaattccacatttttaatgtgtgatcctctgatgctgttatcaaaacaggctcaatgggatggaaagcaagggctcggatgccatcaaagtgacttctcaatgtaaacttagggttccatgtcttcctcaatgcatctttattgtttgctatctattaaagaaacaaaacaaagatatctacacacttagttaaggataggggaaaaaacttgcatttcaacattaattcttgctgatgtgtcaataaatgatcactttgcaatttttaaaacaatataatttttatatgtaaataaccaaaccacgaagcaaaattagcaataacccaacactagttttctttgaagaaatatgaaaggtgtattacaaaaacaattaacataattcaatataaaaagtgaatcaaattatataaaatagatcttactaggatgataaataataccaagtaattcaacacaaattatagtatacaagtataattttgggttaagagttgaaaaactaagttatctttaaacctgctaacattttaaaatgtcatacttttgagattttaaatactttctaatagctaaattttcttcatcaaactggaggcaaagtttataaactggaaacataaaatgttaaaaatcgaagagataacacaaagaatgcgttccactggtaaaacacatgttctttccctccatggtaactcaatctcaaaaatgaaaaaaaaaaaaaagcactattttttcattccaattacataacagaaaagctaaagaggtagattatatttgattttacactagcaccacagggtat

SEQ ID NO: 156653 - DNA, 341 bp, Homo sapiens
ggcacgagaccgattaccacaagcaaccatggcagggggagatctcaggcattgtaagcacagaatcccagtagtggggacttgggggaggtgaggtcaaggtgaaatgggagtaggggaaggaaaaaatggccatatgagatggtggtatgtgaaagttgagctttctctctctactgaagtgtcccctgcgccctacacagggacacgtgagttgtatggaggctgagtggcctgagtacagtgtgcgtgcattctacacattgaatgatctgctaatgtcatgggatctctctattgtggaaatcgtatttgagtatgcagttgaatgattggagccg

SEQ ID NO: 156654 - DNA, 352 bp, Homo sapiens
cactatcgcggaccgagagctgagatatagcgaagacgagggtggaagacgaagaggagagtagagagaggaggagggagaagcagcgagaaggaagagagtagcgaagcaggtggggaaaagagcgaatgaggagaggaagacggaagagaggtggggggatcgggaggggagacgcgagaggcggagcgaagagatggaagtaagtggcaaggagaggggccacgcaacctccgggagagaggaaaaggagaacacgggatgaggaggctttaaatagtatttcataaaataaaaatgcccagcactcttaggaacctctcattcaaccgcctagttttgttctcgtgcc

SEQ ID NO: 156655 - DNA, 374 bp, Homo sapiens
cggacgcgtgggcggacgcgtgggtcgacccacgcgttcgtaagacagctaatgcaaagaaatcttgatacggggcctattatggctggtcatgataatcagcttcaacaaaaggaaaattctacgcctgattcttcactacctgagacgtctaacaaggagcacatctcacctgaaaacatgtctttaaaaactctgagaaacagcaacccataagacctctatgatgagatttaacagtctcaaaaaatactttgatgttcactacactatgttttctatccatttctttccaattaatacggagaatttcaagtcaccacccgctattaccgtatcttacaatttaattacctacacaccgaattgacacc

SEQ ID NO: 156656 - DNA, 323 bp, Homo sapiens
tactctttggttatttacccaaatgagtagacaatatgtccacaaaaaaaccctgcacgtggatatttacattagctttatgcataactgccagaacttggaagcaaccaagatgtcctttagtaggtaaatggataagatgttctgcagaggcattaggaaatagatctctcatatagatgagagctgagttaccaatgatggacaaggaggcaccctatataaccactaagcagtgtattcacccaatcaccaaaggcatcccactgaaagctttagagcacattcctctgtaaaaaaggtatggccatgcaggagataca

SEQ ID NO: 156657 - DNA, 1050 bp, Homo sapiens; identical to SEQ ID NO: 144729

SEQ ID NO: 156658 - DNA, 602 bp, Homo sapiens
tctcgctctgtcagccaggctggagtgcagtggccgattctcggctcactgcaagctccatctcccagttcacgccattctcctgcctcagcttcccgagtagttgggactacaggcgcctaccaccacgcccggctatttttttgtatttttagtagagacggggtttcactgtgttaggatggtctcgatctcctgacctcgtgatccgcctgtctcggcctcccaaagtgctgggattacaggtgtgagccactgcacccggccacaaagtgacaattctaagaacaaaagcaaaaccacaccaggaaggccagggaatcccaggcagagagaacctggatctgcagcaaagtcccctggcttcagggcatggcatgagtgcccgcaaacagccaagccagagtccagcaggtttgcacactcctcccaccccgtcctgcccaccactggccttcacggctcagggagttcctcctaacagtgttccctgccaccggccaccttccacgactgtggatggaatgatgtttctagcagggaatgtcattcctttggttctccattacttggggatcaagtttccatccaggccttacaga

SEQ ID NO: 156659 - DNA, 481 bp, Homo sapiens; identical to SEQ ID NO: 148077
  misc_feature (1)...(481): n = a,t,c or g

SEQ ID NO: 156660 - DNA, 1121 bp, Homo sapiens
gtctttttgtgagtgttttctgactgcaaaagaacagttcatcaaattacttatcttttaaaaaacacaatcacaaaatcatattcatatactgctactgtaagtattaagggaatccccaagcctaagacaggctgtttaaattaaaaaaaaaatgtaaggatgcttgtttaaacaactcagaaagcatttttcccccagaaatattacagtgataagggaaacgatctgaccacctaagcctcagttccacaatctccctctaaattctctggtctagaaaacccatggctctctgggatgcttcttatgcttttcaggagtttccctcacaggtctgcatttctatcatggaatttttcattttttttttttaagctaggaaatgtcttactaacaagttgttttatcacctaaaatctactattatccatttttacaccatagataacacttggttgacttaaattctaaaagaaaaaagtcttgctttaccaatcaaaaacttaaaaccaaaggggtaaaaggatactgaaatgtcctaatagtttgtgtaggaccacaaacattaaaggcaagatgatagttttaaaaatgtaataactcaagtctaaacatgaatgaatttaaatttaatcctttttgtatgaaaccaaatagcagtctaataccactgggactaagtgctataaaagtaagtaataaaacaaatacatgaaacatgattacaatttaaattctttggattatctttttttttttttttttgatatggagtcttgctctgtcgcccaggctggagcgcagtggtgccatctcggctcactacaggctccacctccggagttcacgccattctcctgcctcagcctcccgaggagtagctgggactacaggcacccaccacgcccggctaattttttgtatttttagtagagaggggtttcaccgtgttagccaggatggtctcaatctcctgacctcgtgatctgcccgccttggcctcccaaagtctttggattatcttgtaagaccccacatttaatatagaagtttaaaactctctaaaataatactactaagcatcttagtattatttaatacttttctatctaaaaagt

SEQ ID NO: 156661 - DNA, 425 bp, Homo sapiens
  misc_feature (1)...(425): n = a,t,c or g
tggaaagacaaaagtaatgcatagagatttattttttaacattcaattcataagcagtgtttatacctctttgtacttacttgaaaagtgtatattatgtaaatttagtataaaaacacttggactaattcataccatgtggtaaaatttcacattcaaaagaaatacccttctgttattaaaaatnnnnnnnnnnggannnnnnnnnnnnnnnnnnnnnnnnnnnnnnnnnnnnnnnnnnnnnnnnnnnnnnnnnnnnnnnnnnnnnnnnnnnnnnnnnnnnnnnnnnnnnnnnnnnnnnnnnnnnnnnnnnnnnnnnnnnggtnnnnnnnggnagnnnnnnnnnnnnnnnnttttttnnnnnnnnnncccaaaaattggtttttaaggaggtccagggggggggatttttttacccaagaatt

SEQ ID NO: 156662 - DNA, 677 bp, Homo sapiens
tttatttattttgagactgggtcttggtctgttgccctggctggagtgcaatggcccaatcttagctcactgaagccttaaattcctgggctgaagagatccctccacctgagcctccttaatagccagtcatgtgccaccctgcctagctatttttttttttttttttttttttttttttactttttggagagaagggatctagctatgttgcccaggctgttctcaagtagtcctggcctcaaatgatccctccaccttggcttcccagagcactgggattacagtcatgagccaccctcctggctcctttttttttttatttttaataacagaagggtatttcttttgaatgtgaaattttaccacatggtatgaattagtccaagtgtttttatactaaatttacataatatacacttttcaagtaagtacaaagaggtataaacattgcttatgaattgaatgttaaaaaaataaatctctatgcattacttttgtctttccccataatctcacgtatacacataaaacaaaaaacaaggagacccagttatagttgtggtatctgctgtttctgccttgaaatttccagcttacagctaagcaacaactactgtgcatccagaacttacatctatgttcctagagtacttgaaccccattctcaagtgcac

SEQ ID NO: 156663 - DNA, 2010 bp, Homo sapiens
tttttttttttttttttacaaatctcagaactccaagatgtttttatttatttccaaattccaatagaatgaatatgttttatctaaatatttttatcacacaactaaaacattgaattactttttcagaaatagttaaatacatcaatctagttacaaattctaaatataaaagagtacaaaatataatcgttataaattgtattttaaaaaaagaaatacaaattctatggtcttttgcattttactgccctcaaagcagaattagcaaagctgatgaagaatgaacattttcccttggggcgggtggccccttggtcactcccaacaggccacgttaaccgggcctccgggggtgtgctccccacccaacccacggcaaaacaaagggcgtccctccctcacttggaagtcctgggcctgtgggatgttttccatctgttttttttgctcagtgaccaaaacgttcttgaaattaggacctcaccaaaggttaaaaagcagtaaaacaacatatgctacttaagacattttgaagcggaaagtaaagctatgtgaatgccgtccttccttccttcctttttttacagcttggaaacctctaagaatttgctggggggtggcagaggagggtttgtctagtttgaaggaaggaatgttggtagacagtctccagccacgaaagcccaggaggtgccctcttccacacaacagactaagcactgcacccactttctttgatccagaaagcatccctactgaccctgtaaccttacaccctctctgtcccaaagaacagaggccggacccagagttgcccagcctgggagaggcaccatggagatgaagcttgccctttctgcactcaaccccttgcagcctgaaggagtgtgagacgatgaaaccccacatgtgccggagcccctgcagaggtgttctcacaccctcagcgacctgtgcacagtggccggatcaggggtgggggcctgtcataccgggcgctcctttctctgacgaagtaactgtatgcaactcccaattgctacttcctgaagcacctgcgtgttcagggaaccagtgtctttcttggtttaaaaaataaataagtaaatattgggggacctcttaaaacacttaatacttttcagagcctcaaaggcaaaattcacctggctttgaagccaaatctgtatggtgctgagaatgaaatctgtccgtctaagatgacaataagaccttccagggaaccaggcagaaaggtgggcaggtacagtggccaatttcccagagaagatcctcaatatctgacttttgagagaatttaaatattcattcttcaaattaaggaatacaagtgaacaacctgaaaagatttttagaagctcattagctgtgtgttatttgaacgcaaaaatgaggaagagatatgagcgggaaacaggagagtataggaaggcaggccagggtgcagccaggccccagcaggggcagagcgggaagcagcgagcggaaagcaggggagagacaccgagaagctgcagtgtagcacaaccaaaccctttattgtctaagttacattagacgcaacactgtaaaaaaatcctgttaagaaacaaggaaacagcagatcgggagaggtagtagaaagtctgtaacagtcagaagacaacgtacagaagtgtatcatgcagaaattaccattcggaaaaaaaaaggcaatcaaaacggtggctaaataaataaggaaacacaaatcatattaaatactatgaccaaatcaacaaattaacaaaccaacacaatactgacgatgggtggaaggaagggaccacacatccaggcctgcccacagctggcctcaagggatggcgttcttgggggggctccccagtctgtttaactccctgaaaacctccctcctgcactctgtgcaccctgcgcggccccgcaagctgactgtcctccacgcctgctctcctgcaagccaggagaattccaccacgctagtcc

SEQ ID NO: 156664 - DNA, 979 bp, Homo sapiens
gctctctctgacccaggctggagtgcagtggtgtgatcacagctcactgcagccttgacgtctcctgagtaactgggaccacatgcatgcaccatcatgtctggctatttattttttttgagagacaacgtcttactacattgcccagtcctatctcaaacatctgggctcaagcaatccgcccacatcagcctcccaaggtactgcgattacgggcataagccactgggcccggctggatacatctcagtttggacattaaattatcagaactttgtttctcaagactttaaaaattaaaaacattttttcattagaacacctgatctgcagattcacagttcacacacccaggttcctaacgtacctgttttccactgactgaaccaagttagtggtttttaaacttaaccacaccgaacactgtgctggctgcgttttccttgctccacagcacacgaggccagaggtgctgcagacgcagggaagtggcttgtccaagtgcagtcccagaccagacgtgtcacccgggcagctccaggtgtaaacctgagtccacctcagaccacagaaccagggcctcggggtggggtccagcaccctcccgtaaggagccctgtgttttgacacaggctagggcttgggaaccgccggcctaggacagacaccatgaaataagcacagcaacggtcacatgtcacccaccgtcagggatgtgcacggccaggtgattgcattgtcgtgcaagcatcctacagggacttacacagagctcgatggtgcggcctcctccacacccaggctgtagggcatagcctgtggctcccaggctacaaatgcgtgcagagtgctactgcgctgaatgctgtaggccactgcggcacggcgctgcgtgtttgtgcttccaaacctaggcgtggtgcggtccagcttgctggaggattccatcccagtgttctgtggggaattccaccacagt

SEQ ID NO: 156665 - DNA, 348 bp, Homo sapiens
ccaaaagctgtcctgggaccacacctggaaatggagccggggccagccttgaagacctttggtggcgaagtgcaggtcgatggggtgggaccagtaagccatgtcccctatctgcggggtgtccacttgcgtttggccctcccgcacgcctgacaggagcttccatgccgccccttagcgcacttaacggttaggagaggagaaagcggcaaccggggttgtagttcatgggcttgactgcttcttttctccgcgggcgccgaccaggcctggctcgcgcctctcccaggacccgcctggctgcgagatatgtaagccgcgatacttccgcgaccgcgctcgtcttgg

SEQ ID NO: 156666 - DNA, 371 bp, Homo sapiens
cagaagcctggaggatgagctggggtcccccttaagagagatagcctttgccgagtccctgaggggtttgcagttcctgtcaccgcctcttccctccgtgagcgctggcctgggggaaccaaggccccctgatgttgaggacatgtcatccagtgacagtgactcggactgggatggaggcagccgtctttcaccatttctaccccacgaccacctcggcttggctgtcttctccatgctgtgttgtttctggcacgttggcatcgctgccttctgtctagcccagaacgcctcactgtgaacactgaggccggcagccagcaaatctgtgggcagagagtggagaatcttggtggatgaggctgcggcgg

SEQ ID NO: 156667 - DNA, 501 bp, Homo sapiens
tcttccctccgtgagcgctggcctgggggaaccaaggccccctgatgttgaggacatgtcatccagtgacagtgactcggactgggatggaggcagccgtctttcaccatttctaccccacgaccaacctcggcttggctgtcttctccatgctgtgttgtttctggcccgtttggcatcgctgccttctgtctagcccagaagcatccccagtgcctgacctatagtaggtgctacgtatctgcttttggaatacatgcatgaatgaatgaatggacccgccctagttgcccctacagccctcactgtgaaccctgaggccggcagcccagcaaatctgtgggcagagagtggagaatcttggtggatgaggctgcggcggcggcaggagcatctagaaacgggagcgagctggactggaccccttctcccttcctggccaccgctcttcgggcggcagcaacctgagattaaacaccagacacccttgcagccaaaaaa

SEQ ID NO: 156668 - DNA, 1000 bp, Homo sapiens
ccacgcgtccgaggaaaggcacatccttggctggggattacagattttgaggaatacagagaggagggagaggaagggttggagggtgatgcagagagggagaggcggggagatgtcatagacggagacgaggcaacaggaccgtggaggagaaaaatagaaagggagagaaaatagtcggagagacaaaaaccaggagacccatgcgtggacagaaagactaacggagacgaaaagaaagaggcagatggggagacacgtgcgagacgagacacatgtgcatttgttggggagaagaggattggaggtgtcagtgttaaaggaacctctacaacgaaggtgaagccacggaagataaggaaacccctcctggagtttccccaaagccatggacagccctagtcttcgtgagcttcaacagcctctgctggagggcacagaatgtgagacccctgcccagaagcctggcaggcatgagctggggtcccccttaagagagatagcctttgccgagtccctgaggggtttgcagttcctgtcaccgcctcttccctccgtgagcgctggcctgggggaaccaaggccccctgatgttgaggacatgtcatccagtgacagtgactcggactgggatggaggcagccgtctttcaccatttctaccccacgaccacctcggcttggctgtcttctccatgctgtgttgtttctggcccgttggcatcgctgccttctgtctagcccagaaggtcagtctgtgtgtgggacttggaggggactgggcataaaagagaaaaatgccccccaaaaacaaagagcccagcaaatctgtgggcagagagtggagaatcttggtggatgaggctgcggcggcggcaggagcatctagaaacgggagcgagctggactggaacccttccccttcctggccaccgcttttcgggcggcagcaacctgagattaaacaccagacacccttgcagccaaaaaaaaaaaaaaaa

SEQ ID NO: 156669 - DNA, 761 bp, Homo sapiens
gctactgggcacatggcaaaatccatagcctgcaagctggcagcggccaaagctgtcctgggaccacacctggaaatggagccggggccagccttgaagacctttggtggcgaagtgcaggtcgatggggtgggaccagtaagccatgtcccctatctgcggggtgtccacttgcgtttggccctcccgcacgcctgacaggagcttccatgccgcccctgtgtgaatgccccacttgcagaagaggctactttccgagaaaccgctggcccccatgatctgcccgatcacgtgcacctcagccatggcccttagcgcacttaacggttaggagaggagaaagcggcaaccggggttgtagttcatgggcttgactgcttcttttctccgcgggcgccgaccaggcccggctcgcgcctctcccaggacccgcctggctgcgagatatgtaagccgcgatacttccgcgaccgcgctcgtcttggtttccgtggttgttgctggggcaacagcaggctcctcccctagctttgtactcgctctgcgcgctactaattggtgctagccgtctgcggggggcggggtgaagctgtgatggacattttcctcctccgctccattttgggaaaatagcgtctctccagctacggcaaagggttccgccattttgggcgtggctaggaagctgccatgttgagtgtggctgaggaagtttgagtgcagtttctcccagataccttctttaccaaaaaagcaaatcc

SEQ ID NO: 156670 - DNA, 912 bp, Homo sapiens
cacttaacggttaggagaggagaaagcggcaaccggggttgtagttcatgggcttgactgcttcttttctccgcgggcgccgaccaggcctggctcgcgcctctcccaggacccgcctggctgcgagatatgaaacccctcctggagtttccccaaagccatggacagccctagtcttcgtgagcttcaacagcctctgctggagggcacagaatgtgaggacccctgcccagaagcctgggcaggcattgagctggggtccccctttaagagagatagcctttgccgagtccctgaggggttttgcagttcctgttcaccgcctcttccctccgtgagcgctggcctggggggaaccaaggccccctgatgttgaggacatgtcatccaggtgacagtgactcggactgggatggaggcagccgtctttcaccatttctaccccacgaccaccttcggctttggctgtcttcttccatgctgtgttgtttcttggcccgttggcatcgctgccttctgtctagccccagaagacccaacaaggcttgggccaagggggacatccaagggggcaggggccgcctcccgccgtgccttcctgctgggggtcctcgccgtcgggctgggcgtgtgcacgtatgcggctgcccctggtgaccctggccgcctaccattgcctcccgagacccgcccctagttgcccctacagccctcactgtgaaccctgaggccggcagcccagcaaatctgtgggcagagagtggagaatcttggtggatgaggctgcggcggcggcaggagcatctagaaacgggagcgagctggactggaacccttccccttcctggccaccgctcttcgggcggcagcaacctgagattaaacaccagacacccttgcagccaaaaaaaa

SEQ ID NO: 156671 - DNA, 561 bp, Homo sapiens
aagacagggtctcactctgttgctgaggctggagtacaatggcaccatcccagctcactgtagcctcaacctcccggcttcaagcaatccccccacctcagattcccaaagtgctgggaccacaggcgcacaccaccatgcccaggtaatttttttgatcttcggtagaggtgggggtcccaccatgttgcccaggctggtctcgaactcctgaactcaagagatcctcccgcctctacctcccaaagtgctaggattacagccatgagccaccgtgcccggccagtttcaacttttttgagtacttccacatcatgtcctgtgctgagcacttttcacaggagtctcatttaattccctagacaagtctatggggaaattactgtctccatcttacagataggaaactggggcttagaggcatcaaagaaatggctcagggtcacgatctcagcccaggtctctcagactccaaagcccatgctcttgacctaaaagcacttaagaaagtatttaaacctgaaagcacttagcctgagtgcttctcgtgccgctcgtgcc

SEQ ID NO: 156672 - DNA, 1584 bp, Homo sapiens
  misc_feature (1)...(1584): n = a,t,c or g
aagccacactctgtcctacttagtcaaagaattagaggttcgcatggatctgaaagccaaaatgccagatgaccatgcacgaaaaattttgctttcccgtattaataactatactatcccagaagaagaaattgggtctttcttatttcatgctattaataagccaaatgctcctatctggctcatactcaatgaagctggactatactggagagcagtaggaaatagcacttttgctattgcctgtcttcagagggctttgaatttagctccacttcaataccaagatgttcctcttgtcaacttggccaaccttttgattcattacggccttcatcttgatgccactaagctgctacttcaagctttggccatcaatagctctgagcctctggaccttttttgagccggggaaatggcttaccttgctctgaagaatatcagtggggcacttgaggcctttagacaggccttgaaattaaccaccaaatgtccagagtgtgaaaacagcctgaagttgatccgatgtatgcagatctatccttttctgtacaacatcacttcttctgtttgcagtggtaattgtcgtgagaaaaccctggacaacagccatgacaaacagaaatattttgacaactcacagtcactggatgctgctgaagaagagccctctgagagaggaacagacgaggaccctgcattctctgtggagaattcagggagggactcagatgcccttagacttgaaagtacggtggttgacgagagccatggttctgatgagatggagaattcagatgaaaccaaaatgtcagaagaaatactggctttggtggatgaatttcaacaggcatggcctttggaaggctttgggggtgcactagagatgaaagggcggcgttctagacttacaaggaatacgggtgctgaagaaaggtccccaggatggaagtggccagaaactcttgctatggagactgcagaagtgaagatgatgaagcaacagaatggattacattccaggtcaaacgtgtaaagaaacccaaaggagatcataagaaaactcctgggaaaaaaagtagaaacaggtcagatagaaaatggacatcgttaccaagcaaacctagagatcacatggccccaaggtggcatctccatgggccacaagggctactagactggaagaccagggaaagtgccatagacataatgtaactggatttcagccaaggcattttaacagagcctcttattgatatccttgtggaaccagatgggagagatgtggggcttgaagccttcccattgcctacaggataaaattcaaacttcctagtgtggtgtacaagacccttttacagcccgcctctgtgttaccctttcaacaccatttttctggaaccaaccatggttcatgttttttacctcagtggccttttgcacatggttatttccctttgcctgggattgccctgtgccccctctggcctctggccgtgctaaaaatatcacttcatccttaaacttcaaaatcaagtgccatctntttccttgttaactttcagggcagaattagttactctt

SEQ ID NO: 156673 - DNA, 1359 bp, Homo sapiens
aaaatttggaggggaggacttaattcctaaaaaagggtaaggctgggctgggtggcccacacctataatcccagcactttgggaggccaaggcaggaggatcacttgaacccaggaggccttaaccagcctggacaacatagtaagaacccatctctacaaaaaattttacaaattagcccaggtgtgggcttgtggccagacctgccttgaaggaggcaaggaagggtatgtgaacatgagcaacgtccacacaggtggacaaggtgacccatgtggacttttgggttccctctctttaggaagaatttttggttgtacttgggacagttacaggcatgctgctattgccatgatcttcgggaagctgaagtgatgagcagcagtgtgtgattctgaggacacagagggctggggtctaggagctatctcaggtgggctcagtcaagtgccatcctcccttttggtgcctccctaagaagtgctgagaagatgcaacaccaaaagcttttactccaacattgcttagccaagctaagcacatgcattccatatgattcagcaattctgctcctagcatgtatcccagagaattgtcccatgggtccataggggcatataagaatggccattgcagcaaagttctggttggggtagggggagctgaaagtcgtctggtgtccacaactggaggaatggatggataaaatgggatggatacacaagtggacagacagatgggtgaaaggatggtcagtccttacatggaccagtttccttattcttaggctaaggattagcatctccaggcaaaaagaaaacgtttctggattcccttgccactggagttccgtggaagagagaaatggagtccactaatgaggtgtcctttgaaggatatggatggaggacacagggccaaggaagtttgctctgcgggcccagccttggagatgttcagtccttctgcagcagcaccacgcttctggctttgtgggtgtcagtaggcaggagtggcagtcccaccccatgtcccagggcccaagcccagcttcctgggtgcttacaggggatggcaggcaggacagtacgttctgatcccagctccagtgggagcttcctggaggcgacttctccagccttcccatgtactttaagtaccctgattcccttaaatccccttctgccaaaaacagctggagaagtttgtgtttcctgaaactgaccccttcctgatttggaaatgacttgccgaggtgacaaagcaagttattgccacatctcaagtttgagacaggcctcctgactccacctattaacagtaccactgtcccaggccctttctttttttccttttttt

SEQ ID NO: 156674 - DNA, 929 bp, Homo sapiens
ggcgtaggcggaggagattttcggacctgcgacttccgaacaaccctggcaggagggagcgggcgttcagccggggggaggcctgaagaaacgctccgggggccaatgggtctaacccttggttcttgccggccctggcggctccctcacggagccagcggccgggaatgcagacatcagaacgtgaggggagtgggccggagctgagccccagcgtgatgcccgaggctcccctggagtctccaccttttcctaccaagtccccagcgtttgaccttttcaacttggttctctcctacaagaggctggagatctacctggaacccttgaaggatgcaggtgatggtgttcgatacttgctcaggtacagactttgtggagttgctctggtctgctctgccttctgccgtcctgctctgtagtaactaacactgaccatttaggcagtggctgggctgtcctttctgccctagtgaggagcagatctgggaggtctgtttcggcctctgggtttatctagggcctaaccctgtgtctcaaggcccagtccagggagaggcagaatactgggaatggatcctgccctttcagcaaggttccttcctttgtgactgaataagctccttcctctggactgctggacaaccttgaacatcacgccttctacagcttagagcaggcttaattttttcctttgcccccaatattagcataattaatattaaaaaattagggtataattttgaacaaaaattaaagaaatacaaaaacctgtgaataagcagataccattttcactacttttttttttttgagacagagtcttgctgtattgtccaggctggaatgcagtcgtgtgaacatggctcactgtagcctcagcctcttcagctcaagcgatcctcctacctcagccaccatgcctggct

SEQ ID NO: 156675 - DNA, 467 bp, Homo sapiens
tgagacggggtcttgctgtgttgcccaggctggtcttgaactcatggcctcaagtgatcttcctgcctcatgctcccaaagtgttgggattataggcatgagcactgtgcccagctctagtgtaccattttaattctctcttttttttttaaacatactaacaccaaccggaatctcttgtttcttttgctttattcttttgagttattttctggattgttacctttctcccacctagttcaacccctcagaatcaccaaggctaaagggatattaatgctgggatctttttgtaaagacaaggaaccttttcataggtgtggaataaccgccccctggctatatttgtcataggtctggaaatcaggttgtcacatgttgtgttttctagggatgtggggttcctgttttaacgtaggtacatgtcaggtaaaagggaagccagaaatagccattcaggagagaaa

SEQ ID NO: 156676 - DNA, 668 bp, Homo sapiens
  misc_feature (1)...(668): n = a,t,c or g
acgaagtgttctgtgtgagtgtagaaacagtgtggtttcccagatatggggaaatagattatatttagtagaaatgtatccaattatgaaagttgagaaatgggctgggtgctgtggctcgtgcctgtaatcccagcactttgggaggctgagaggggtggatcgcttgaggtcaggagttcagggccagcctggccagcatgatgaaaccccgtctctactgaaaatgcagaaatgggctggggtgtggtggtggttgcctgtagtcccagcttgttctttataaaaaccagtaacatgaatgaaatgtattgtgagttacagctgggaaacaagaaatagccaaggtctgaaagactgggaatgagaaaggagatacaaccacagatataggagtgattaaaacaaaaataaattaaattatgtgaaattctacagcaacaagtagtaaaatctagnnnnnnnnnngaagatttttttagcaaaattactccattctacccaatgggtaaagtattttcgcctcattctgttgatgttgggtttggccctgtctcttactttggtcaatgatgagtgagaaaggcatggtcagtttccatcagtccccttaccttcctgccacccacagatagcctctatttcagcttgtccctgagtgagaaata

SEQ ID NO: 156677 - DNA, 582 bp, Homo sapiens
cgcggccgcgtcgacttttttttttgagatggagtttcgctcttgttgcccaggctggggtgcaatggcatgatcttggctcaccgcagcctccacctcccgggttcaagtgatttttgtgcctcagcctccccagtagctgagattacaggaatgtgccaccacacccggctaattttgtatttttagtagagacggggttttgccatgttggccaggctggtttctaactcccgacatctggtgatctgtctgcctgggcctcccaaagtgctgggattacaggcgtgagccaccttgcccggcaagcagcctctgatttcaactcaagagacagaagaggatcccaaattccaagcaactcccaagatgcaaatcaaaatatggaaatgttaaacaaattgaaggatttcccaatagttacctgcaacacctaaaggtcactgtttccaaatggtgcaagaactatgcaaacaatatgttggttgctgttaaattcaaggacaggacactattaacagttataacatttttgtatggacctttatgaatctgtgggaaactagagacgcgcctcgtgcc

SEQ ID NO: 156678 - DNA, 601 bp, Homo sapiens
ttgtcttaattacagcaaatctaatccctgcaaaacagtgtttcgactgtaacttccttagcacattttcctcagtaactacagaggcttttgtgtttctgtgtttattagtcacctgcgttacttgcatgaatttccttttcataatctttgttcattttttttctaggcgggttgtctttttcttaccaatcttaggagctccttgtaaaatggggatattatttatgatacaaacatttcttccgagtttgaatatctttcagtttggttccaaatgtattcagcaatatagaattttaaatttttatgcgatgtaatctgtcactcttttcctttggcctatagtttataaatattcattctcaacgatctccagacccactctgtacaatcgcagcacgcttcttcccagaaaggaccggtggaagggagctaggcagcaaacgcctcagtaagaacattctgtgtccttcaaaatggaacagttatggatgacagctttaactacttcccagaaggtacacaaacatgctaaagtcaacagctctccaaattatgctacgtgaaagaagtcagaccaaaaaaaaaaaaaaaaaca

SEQ ID NO: 156679 - DNA, 569 bp, Homo sapiens
ttttaaaagacagagtctcactttgactcccaggccagagtatagtggcacaatcatagctcactataacctcaaactcctttgctcaagcaatcctcccagctcagcctcccaagaagctgggactacaggcacataccatgacacctagctaattttttaattttttgtagagacagggtctccctatgttgctcatgctggtcttgaactcccagtctcaagcaatcctcccacttcggcctcccaaagtggtagaattatagacatgagccaccacatccgaaaaactgcacttttaagtgggaaagaatggacaaggcccccaacacaccttctttagacagactcctctgctgctatatatcagtctctctactgatgacaccagagctctactccaggccagacctctctgctgagcatgagatatataaccaattgcctattagacagtgttagctacatatcccatgatattccaaattcagcatcacagatgcatcttctcaccaccacacaaagaaactgttacttattattaacttagttatgatcaatctcgtgcc

SEQ ID NO: 156680 - DNA, 377 bp, Homo sapiens
ggcacgaggcgaccccgaaagtacagtggctgaggctttcacaccaaccattccgcactgcagcatggccacccttattggtctgcccatcaaggtcaagcttctgcgctcccttcctcagagtttcaaggtcagttggagctgagccccgggagtgagaccaggcattgagggtctactgctgaggatggggactgggagagcatgaacatggataggacatcaaagcggggcctggaaggatccccattatcagataggaaactgggaagaagctttccaagtcgatgtgacaagaataaagatctgagctggaaagtggagaaaagtattgaagagtgtggcaggaacggcattagggagcggcatatgggttt

SEQ ID NO: 156681 - DNA, 558 bp, Homo sapiens
cggtggctcatacctataagcccagcactttaggaagctgaagctggaagattacttgagaccaggagtttgagaccagcctggtcaacatagcaagaccccttccctaccaaaaaaaaaaaaaaaaaaaagaaaacaaagtgctgggattacaggccaccgcgcctggcctacaaagggataatttaaaataccactatagtgttagggaaagcctcttttaatcctggcacttccccatccatttccttaaaagagatatttccaataaagttgcttttccctttttatgttatcagggtatattttttggccaaccatatgctggtaataattatacatttaaaagaatgagataatcagttttactttaaaatgttactgtgatattctagaaattcaccctttgcaattatttaatcttatggtgatattttttaaatgtcatcttaatgggtaaagggtatgcaattttaaaaagcacttttggtggtttgcgagcaaaaaaaaaaggttcaaataccaccatgttaatttgttcagcagcaaaaaaaaaaa

SEQ ID NO: 156682 - DNA, 1005 bp, Homo sapiens
aaagacagggtttccctctgtgtaatcacaaaggcacagtcacagctgatttgcagcctttacctcctgggctcaagtgaatttcccacctcagcctcctgagtagctggaactacaggtgtacaccaccacatccagctgatttttaattttttgtagagaggagatctcactatgttgcataggcttgtcttgaactgctgtgctcaagcgatcttcctgctttgatctcccaacgtgttgggattacaggcatgagcaccacacctggccctatttgccttttatgaagtcttttaataaagcaataaaaatattgaaatgtttttagaagcttctgcacatcaataggcatccttgaagactaattgaggacccctcatttttaagtgctgtgttgttcattaggaacggtccattgtaattttaaagttaacaaagattttgccatttctgtaagtagttatttcttctgaggcctaatatttatacattctaccttatagctagaaggtagaatacggtgttcttcagatactaaggatccaatatttccctagaatcctggatttggtcctcagatccccttcatcaatttagttaatgatttttccctacctaagggtacaagaaaaagaatgtagaacacaaaaatctctgcaaatttctgaagtctgcacccactgtaatattaccatttctgctagtttctgcctgatcctggacatctgcagcctcttaactgaatccaagtcagttaattatcagatccaatccaatcatggatccagtccagtttctgttgtgacttccaaacccagttcggatcagaagtttgctcaaactcggttccaaacagaaatctgtcgagcttcagaatctcagcgagaacttaccacgatatcagttgcttccagaaagcaatggacatcgtgagtctgaggggtaccttgcttggtcactccatgctcctgggcatgacatctgttgaaaaccttagacata

SEQ ID NO: 156683 - DNA, 395 bp, Homo sapiens
agctggcttcactgctcatgtgattatcctgaaccatccaggtcaatgaagcgccggctatgcccctgtattggattgccacacggctcacattgcatgcaagcatgctgagctgaacgaacagattgatcgccgctctgctaaaaagctggaacatggccctaacttcttgaactctggcgatgctgccattgatgatatggatactgtcaagcccatgtgtgttgagagcttctcacactattcacctttcggtcgctttgctgatcgtgatatgagacacacagttgcagccagtgtcatcatggcactggacaagaaggctgctgtagctggcaagggctccaactctggccagaaagctcacaaggctaaatgaacattatccatagtac

SEQ ID NO: 156684 - DNA, 801 bp, Homo sapiens
gcaatgccagtggaaccacgctgcttgaggctctggactgcatcctaccaccaactcgtccaactgacaaggccttgcgcctgcctctccaggatgtctacaaaattggtggtattggtactgttcctgttggccgagtggagactggtgttctcaaacccggtatgtgtggtcactctttgctccagacaacgttacaacggaagtataatctgtttaattgtctccatgaagctttgagtagaagctcttcctggggacaatgtggggctttcaatgtcaagaatgtgtctgtcaaggatgttcgtcgtggcaacgttgctggtgacagcaaaaatgacccaccaacaggaagcagctggcttcactgctcacgggattatcctgaaccatccaggccaaataaacgccggctatgcccctgtattggattgccacacggctcacattgcatgcaagtatgctgagctgaaggaaaagatagatcgcccgttctggtaaaaaggctggaagatggccctaaattcttgaagtctggtgatgctgccattgttgatatggttcctggcaagcccatgtgtgttgagagcttctcagactatccacctttgggtcgctttgctgttcgtgatatgagacagacagttgcggtgggtgtcatcaaagcagtggacaaaaaaggctgctggagctggcaaggtcaccaagtctgcccagaaagctcacaaggctaaatgaatattatccctaatacctgccaccccactcttaatcagtggtggaagaacggtctcagaactg

SEQ ID NO: 156685 - DNA, 1551 bp, Homo sapiens
gcctctcgggaggctgagccagagaaatcccttacacccgggaggcggaggttgcagtgagccgagatcacaccactgcactccagcctaggcgacaaaagcaagagtataaataaataaataaataaagttttatcatcaagtaactaactacgtggacatcccctcctggcataagaaacagaacctatgaagtcaccctatgctgttgcccaatcctgtcccctgaaagaaacctatatcttgagtcttgtatttactattcgtttgcattgtcactaaagatttttacaataagtatatatatatacccaaatcacagtttgacctgtttttttgttttgttttgttttgtttgagacggagtctcgctctgtcgcccaggctggagtgcagtggcgtgatctcggctcactgcaagctctgcctcctgggtccacaccattctcctgcctcagcctcccaggtggctgggactacaggtgcccgccaccatgctcggctaattttttttgtatttttagtagagacagggtttcaccgtgttagccaggatggtctcaatttcctgacctcatgatccgccgtgcccggcccttatttcttaagaatagaaaactgtaggaatttgcatagtagatcacctggtgagacctcagttctatggtgagaaaaattctctataaaagctatatggtccatgatgtcatccaaccccacataagcatataaaatacatgataaggctctccaggaaaaaatattcacaagaaataatgacttctttcatcagcttaaaagtgggaagaacttatttgattaaaaccctgtttaaaatcgattgtcttgttagacttcccctatccataatgaaatcattacagggttctaatgtcaggtggaaaagtgttgactatggagttgtttagcctctgatcctaggataaaccaagcagttaaataatttccaaaagtacaaacagacattcccctcaagttatccgggcttctacaggtacttttcaagtgacccacaagccctatattttaaacagccacagaagtcagaaccaaattcaggtttccaacaaacactgtaaaatgctattcagcaaaagctgcagttccccgtggcagcttgtcaggtggtcagtcagtctcaattactctgggttcctctgcaattgctgtcatgaccgtgagcctctcacgttctacttggctgacagcccaggtctgaggaagtgagagccaacaatcgcttactcagcagcgcattgtgtcgcttcaggtattcaaaggagtctccttgcttttcaacaatttcttctaggcttgaaatagttctgaatccagtctccgaggtaatattgctggggtaagcatagattttttcttcttcaagtatatcaggctctggtttagctttattaaatctccggattttcactgtgtaaatgaggagacatatcatggaacagatgagttccagtgccaagatggccagaatgaggtcaagatacaatctgccaggctctgggaaagagcgct

SEQ ID NO: 156686 - DNA, 1248 bp, Homo sapiens
atgaaggcggcccgcttcgtgctgcgcagcgctggctcgctcaacggcgccggcctggtgccccgagaggtggagcatttctcgcgctacagcccgtccccgctgtccatgaagcagctactggactttggttcagaaaatgcatgtgaaagaacttcttttgcatttttgcgacaagaattgcctgtgagactcgccaacattctgaaggaaattgatatcctcccgacccaattagtaaatacctcttcagtgcaattggttaaaagctggtatatacagagcctgatggatttggtggaattccatgagaaaagcccagatgaccagaaagcattatcagactttgtagatacactcatcaaagttcgaaatagacaccataatgtagtccctacaatggcacaaggaatcatagagtataaagatgcctgtacagttgacccagtcaccaatcaaaatcttcaatatttcttggatcgattttacatgaaccgtatttctactcggatgctgatgaaccagcacattcttatatttagtgactcacagacaggaaacccaagccacattggaagcattgatcctaactgtgatgtggtagcagtggtccaaggaaaatttccagaccaaccaattcacatcgtgtatgttccttctcacctccatcatatgctctttgaactatttaaggctggtcctactcctaactcagcagttcaggtccagaattcctgtaggtggtatggctccattcagagtccagaatgtgctaagagcacaaatgcaatgcgggcaacagttgaacaccaggaaaatcagccttcccttacaccaatagaggttattgttgtcttgggaaaagaagaccttaccattaagatttcagacagaggaggtggtgttcccctgagaattattgaccgcctctttagttatacatactccactgcaccaacgcctgtgatggataattcccggaatgctcctttggctggttttggttacggcttgccaatttctcgtctgtatgcaaagtactttcaaggagatctgaatctctactctttatcaggatatggaacagatgctatcatctacttaaaggctttgtcttctgagtctatagaaaaacttccagtttttaacaagtcagccttcaaacattatcagatgagctctgaggctgatgactggtgtatcccaagcagggaaccaaagaacctggcaaaagaagtggccatgtga

SEQ ID NO: 156687 - DNA, 581 bp, Homo sapiens
tttccagaccaaccaattcacatcgtgtatgttccttctcacctccatcatatgctctttgaactatttaaggtatgatacttcacaataattgaaattttaccttttaaaaagggtttaaccagttatatttttatctcctttattattcgccacaaaacagaagcctcaatatcttttcccaagaatgcttctagtcctcctaagagaaagaaactatacagtcaatgtttgacaaagtacatgtagctcattgtagcatcaacacatatttgagaatgcatcatataattcatgatgtatcaatgctttacagccaagaggaagttcttattattttttcaggtgcccattaaagaactagtcatttattcattcattaagagaggtcatggggtgaatgtttcagtgaatgaggccttgttacctccacccccacaggctggtcctactcctaactcagcagttcaggtccagaattcctgtaggtggtatggctccattcagagtccagaatgtgctaagagcacagtcagcagttccttcaatcatctactttaaagagcatatgaatcacctgg

SEQ ID NO: 156688 - DNA, 1480 bp, Homo sapiens
agacttgaacttgaatctcgaaccactgcatctccgactctgcccagactcttcactccgcggcaccctcaaaccccagcccaggccggggcgcacaagccagccagcgcacctgcagtcctcgcccggacgcgccgcgccccctcggaaccaggctctgctccgagcagccttcgcccctcaagccagccacagtccccgccaggccgggtgggcgtcaagatgaaggcggcccgcttcgtgctgcgcagcgctggctcgctcaacggcgccggcctggtgccccgagaggtggagcatttctcgcgctacagcccgtccccgctgtccatgaagcagctactggactttggttcagaaaatgcatgtgaaagaacttcttttgcatttttgcgacaagaattgcctgtgagactcgccaacattctgaaggaaattgatatcctcccgacccaattagtaaatacctcttcagtgcaattggttaaaagctggtatatacagagcctgatggatttggtggaattccatgagaaaagcccagatgaccagaaagcattatcagactttgtagatacactcatcaaagttcgaaatagacaccataatgtagtccctacaatggcacaaggaatcatagagtataaagatgcctgtacagttgacccagtcaccaatcaaaatcttcaatatttcttggatcgattttacatgaaccgtatttctactcggatgctgatgaaccagcacattcttatatttagtgactcacagacaggaaacccaagccacattggaagcattgatcctaactgtgatgtggtagcagtggtccaagatgcctttgagtgttcaaggatgctctgtgatcagtattatttatcatctccagaattaaagcttacacaagtgaatggaaaatttccagaccaaccaattcacatcgtgtatgttccttctcacctccatcatatgctctttgaactatttaagaatgcaatgcgggcaacagttgaacaccaggaaaatcagccttcccttacaccaatagaggttattgttgtcttgggaaaagaagaccttaccattaagatttcagacagaggaggtggtgttcccctgagaattattgaccgcctctttagttatacatactccactgcaccaacgcctgtgatggataattcccggaatgctcctttggctggttttggttacggcttgccaatttctcgtctgtatgccaagtactttcaaggagatctgaatctctactctttatcaggatatggaacagatgctatcatctacttaaaggctttgtcttctgagtctatagaaaaacttccagtttttaacaagtcagccttcaaacattatcagatgagctctgaggctgatgactggtgtatcccaagcagggaaccaaagaacctggcaaaagaagtggccatgtgaagagggacactcaggacacttt

SEQ ID NO: 156689 - DNA, 316 bp, Homo sapiens
  misc_feature (1)...(316): n = a,t,c or g
gtattttagcagtccatnccaaagacaactataaacgagtgactgggacaagttttgggaatatgatttataaggagaagcgagaatctgttagtaaagaagatctggcaagagctactttagttactatcaccaataacattggttctgtggcacgaatgtgtgctgttaatgagaaaataaacagagttgtctttgttggaaactttttacgtgtcaataccctctcaatgaaacttttgggcatatgcactggattactggtcaaaaggtcaactaaaagcattgtttctngaacatgagggttacttggggc

SEQ ID NO: 156690 - DNA, 2631 bp, Homo sapiens
atgggctatggtgttactgccttcttcatatgggcattcagcagggtcctgagttcttgtcctgcatccaagaagaatgagcttatgctgacagccatggatatatgcgctctttcccttcggtgtgccactgaagatcctggtgttgccatgggccgccgccccgcctgttgttaccggtattgtaagaacaagccgtacccaaagtctcgcttctgccgaggtgtccctgatgccaagattcgcatttttgacctggggcggaaaaaggcaaaagtggatgagtttccactttgtggccacatggtgtcagatgaatatgagcagctgtcctctgaagccctggaggctgcccgaatttgtgccaataagtacatggtaaaaagttgtggcaaagatggcttccatatccgggtgcggctccactccttccacgtcatccgcatcaacaagatgttgtcctgtgcctttagagcgcatgcgagcaaatgtttccaaaattttgggaatatgatttataaggagaagcgagaatctgttagtaaagaagatctggcaagagctactttagttactatcaccaataacattggttctgtggcacgaatgtgtgctgttaatgagaaaataaacagagttgtctttgttggaaactttttacgtgtcaataccctctcaatgaaacttttggcatatgcactggattactggtcaaaaggtcaactaaaagcattgtttctagaacatgaggtatgtgtggagacagtgaatgatgggcagtttcacagtgtggagctggtgacgctaaaccagaccctgaacctagtagtggacaaaggaactccaaagagcctggggaagctccagaagcagccagcagggggcatcaacagccccctctaccttggagctttcccatggtttggcatggacattgggggaactctagtaaagctctcgtactttgaacctattgatatcacagcagaggaagagcaagaagaagttgagagtttaaaaagtattcggaaatatttgacttctaacgtggcatatggatccaccggcattcgggatgtacaccttgaactgaaagatttaacactttttggccgaagagggaacttgcactttatcaggtttccaacccaggacctgcctacttttatccaaatgggaagagataaaaacttctcaacattgcagacggtgctatgtgctacaggaggtggtgcttacaagtttgaaaaagattttcgcacaattggaaacctccacctgcacaaactggatgaacttgactgccttgtaaagggcttgctgtatatagactctgtcagtttcaatggacaagccgagtgctattattttgctaatgcctcagaacctgagcgatgccaaaagatgccttttaacctggatgatccctatccactgcttgtagtgaacattggctcaggagtcagtattttagcagtccattccaaagacaactataaacgagtgactgggacaagtttattgactggctgtgaaagttttgaagaggctcttgaaatggcatccaaaggtgatagcacacaagctgacaagctggtccgtgatatttatggaggagattatgaaagatttggtttgccaggttgggctgtagcatctagttttgggaatatgatttataaggagaagcgagaatctgttagtaaagaagatctggcaagagctactttagttactatcaccaataacattggttctgtggcacgaatgtgtgctgttaatgagaaaataaacagagttgtctttgttggaaactttttacgtgtcaataccctctcaatgaaacttttggcatatgcactggattactggtcaaaaggtcaactaaaagcattgtttctagaacatgagtttggctacaacattggagtcatcagtgctcctgagacagtcatacaggactttctcagttacactttgaaagagaggtcagaagactctccctctgaggttttgctcatgtccccctggccctcgtctgtggccatcttccccaatggtgatatgattggctcctttctgttgcactctttgtcaaccactttggcagcccaaaatctccttaagctgataagcaacttcagcaaagtctcaggatacaaaatcaatgcacaaaaatcacaagcattcttatacaccaataaaagacaaacagagagccaaatcatgagtgaactcccattcacaattgcttcaaagacaataaaatacctaggaatccaacttacaagggacgtgaaggacctcttcaaggagaactacaaaccactgctcaatgaaataaaagaagatacaaacaaatggaagaacattccatgctcatgggtaggaagaatcaatatcgtgaagatggccatactgcccaaggtaatttatagattcaatgccatccccatcaagctaccaatgactttcttcagagaattggaaaaaactactttaaagttcacgtggaaccaaaaaagagcccacatcaccaagtcaatcctaagccaaaagaacaaagctggaggcatcacgctacctgacttcaaactatactacaaggctacagtaacgaaaacagcatga

SEQ ID NO: 156691 - DNA, 1594 bp, Homo sapiens
tattttagcagtccattccaaagacaactataaacgagtgactgggacaagccttggagggggtacctttctgggtttatgcagtttattgactggctgtgaaagttttgaagaggctcttgaaatggcatccaaaggtgatagcacacaagctgacaagctggtccgtgatatttatggaggagattatgaaagatttggtttgccaggttgggctgtagcatctagttttgggaatatgatttataaggagaagcgagaatctgttagtaaagaagatctggcaagagctactttagttactatcaccaataacattggttctgtggcacgaatgtgtgctgttaatgagtaaataaacagagttgtctttgttggaaactttttacgtgtcaataccctctcaatgaaacttttggcatatgcactggattactggtcaaaaggtcaactaaaagcattgtttctagaacatgagggttactttggagcagttggtgcacttcttgggctgccaaatttcagctaaagcatcaggtctctctctctgctaataaatgtcatccaagaggaactaaaaccagaggcattattactgcattgtttgtcactgggaaccaaaggataaaagagtagcataagctgctgaatgttgccatattaaaggagagaacttggtaacgtgaagtatttctcattgaaatgctttcccttttgtatatagccagtgttaaatccttaaatgcaatacagcctctgattattgagcttcctcttaaaaagatttttttattttatgtagccaacattgcagtactgtatgctcaaacacaaatcttaaagtatcggaactgtttagcttatgaaaataatcgactctgaatatttgttacaagtctgttttatgtgttttgattactagtgagcagaaaataacataccctgtattcaaaattactgaaatggcaatcaaagatgatcatttttatgtgattttagaaatgttaaggcaatactactaattattgtaggtttttttaacgtatcacccaaagcatgtatgtgatctttccccattagtatctttttctcaaatgccataattaactgaaatactattattaaattttcatgaggaattctaaaatgaatcctgggaaatgcacgtttggtgatggttgcactttctgtattttacaggaattagtcaatacatgttgaaatgtttaacattttaagatttggaggcttaattactgggagtctgtctaatgaagtcctgggactattggtaatggaatatgatttgagttcactgtgctctttctgtttgtccccactgtctcttccttttcgtccctcctctcctctgtctcactttttgcctgttgctctccttttccatcgtttccctctctttataccccctcattcgccattctttttattgctctcttttgcatctttttctccttttttttcttttttacttctttccttcttttccattttttatccacggtttatcttatcctattgctattttattcctccattttccttatctctttctccactgttcttcttttcttcc

SEQ ID NO: 156692 - DNA, 410 bp, Homo sapiens
  misc_feature (1)...(410): n = a,t,c or g
aagaaatgggctaaggtatagacagcctatttaatgtttaatagctgaaaacttcccaggtcttgctagagacatagacatttggaagctggaaactcaaggagtcccaaatagattcaatctaaagaggtcttcccagagacaaatgatagtcaaactgtcaaaagtcaaaaacagagaattctaaaaacagcaaaagannnnnnnnnnnnnnnnnnnnnnnnnnnnnnnnnnnnnnnnnnnnnnnnnnnnnnnnnnnnnnnnnnnnnnnnnnnnnnnnnnnnnnnnnnnnnnnnnnnnnnnnnnnnnnnnnnnnnnnnnnnnnnnnnnnnnnnnnnnnnnnnnnnnnnnnnnnnnnnnnnnnnnnnnnnnnnnnnnnnnnnnnnnnnnnnnnnnnnnnnnnnnnnnng

SEQ ID NO: 156693 - DNA, 412 bp, Homo sapiens
  misc_feature (1)...(412): n = a,t,c or g
aagaaatgggcaaaggtatagacagcctatttaatgaaataatagctgaaaacttcccaggtcttgctagagacatagacatttggaagctggaaactcaaggagtcccaaatagattcaatctaaagaggtcttcccagagacaaatgattgtcagactgtcataagtcaaaatctgagatattctatttacagcatcagaatcccaatagtctccttaagccgataatcaactttagcatagtctcgatgtactgtatctcagagcatacttcatatctttcttattcctcttatcacatcttaagccagattgatagcagaacttccttgtattatatgttttatctgttaatattactagatttctttttatcatggattgattagttactatctattttctccgccn

SEQ ID NO: 156694 - DNA, 1417 bp, Homo sapiens
agggcacagatgtgggcaaggtgaaggcagcccacgctctatcacacaagaaactgtgcctcaagatgactcaagtgacaacccagtggttggagatcctccagcggctttgcctgcacgaccagctgtctgtccaacaccggggcctggtcattgcctacaacctactggcagccgatgctgagctggccaaaaagctggtggagagtgagctgctggagatcctgactgtggtgggcaaacaggagccagatgagaagaaggcagaagtggttcacacagcccgagaatgtctcatcaagtgcatggattatggtttcattaaaccagtgtcttagacagcgaccctcagggatgctgggagtggtcctgtactgtgcagagtcctgggttggttgggttctcctggagagtcaggtcatctagggatcatagcagtgacaatgaagtctcaatataaaggaaagacttgattgttctctgagttgtgagtcttctcctttgtcctgacagagtttggatgtttcactctctctcttgcttccgtgtctccttatatttgtcatgtttcagaaattcccagaataattttcacccatgattagaaataggttggatcattctttctgtacccattcctgaaggccaggataataggttgaagttctttatattttggaaaatggattttgtggtaaggtaggaactaaccgggtgtgtgcatataaaggttaatgctgttgtatttggatgctgatctgtgctgtttacatgacctctctcccacactatttgagtgagtctgttcaggactgtgtgtttcacctgcagtgctctgtcccagtcccatgcccattcccatcacttcactgtgatggaaatagagtttatgttcaacagtggggcatgacctctgcaatttgcttgggaaagtcttccaagcaagatggacatgatgaatacaaataagatctactcaaagtacttcaaacaaaaaataaataattcattggctcatgtatcttggccacccagggaaggtctgacattgttagttagatctagagtttatgttcaacagtggggcatgacctctgcaatttgcttgggaaagtcttccaagcaagatggacatgatgaatacaaataagatctactcaaagtacttcaaacaaaaaataaataattcactggcttgcatggtgaaagcagatagtgccatcctcactgaccagaccaaggagctgctggccagggtattcctggcactgtgtgacaacccaaaggaccgaggcaccattgtggctcaaggtggtggcaaggccctgattcccctggctttggagggcacagatgtgggcaaggtgaaggcagcccacgctctatcaaagatcgctgctggcttcaatccggacac

SEQ ID NO: 156695 - DNA, 1172 bp, Homo sapiens
acacagtgagagaggcaggcagagaaagagagtaagacagaagaccgacacagtgagagagaaaggcagagagagagagagacagacggggagagaaagagagtaagacagaagacagacacagtgagacaggcagagagggagagagagagacaaagacagagacagagacagagagaaagaaagagacagacagacagagaaagagacacagagagaaagacagagacgaacagagagaaacagacagagagaaggccctagcccagtagcaatacagtgccttttctttcattttctctttcttttcttttctttttttctttcttgtatatctgtatgcatggatgtatgtatgtatgtatgtatgtatgtatgtatgtatgtatgtgtgtatttatttatgtaccgtatttatctggagaccgggtctcactctgtcgcccaggcctgtagtgcagtggtgcgatctttgggtcactgcagcctccgcctgccaggttccagccattcttcccccccagcctcccgagtagctggggttacaggtgcctgccccacggcgcctgactccatttcgtattttcaagtaagagacgggggtttcaccacgttggcccgggctggtctcgaactcctgacctcgggatgacagacgtgagccactgcgttcagtgtacagtgccatttcttagaaaatcactccttcacgggaacacacacttagaggtgacgtgtagagattttatttatttagttagtttagttagttagttagtttgttagttagttattatgtgcgcggggaggtggggggacggagtttggctcttgcctgcccaggctacagtgcaaatggccctaggggacctcaaggagtcaaccctacggcagagaggacaccgtcattctgaacgtaagggccacaacgaaaaggttgcaagggcccgccgcttttaaaggctgaaatccccggcggctcaggcctgtcgtaaccagacactaagggaaggcccaggaaggtgcatcatttgagggtcaggaagttcgagaccagcgtggccaacgtggagaaaccccgtctctactaaaaatagaacgatgagccggccgtcaatggtgtgcgcctgtaatcccagctaccgaagaagaatcactggaacccgggaagc

SEQ ID NO: 156696 - DNA, 1356 bp, Homo sapiens
gtagagggaaacagccactgtgacaacccagagacctggggtcagccttaagtaggaagaaattgcagtgtctatcctgctgccatcagcccttcctgctccagctacagttgggccagctgtggccttagtggatggtctgggtggatggctctgtcaatgtcaggcccgagaacagcctgcggaatgacagcctggggtccttgtgccacctggtggacgggaaaggcagggcggctgcagtttcagaggccagagcctggccctcctgtcatctgctgacttcacagaaggcccaggctacaaaccccacagtttatccaaggaaaatctagttaaaataatccaattggacaagaagccccaggaaggggtatttccaacacttggcgtctcaatgaggataaaagggagggactgtaggttgtccagcataaggagccccagagttctttcaccagcagacagattctccatgtgttttcccactgttaaggactctgtccaaagaacctcagcatcagctccctcaagcttaatgatccaggctgcagaagaaaagtgtcactccagtgagtgacccacggcttcagggagcccacagcagcatcagacccatccaggggctacagggcctgcccccctgcaggtagaaacacagtatacccgtttgtcatctggtttggcaggacccaggaccctcagcaatgagtctgagtgttcaaagcccactttagaacctaaagcattttgggttaataaagcaaaattttgcttatgttatttggtggtgtcaccgcagcttataccaagacaccatggctcagacatgggatcaggacacacctttgagatcccactgttagcaagaaaaggctgtccaaggcaggcagtgtggtagttgtctgattttgtttaccacacgcaagggtcccagggaagtcttgcacagactcttagcaagacaagcagggaaaagagagggtccctggtgggtggaaggattgggaaggggattctgggcctggaagcctgctccttcccctctcagcagtctcaggactactgttggattgcaaacaggatcttttgacccagtcttcggactcattctgtaaatggaggagctgaggtcagaggggggctgtgaactactcaagaccacatgcttgcagtcctacagggcttcccgacccacaggccagctacggattttgcacttttgctccaggccacttgtgtgtgtatgtgtgtgtgtaccactgccatctgaacaaactatgcaataccacctgctcccttccaggagcattttaataaaagattttttttaataacagaaaaaaaaaaaaaagg

SEQ ID NO: 156697 - DNA, 1459 bp, Homo sapiens
ttttttttttttttttttttttttttttttttttttttggactacaaaaaagaattgtatttacagatgacatgaactaatcagatacatccaacatcgtctggaaaacttaatggcatgccataacttaatatcacagtcaacgatgcagaagaggcgtcataattgttttgtcgaagagcaaagccagaagcagaagaagtagaatgaagcaatataaaaatgaaacagtgaaagacaaagggaagtaccacaaaaacgtttcaatgatatcactgaaatgacttgagaaaccagttaggcctctggagctttattattattattattattattattattattattattattattattggcaagtcctgtcatgaaaatgccctgaagattcagacctttgcaatttttccaaagctccttcccactggaacaagtcttaatggaaaagcacaagatgtacagagaagactgggatcacctctcccacggcattggaagagctgatgaaaaggagcagttcctctatcccagagcatcttctgggtggtgacttttttttgcctgtgggccatgcctctctgtcctcacaacagctgcagaatgatacaccgcacctccaacaaagctcacataccctgccgagctcccctgcgatggaggcttccagaatgcatatacgagctgggcatctcagatggatttgatttcaatcaacattagtgcctaatgaacatctttgatatgcaaaatgtctatgctactgaataatacagaatcatctttccccacaaaaactttcttctaggaggttaatggaaatagtcgatctgtaaatgttaatatatctattgtaaagatgaagaaattgagggacagtaattaaaggaatcaaatggatcagaagaactggaaccccataacatcttggggaaagttaatattttatggtctttaataaagcagggctattataatcctcatatggaagtacgctgaaagtttatatctaaagaatattaaaatcacattttatcaataaattttcacatgctgaatgatagcaatataatttttaaatgagaattttaaaatatcaaatagaattatggaccaagcggaaatgcttggtttttacatattttaaacaatattacattatacaattaactcactttaagttcataaaaattcaatctacgttatacataatttggtatgcagatttgctagttttaaatgtagtttaaagtttatgtaagcatgcacaattaagtgaataaaactaggtaaccaaaccactgttggtgaaaaagcaagataagtacatgctctcagtcttgtttgttgtggcccattttaactggtgagtacatggctcccactaattagaacaactgctgtctatttttaaattcatttgctcacaagagccagtgaatgtgtatgtggatattat

SEQ ID NO: 156698 - DNA, 397 bp, Homo sapiens
ttcagagggatctaacccggcacattagtttgaagagcaaaactggagtacaccttcctgagccaaacctcaatagtgcccgccgcattcgcaatattagcggtcaccgaaagagtgagacagagaaggagtctgggctgtagccagccttacggcagattctaaatgcatcttggagaaaagtcatctgggaacaggttattcagctggttagctagactacgcgtgagctgcgcagaggctgactcagtgttggcatagatgacgtgggcgtcgaggtcacggtactcgttgtagtttttctgtgctcgagtaccattgttgcgctgctatgtttctcttatgtgtcttgtttatgtccgtgttggtgtttactgtcactctgttcttcgtttcg

SEQ ID NO: 156699 - DNA, 639 bp, Homo sapiens
gaaaaaggccagacgcagtggcgtgatcttggctcactgcagccttgaactcccaggctcaagtggatcctccctcttcagccccgcaagtagctgggactacaggagtgcaccaccacccccatctaatatttttttgttgttattctagggacgagttctcactatgttgcccaggctggcctcgaactcctgggctcaagcaatcctcctgcgttggcctcccaaagtcctgggattacaggtgtaagccactacggctggcctattattgctgtattctaacttattcatctcctatggctagcctccaagctggaagctgaattgacagttgaaaaataatgacatgtatacaaagtatgtttgaaggattgcagatgcaggggcaccatatgctaaaggagtgttggaagctcactgcagaagatgacaaaagcagactgatatgtattatttgctgaaatataagctggaggcacaggtgaagattgccaaacctaatgaacagtttggcaaataagacaggctgtcaggccatggcagttcagcagtgggcgtgctgcctgtgaaccaagtcatttgttccagaggactacacttaaataccacaaataaaatcttccttgtcactgataa

SEQ ID NO: 156700 - DNA, 357 bp, Homo sapiens
cggacgcgtggggaagaaattattacaggtttaaaaactttaaaaaatgggtgcagtcctaaaatcactttgtaatgctagcataatcttgataagaaatgctaacaaatgcaataacagaaggaaaagctaccagccattttcattcatgaatatagatgcaaaagttttaaataaaatataagaaagcattatgaccaggttatatcttcccgggaatataagatacaatatcatcaaatttaacattgattcataataaaaatttgttaaaaaatgatgcagaaagaaaagaaatccttataacattcttagaataaacagttgaaagtgtttcctctatgatcagtaagaggg

SEQ ID NO: 156701 - DNA, 1157 bp, Homo sapiens
gagaactcccggtagctatgccagaaaagtactttcttcacaggaggtgttgaaataatgccggataaatgcaagtaaggtcaatatctccctcttggtctagatcaggagctggcaaactttttctttaaggagacaagtagtaaatcttttaggctttgcaggctatactgtccctgtcccaactattcaactctgccaagaaagcagtcccagacaataccataaatgaatgggtgtggctatgctctaataacattttgtttatggacactgaaatctgaatttcatagaattttcaggtgtcatgaaatattgttcttcttttgattttctgcccaatcatttgaaaacatataaaccattattagctcacaggttgaataaaaacaggtggcaggccaggttttattcgtgggacatagtttgccaacccttgatctaatggtccttttatagtccatgttgtaaaatgtataatatttttaaaatccccgttacaatatggcctactttatttaaaaaaacaacaaaaacgttccagttaaaaataattcctctttccttccccacaaccaagggccatttttactaaacaataagctatttcctttaattagaaaattgatcaaggatatacaatgagtctctggcctcaatttatgaacccatgagccaaatatgcaagaagactcaaaatttgccacccagccaaagaatctactggcttacaatgttaaaaatttatttggaagtattcctgcacacatctcagcatcggtaatccagagttataaaaaataatgttggagcatttgtattctttttttgaggcggagtctcgctctgtcatccaggctggagtgcagtggcgtgatctctgctcactgcaagctccgcctcctgggttcacgccattctcctgcctcagcctccagagtagctgggactacaggcacctgccaccacatccgactaattttttttgtatttttagtagagacgaggtttcaccgtgttagccaggatggtctcgatctcctgatgtcgtgatctgcctgccttggcctcccaaggtgttgggattacaggcgtgagccactgtgcccagcccagcatttgtattcttaatagaaaaaggatggatacatctaaat

SEQ ID NO: 156702 - DNA, 407 bp, Homo sapiens
cccacgcgtccgcccacgcgtccggccacgcgtccggaggagctgagggaaaacaggccgaagtggctaaccaagactctactgaagacttacctgcggaaaacggtgaagcgaagactgacgatagtccagcctctgatgaagcaggcgagaatgatgcctagtctgattaatagccatataccatgtcttatcagtggttcctgtataccttcttggacaatccagaggaacaattttatcaactattgtgtatatgcaagttttttagcagctctagaaacatttttatgaaggagggaatcccacctcatgcgattttgcaagtgtaaatgctttgttttaataggcggaatcatttgctggttggccattctttggcacagccagagaatagagtgagattg

SEQ ID NO: 156703 - DNA, 913 bp, Homo sapiens
taataaacatccgattttatttacaaagcattaaagcttcagcaagaagtacccaaggctaagtctcatcttgtacaaaactacagattttttttttttttttttttgagatggagtcttgctctgtcacccaggctggagtgcagtggcgcaatctcagctcactgcaacctctgcctcctggattcaagcaattctcctgcctcagcctcccgagtagctaggattacaggtgcccgccaccacgcccagctaatttttgtatttttagtagagacggggtttcaccatgttgaccaggctggtctcaaacacctgacctcagatgatccaccagcctcggcctccccaagtgctgggattacaggtgtgagccaccatgcccagcccagaatatttttaaaaacaaaattttggggggtggcagggcagggatgacaaaaaggaagaagagaatatacatatattgtacaaatccaaataattcaaattgaaatggataggaggttttttaaaagttgaaaaaaaaaattccaaaaacataaataattattaggagctactgccagagacaatctgacagggctgaagatgattttctcagtagcccagtttaggaggtggacatagccacaaacatccaaatgcacaggcagaggaaaccaagctacttcacacatggaaagatggcagaaaccctctaagtcccatagtttgcacactgctgcagtgtacagtgcagaggactggaatggatataatgtctgcaaaacaaaaacatgtctagtgagccatctactaatctcaaccactggtctaactcatgacagtctcaaaatgaatatttaagaaaaaagtagtggcatctaaaaatatagacgttttgcaactgactcagggagagctctttctt

SEQ ID NO: 156704 - DNA, 362 bp, Homo sapiens
  misc_feature (1)...(362): n = a,t,c or g
gaaacctgagtgtggtagagaggggatcctgccatgttgttcctcatcagcctggccagagggcagctttagaccttttcaaatgaatctgggttcttttctttcnnnnnnnnnncnnnnnnnnnnnnnnnnngaaaagggacttttcctttgccccccggtttgaagcccatatgggaaatctaatttattggaaccttccgcttccaggtttaaacaatttttctgccttggccctttaaataactgggattaccggctttttcccccattcccgggaaattttggggtttttaaaaaaaaccgggtttttcccttttggcccagtttggtctaaacccccgattccaggggaatccccg

SEQ ID NO: 156705 - DNA, 395 bp, Homo sapiens
tggttggaaggacatgttcaatgtgaacgtgctggccctcagcatctgcacacgggaagcctaccagtccatgaaggagcggaatgtggacgatgggcacatcattaacatcaatagcatgtctggccaccgagtgttacccctgtctgtgacccacttctatagtgccaccaagtatgccgtcactgcgctgacagagggactgaggcaagagcttcgggaggcccaaacccacatccgagccacgtgtctcaaacccgaggatgtggccgaggctgttatctacgtcctcagcacccccgcacacatccagattggagacatccagatgaggcccacggagcaggtgacctaatgactgtgggagctcctccttccctccccacccttcatgg

SEQ ID NO: 156706 - DNA, 363 bp, Homo sapiens
gcgatttttcttttttaatgatcaccatgaaatccactgggccaggcctggtgttctgctgccatagtcagagtcagagtggagggatgaccccaggaggggacaagaagccaagactgggccacagacgttgaggtgcaagaagatggggattttggccacaactcctttcccatgtcaaagggaagacactgagagcagacaaaggccaagtgcccaggggcacatgaacaagttaacaagtaaaacaattagggacaccacctcctttccccagcccatttttcacatttacaactgaagcaatttgacaagatgatataaaaatctcaaacaaattttctagcccctggtcggggtgtg

SEQ ID NO: 156707 - DNA, 1538 bp, Homo sapiens
atggagcggtggcgcgaccggctggcgctggtgacgggggcctcggggggcatcggcgcggccgtggcccgggccctggtccagcagggactgaaggtggtgggctgcgcccgcactgtgggcaacatcgaggagctggctgctgaatgtaagagtgcaggctaccccgggactttgatcccctacagatgtgacctatcaaatgaagaggacatcctctccatgttctcagctatccgttctcagcacagcgctgtagacatctgcatcaacaatgctggcttggcccggcctgacaccctgctctcaggcagcaccagtggttggaaggacatgttcaatgtgaacgtgctggccctcagcatctgcacacgggaagcctaccaagtccatgaaggaagcggaatgtggaccgatgggcacatcaattaacatcaataagcatgtctggccacccgagtgttacccctgtctgtgacccacttctatagtgccaccaagtatgccgtcactgcgctgacagagggactgaggcaagagcttcgggaggcccagacccacatccgagccacgtggcagcttcggagggaggaggccgctgccggatatcaggcagccatcactgtgaagctggggttctgtggcctccatcctctcccctcgacctccccaagacctggcaaagctcagcccctgagaaggccctctctgttggcccagtgcatctctccaggtgtggtggagacacaattcgccttcaaactccacgacaaggaccctgagaaggcagctgccacctatgagcaaatgaagtgtctcaaacccgaggatgtggccgaggctgttatctacgtcctcagcacccccgcacacatccagattggagacatccagatgaggcccacggagcaggtgacctattgactgtgggagctcctccttccctccccaccctttatggcttgcctcctgcctttggattttaggtgttgatttctggatcacgggataccacttcctgtcaacaccccgaccaggggctagaaaatttgtttgagatttttatatcatcttgtcaaaattgcttcagttgtaaatgtgaaaaatgggctggggaaaggaggtggtgtccctaattgttttacttgttaacttgttcgtttgcccctgggcacttggccttttgtctgctctcagtgtcttccctttgacatgggaaaggagttgtggccaaaatccccatcttcttgcacctcaacgtctgtggctcagggctggggtggcagagggaggcccttcaccttatatctgtgttgttatccagggctccagacttcctcctctgcctgcccchtctgcaccctttcccccttatttatttccttttcggctccccaggccaagtcttggcttcttgtcccctcctggggtcatccctccactctgactctgactatggcagcagaacaccagggcctggcccagtggatttcatggtgatcattaaaaaagaaaaatcgcaaccaaaaaaaaaaaaa

SEQ ID NO: 156708 - DNA, 653 bp, Homo sapiens
gagacaaggtctggctctattgcctaggctggagtccagtggtgccgtctcagctcaatgcaacctccacctcgcaggctcaagctatccttccacctcagcctccccagtagctgggattacgggtgcacaccaccaattgcccggctaatttttgtagagacagggtttcaccatgttgcctaggctggtctcaaactcctgagcttaagcaatctgcccacctaggcctcccaaagtgctgggattacaggcatgaatcaccaggcccagccagtaatttcaatattcaaatcttcctcatttggctagtagtcatcgctgctactctgcaccacagaattcagtcaagaaaccttcccaaattttatgagttcttcctcttcatgacagttcccagttgagaggatgcaattcttagattatatcaaaacatctgttttgctattttggttctgtttgttatccctacatagaaacgtcccaaaccacaggcaagcccatttctcagagagaaaattttaaagaagttttcaaagactttgcttataaattatagtactaatcatcaaatactcactgagcacctattatgccccaaaccggagattgttgtttctcaaaaaccgctcctctgcatggttcctaacttc

SEQ ID NO: 156709 - DNA, 508 bp, Homo sapiens
  misc_feature (1)...(508): n = a,t,c or g
caattccagggcctcatcacactgggctggattcatactcaccccacacagacttcgtttctctccagtgtcgacctacacactcactgctcttaccagatgatgttgccagagtcagtagccattgtttgctcccccaagttccaggaaactggattctttaaactaactgaccatggactagaggagatttcttcctgtcgccagaaaggatttcatccacacagcaaggatccacctctgttctgtagctgcagccacgtgactgttgtggacagagcagtgaccatcacagaccttcgatgagcgtttgagtccaacaccttccaagaacaacaaaaccatattcagtgtactgtagcccctttaatttaagctttctagaaagctttggaagtttttgtagatagtaggaaagggggggcatcacctggagaaagagctgattttgtattttcagggtttgaaaagnaataactggaacatattttttagggcagttcagttt

SEQ ID NO: 156710 - DNA, 514 bp, Homo sapiens
ctcagaaagggaatcgcaaataaggagggattaccatatatcctcgctaagagtcctctgactctttttctctcctcagactcaccccacacagaccgcgtttctctccagtgtcgacctacacactcactgctcttaccagatgatgttgccagagtcagtagccattgtttgctcccccaagttccaggagtgagtatagagggcatggttctgggtgtttcaagggggtagtagggaagaaagcctcaggggaaaaggtctctattcttgtggacttgtcctttgtaaaataccatagattataatgtaagttggttattcctaaagggcttccttttaagcccccatatcatgatttatctatcatgcttgttcaaaaagatatccaagtaacaacttagttgcttttctaagaaaagtctacaagaaatttgaagtgtttgacttgaagcgataggaatgtcaagagttctctgttggattagaaagtttcaaaaacataaaatataaa

SEQ ID NO: 156711 - DNA, 276 bp, Homo sapiens
ctcccaaagtgctgggattacacgcatgagccactgtacctggccaaaatctcctaatgttttaagaaagtttacaaatttgtgttgaactgcactctagcctgggtgacagagtgagactctgtctcaaaaaaaaaaaaaaaaaaaaaaaaattggtcaaatgtggtggcacacacctgtaatccaagctactcgggaagctgaggcagaattgcttcaaactgggaggcagaggttgcagtgagccaagattgcaccatagcactccagcctgg

SEQ ID NO: 156712 - DNA, 531 bp, Homo sapiens
tcacttttcagtttcttcatgatctctccaaccgaccagcaggtccactgttgggcctggcttaagaaacacatgccgaaagacagcaacctgctcctggaggacgtcacctggaagtacacaggtacgggggttcgggctctctatggggatgtagagcatgaatcctggctctcctgtgtgcgtcatgctcatcacccggatcccctttgcatagcccacgctcatctccatctcaggagttttagccaagctgatggtagagagtggaggaaagtccttgacaagcacaaaatattcctctttgccaggtccttgtgttagtcgagggtagcaggcacaatgaggacaaggcaaggtcttctctatggggatgtagagcatgaatcctggctctcctgtgtgcgtcatgctcatcacccggatcccctttgcatagcccacgctcatctccgttgttgtatggttctctaactccatcatttccatttcagactcagcatatgctgagttccacctgttgaagggcat

SEQ ID NO: 156713 - DNA, 810 bp, Homo sapiens
tttttttttttgagacagagtctcgctctgtcacccgggaggcggaggttgcagtgagttgagatcatgccactgcaatctagcctgggtgacagagcaaaactttgtctcaaaacaaaaagaaaagaaaagataattactttatacttagcttgtcttacccatgagtgacgggctgcatgtggcccaggacagttttgaatgcagttcaacacaaatttgtaaactttcttaaaacattaggagattttggccaggtacagtggctcatgcgtgtaatcccaaagcgttgggattgcaggcgtgaaccaccatgcccagccaagatctacactattatgtcaccccagaaagtgaactctcagtcttcccagccagtctctttcttatcataggttagcttgcttattctggaatttcgcgtatacagatgcatgccatgccataggtactcttttgtgtctgctttgttctgctcaacaccatgtttctgaaatcattaccattgttgtatggttctctaacttcatcatttccatttcagactcagcatatgctgagttccacctgttgaagggctatctctgtttaattcaccatcttgaaagaaacatttaaaattgagatgttttcaagaatatatagttaaatcctgaggaatcgacgtagaaatgttatcacaagctgtctgaacttactcaggggaagtcttcgtcttcactcacataagagtctactggaattaatatcaacaatcttagagaaaatcccacactattcatgccattttcatgatctccaccttggtaa

SEQ ID NO: 156714 - DNA, 1376 bp, Homo sapiens
  misc_feature (1)...(1376): n = a,t,c or g
gcatgttacctgactggagactagagactatttccattataagccttcagaaacccaaccacgtctttactgtgtctagctttttaaatactgattggttagttttatttttgcccacagtttcttgggcaaaaaggttcttcattttgtctgaaaaagaaattatttgccagaggtatttggagcctctttgaaggggagatagagtgggggtgggttgtggggagggtggagttattggggttttggggttctgtttccatacaacattgtttatttccgattcctcagaagatcctttattatgaataacctcagtgtaatgttaatttcctgtccccatgtcaaaattgtcaccctaagcctttttttttttttttttttttttggagacgggctcactctgtcagccacgctggaagtgcagtgaaatgatcttgactcatggcaggcttgacctcctgggctcaaggaccacctcccaagtagctgagaccacaggtttgccccatcacacctggccgatttttattttttttgtagagatggggttgtccaggctggtctcaaactcctgagctcaagcaatgtgcccgccttggcttcccaaagtgctgggattataggcgtaaaccactgcacgcagcctaccctctgcctttttaagatgatgtatttatttaatttttgccatcattgggtgcttcaccttcctgcgaaggaaattccagagcctgtatttaagctacctagggttttttacactccctttaattgcctttccaaatagtatctcatttgggggtactctagtgtcctatacctcttgggaaacgaaagagggggccccaacctacaactaaggaggggacaaaccttggaactaaggtaaggaccttacacacccagaaagaacactggggccctccttcttcaggggacaatgcagtaggccacttggcttgtgggaatttactgaaggctattttcctgttaacttctagttaactttaggttttgtattttcaggcaggaggtgcggttctgtaatgttgggcctttgacttcacagtactggagagctgttcacacagatgtttagacctttctctctctctctctctctgtgggntgtgtctctctctcttttcttctttctcaacaactctttcacagagggcagtcattttgaaaggttgaaatatttgggcctttaccaaagagctttttttttccttaaggcaaaatcctttcaggaaaggaaacaaagggggaaggggcagattaaggaatgcatatgtccccaatccacttctatagggagtttaaatccatattcacatggaggtaaaatgatggggaggacctctttaagg

SEQ ID NO: 156715 - DNA, 465 bp, Homo sapiens
aacacattcaactttgcagatgacttatacacacacacacacacacacacacacacacacacacacagttttatttattttttaaatgataacattcagcatgttgacaaggataaagagaactatgacccttaaacatgtcaggtagaacgtcaggtagaatggcaaatgcaccaactttctgaaggtaacatgccaataagcatcaagaatcaagaaccttaataattttcagttcccttaaatttacttttaacttatttaaaaataattataatttttggaaattatttcaaggaattaagagagggatatgctttatgtgtatttctttcaaagtaattttttaaataaccagtaattatctggctttttcagagcactaagtgaatccccagcatatatgatgaacgcaattagcaaagctctgagttccccacagatgttggcccgtggtctgtgtat

SEQ ID NO: 156716 - DNA, 2142 bp, Homo sapiens
ggtcgacttttttttttttttttttaaattaagagacagggtgtctcaatgttgcccaagctggaagttcagtggctagtggctattcacaagaaccgatcatcgcacactacctcaaactcctgggatcaagcaatcctcctgcctcagctttccaagtcgctgggactataagtgtgtaccacagcatgtcagctctctctctccttcttgacctaaagcctagcataaaattagctaagtagaattggttccaaagatgcctgcatcagtatctcccatcccacataatttctgtttgattttgccattcacccataaaatgggtggggatctacctcccctccttggcaaatttgaggctgggccctttggatcctgtctaaggatctgaagccagatattaaggtacttcattaatttccatggtttggtcctctatgcaacctagcaatcaagccagaagtcaaaaacatactgacatagtttggatgtgtccccacccaaatctcaccttgcattgtaataattcccacatgtcaagggtggggccaggtgcagataactgaatcatggggacggttccccccatactcgttctcatggtactgaataagtctcatgagatctgatggttttataaatgggagctcccctgcacatgctctctcctgccttgccactatgtgagacatgcttttccatctccttgccttccaccatgattgtgaggcctccccagccatgcagaactgtgagtcaattcaaaccctctttcctttataaattacccagtctcaggtatgtctttatttgcagtgtgagaacagactaatacaataagttgatacccagtagagtggggtgctgctgtaaagataccccgaaaatgtggaagcaactttggaaatgggtaacagggagaggctggaacagtttggaaggccccagaagaggataggaaaatgtgggaaagtttggaacttccctcgagacttgttgaatggctttgacccaaaatgttaatagtgatatggacaacaaggtcccaggcggaggtggtctcagagggagatgaggaatttgttgggaaatggagtaaagtcactcttactatgcaaagacactgcaggcactgtgcacctgtattagaaacgggcataagataggcgggaaagagtcaaaataagaatttttttctagagttccctagagatctgtggaactttgaacttgagagagatgattttaaggtatcttgacagaagaaatttcttaagcagcaaagcattcgagaagaagcagagcataaaagttcagaaaatttgtagcctgatgatgcaacaggaaaagaaaaatctattttctcaggagactgggttgtagaaatttgcataagtaatgaggagccaaatgttaatcaccaagacaatggggcaaatgtctccagggcatgttagagaccctcacagcagaccctcccatcacaggccaggaggcttagaaggaaaaatggttttgtgggtccagaaccccctgctgtgtgcagcctaggaacttggggccctgcatcccagctgctcctgccataggtaaaaggggccaaggtacacctcaggccatggcttcagagggtgcaagttccaagcctttcaggttctaggtggtgttaagcctgcagatgcaccgaagtcaagaattaacgttcatgaacctccgcctagatttcagaagatgtatgaaaatgcctggaaatccaggcaaaagtttgctgtgcacgggagcgggggggcctcatggataacctctgctagggcagtgtcaaagggaaatatggggttggagcccccacacagagtccccactggggtactgccaagcagagctgtcacaaaggggccaccatcctccagaccccagaatggtagatccactgacagcttgcactgtgtgcctggaaaagctgcagacactcaatgcagccagaagggggggccgtaccctgcaaagccacaggggcggggctgcccaagacccctgggaacccacttcttgcatcacctagatgtgacacatggagtcaaaggaggtcattttggagctttaaagatttgcctgctgggttttggacttgcatggggc

SEQ ID NO: 156717 - DNA, 382 bp, Homo sapiens
  misc_feature (1)...(382): n = a,t,c or g
gcctccttaagcagaataaacattagtcaagaattttgtatccaacaaaactaagtttcatgaatgaaagagaaataaagtctttttcagacaagcacatgctgagggaatttgtcactaccagaccagacctacaagaaatgcaaaaaggagttctaaatcttaaaacaaaaggttggcatgcaccagaatagaacctcttgaaagcataaaactcacagggcctataaaacaataatgtaatgaaggaagaaaagtatctaggtaacaatcaacatgatgactgtaacagtacctcacatctcaatattaacattcaatgtaaatggtctaaatactccactcnnnnnnnnnnnnnnntcacaggctgcgcgcaggggtg

SEQ ID NO: 156718 - DNA, 1862 bp, Homo sapiens
attaaataaaatcattttatcatatggctttcaaaagacaatgagtgaaaacttaaggcaatacaataagtcatatttatgagtacgttcaagaattcacaaaaaagggtacaattctggcttctctttaatcattaaatttcagtttttacaaataattcaggttcaggttttgagggggaaacagttcttgtattattacatgctcatttttcttctgtaaatgactctattggctagatttacaaacattgtcacagaaacaaattttttaagccatagatcactgcatttatatttacaaaaaagccataaacatgcatttctcctttattaggacttaaatagatgcttgaatattaaggcagtgatgattctaaaacataatgaaattctaagttaaggctttatgtttcttttgaaacccacactcataggcaactgtgaccaaaccaaactcttacctactaggttgagctcatctgcccgggatatgttatttatccattaccaacacttcttttgtgtcaaatgtatggggataggaattagtagcaaaaccatcaatttactttaatgaatcattggtccccttactaggttttgaggatttagctttcagtaatacaggcatgtgccacagaaaggagcatgtcgtgtgtgtgtgtgtgtgtgtgtgtgtgtgtgtgtgtcaatgtggagaacttacaggctgcactgattccctaacttgactggaacttagcccaacaattaagaatcccaggatctcctaaataacagaaaatcccccaaagccatacttgatcatgctcctacctcaaaacacacaaagcattccttgattattgaagcaataggtcttcacccttgttttctttgaagactggtattattcacttaagaaaaaataccaaaatgcggattaccatattttagatggaatctatcctataattgcttagcttcaaggcacaagtaatatccttgctagatacttttttcttattcaaagaaaagataaagaatggtgaatggaaggaaattcactttaaaataattgtagattgcactcctgccctatcaagcttagtagaagtgcaaagtattgaaacctaatcgggggatgcccttttcccactttttttcttgtttaattttagagtgacaaaactcagatccagcttgtggatgcacttggggaaacagctcccagagccccccaactctcgccctactgtggagacccagaaaggatcttcataggacacaccccaagatgaagtccataggcatgtttccataactccctgttcccaaggtttggataacctacgctcatttagcaggaacatttaactacgtgcttgttgctggcgactttttttttttttttttttgagatagggtcttgccctgttacccaggttgggagtacagtgccaagaccatggctcatggcagccccaatctcctcgagtgatcctctcacctcagccttccaagtagctgggatcacaggcgcatgccactgtgcctggctaattaaaaaaaaaaaaaaaaattccagagacacggtcttcttatgttgcccaagctggtgttgaactcctgggctcaagtgatcgtcctgctttggcctcccaaagtgctgggattacaggggtaagccaccacacctggcccgctgctgcttccctagccgataattttacatcaataaacctcttgtgtgtaaagtgctatacacttgtatgctggtatcaatagtagttcatgtagcgaaagaggttggcaatgattacatgaaaactggcttcaaagctaaaagacagttgtagtttttccctggtgtcctttaa

SEQ ID NO: 156719 - DNA, 424 bp, Homo sapiens
  misc_feature (1)...(424): n = a,t,c or g
cggacgcgtgggatttaaatgtattgctaatttttcaaggaaaagtggaactaactatagaggaattaaaggaattttacccgttaactgttggatttttaaaatccgaggactttcaggtggtgnnnnnnnnnnnnnnnnnngaaagggagtttggttttgccccccacccgggggggctttgacccaatttgggttaattgaaccctccccctcccaggttaaagcatttttcttgcttgggcctcccaagcagttggaataaaaaggccattgcttgccacggggccaagtaaattttggaattttaacaaaactgnnnnnnnnnnnnnnnnnnnnnnnnnnnnnnnnnnnnnnnnnnnnnnnnnnnnnnnnnnnnnnnnnnnnnnnnnnnnnnnnnnnnnnnnnnnnnnnnnnnttgccc

SEQ ID NO: 156720 - DNA, 491 bp, Homo sapiens
  misc_feature (1)...(491): n = a,t,c or g
aggagggattccccaggaccctgctgaccactgagaccntcggacgaccccgcgtncgaaagcagtggacaagaaggctgctggagctggcaaggtcaccaagtctgcccagatagctcagaaggctaaatgaatattatccctaagacctgccaccccactcttaatcagtggtggaagaacggtctcagaactgtttgcttcacttggccatttaagtttagtagtaaaagactggttaatgataacaatgcatcgtaaaaccttcagaaggaaaggagaatgttttgtggaccactttggttttcttttttgcgtgtggcagctttaagttattagtttttaaaatcagtactttttaatggaaacaacttgaccaaaaatttgtcacagaattttgagacccattaaaaaagttaaatgagnnnnnnnnnnnnnnnngggcgcccgttttaaagaatccttgggggggccaaactttacccgggctg

SEQ ID NO: 156721 - DNA, 905 bp, Homo sapiens
caaataagcgccggctatgcccctgtattggattgccacacggctcacattgcatgcaagtttgctgagctgaaggaaaagattgatcgccgttctggtaaaaagctggaagatggccctaaattcttgaagtctggtgatgctgccattgttgatatggttcctggcaagcccatgtgtgttgagagcttctcagactatccacctttgggtcgctttgctgttcgtgatatgagacagacagttgcggtgggtgtcatcaaagcagtggacaagaaggctgctggagctggcaaggtcaccaagtctgcccagaaagctcagaaggctaaatgaatattatccctaatacctgccaccccactcttaatcagtggtggaagaacggtctcagaactgtttgtttcaattggccatttaagtttagtagtaaaagactggttaatgataacaatgcatcgtaaaaccttcagaaggaaaggagaatgttttgtggaccaactttggttttcttttttgcgtgtggcagtttttaagttattagtttttaaaatcagtactttttaatggaaacaactttgaccaaaaatttggcacaaaatttttggagacccctttaaaaaagttaaatgagaaaaaggatttgggggggggcccacaaaacattctcctttccttttgaaggttttacaatgcattgttatcattaaccagttttttactactaaacttaaagggccaattgaaacaaacagttttgaaaccgtttttccaccactgattaaaaggggggtggcaggtattagggataatattcatttacccttctgagctttttgggcaaacttggggaccttgccagttccagcagcctttttgtccactgctttgatgacacccaccga

SEQ ID NO: 156722 - DNA, 949 bp, Homo sapiens
  misc_feature (1)...(949): n = a,t,c or g
tttgagacaagggctggctctattgcccaggctggagtgcagtggtgccatctcggcttactgcaacctccacctcctgggctcaagcgatcctcctgccctcaaccctgagtaacctgggactacaggcgcacaccaccnagccctggctaatttttgtattttttgtagaaaacgggatgtcatcatgttgccccaggctgtctcaaacttgtgagctcaagtgatttgcccttcttggcctcccaaagtgctgggattacagacaggcatcagccaccgtgcctgggcccaaaattatggactttaaggaaactgttgggagatatttttctgtggtttcatgataatctgggctatactctgggtaggaatacccacgaattttccacatcaagggcagtaataataacagtttttagaagttttaaacattcaacaccggatttctcaggttaatgtctaggtaaaggaccccgcagggtgcctcccattcccttaataacactgtgggcatcccctttttcctcccttactcataatgaatatgagaattaaaccactattgtgtttttcttctaaaatgaagggtagggttgtgccagaagaagagatacaggaggttagtaggctctggaattcaatttccaggtgtggttttcacaaatgaacagtctcttaagttagtatctctctgaatataaaaagaataaataccatacactgatgataatgggataaaattattacctagtttaatcaagctgctttcctgaagaaaatttcagcatgagtttatctttaaaggtatactcacccatcatttataatttctgttttggatgatagttctgaccaccaccttttaatgactgcttgaagccagtttaaaccaactataacatatctgaaatcccattttgttacaaaattcaagtgttttcatcca

SEQ ID NO: 156723 - DNA, 736 bp, Homo sapiens
  misc_feature (1)...(736): n = a,t,c or g
tttttttttttaaagaaacttggattgttttaattggtttaaatgcagggtatatgtaaacactgcaaatactgatatacttttagttcatttttgtacttttttacattttttccattagataattctaagcctaaaatatttttctttttctttttctttttcttttttttttttaaagaaacttggattgttttaattggtttaaatgcagggtatatgtaaacaactccccagaaatgagaggcacttctcggaaatacaataacccatgtcactagactagcaaaacactcagtgcttttgacttgatgaattgaatgagttcatgattcaactttctaatgttgtctacttgaaaaatagcaagattcttatctgcagcatttaatgcacnttagaggttgtattggataggcatatcagatatcataaaattaaaattgtgcttatgttaattctgtaatagacctaactttaaaacacctcatgttattcactaggagctatgatctagtcgtgacaatattggttaaaatagtcaatctgaggcagaaagtaaacaagcaaagtcacttttgcaggctttttaaactgtataacacatgaaattatgactattccccagattatgcaaccagcttcaatttaaaaagctgggaacaaatattatgaggcgttacttctcaatttctttctttttcttttttttttgaaacggagtttcccctcgtgc

SEQ ID NO: 156724 - DNA, 737 bp, Homo sapiens
ttttttttttttgttaacttaatatatacttattttaatattttttatatttttatcaacataaaataggtaaatatagttcacatacaataataaatgctaaaacatttacaaattaaaataaacataaaaccaataaaatggaaattaaccatcattaacataacaaataatgctgttttgctcaaacaaagtagatcacaagtatttggtttaatagcaaaaagctgtagtttcagatcccattctgtaaactgagtagttttactttaataataatgttgagaatgcttgttcacataagtatcttattcaaactggtattgatcaattcaagcctttctttcctctttcaaggtaattagaacataatatttttctttcttttgagactgactctcgctctgttgctcaggctggactgcagtggtgcaatctcagctcattgcaacttttgcctcctgggttcaagagattctcttgcataagcctcgtgagcaggtaaaaagcattctgcggtccgccacagcttcttaactttacgccaatagtacaatactgagcgaggaatgccagtaagactgttgcttagcaacttcagtttacttctttctttggcactcctgctgagaactccattgggtttcaaatcttcttctatttcaccttttctcttttgcaaatcattttgcttctttttgtaagttggcttaggttgtcttttacccacgcgtccg

SEQ ID NO: 156725 - DNA, 539 bp, Homo sapiens
ttttttttttggagacagagccttcttgttctgtcgcccaggttggagtgcaatggcctgatcttggctcactgcaacctcaccttcccaggttcaagtgattctcctgcctcagcctcctgagtagctgggactacaggcatgcgccaccacactcagccaatctttatatttttagtagagacggggtttcaccacattggccaggccggtctcaaactcctgacctcaggcgacccaccctcctcagcctcccaaagcggctggattacagtgtgagccaccgtgcccagccctggccatactttcgtaacaaggaagaagcaaggccgaatcctttcttttcataaagatgaatgcatgataaaccaataactttcatctgttaactgagctgcatataattagagacctatctcaagacatactagaaattaagaaactacaaaatgttattcccctctctgcctctcctatttgtcaaaagcaacaccatgctcatttatgtaggcttggcaccacctgaccggacgcgtggg

SEQ ID NO: 156726 - DNA, 411 bp, Homo sapiens
cagtgttttctttttttaagcttggatattttttactttaaaaattgattttactgaaaattcaatacttcaacctgttaatgaaatgttgttttagaatcaaagggaaacttgaagaacagagaccagaaagagtaaaaccttttatgacaggggctgcagaacaaatcaagcacatccttgctaatttcaaaaactaccaggtaaataccttaagtatctggatcaaaggattgtacaattttaactgcaagagcaaaaattaagttgattaatcttcaattctatactagtattccaggtgtagaaagtggctttcccagctcgcaggtgtttccaaatcttgtcttctgattgaaaatttgcttcccagatgacatttctcagtttttctttttgtgaattgcttaa

SEQ ID NO: 156727 - DNA, 1048 bp, Homo sapiens
  misc_feature (1)...(1048): n = a,t,c or g
gagaggtttctcgcgctctatgaattcggcacgagcccccctcccccgagcgccgctccggctgcaccgcgctcgctccgagtttcagggctcgtgctaagctagcgccgtcgtcgtctcccttcagtcgccatcatgattatctaccgggacctcatcagccacgatgagatgttctccgacatctacaagatccgggagatcgcggacggggttgtgctgggaggtggacggggaagatggtcagtaggacagaaggtaacattgatgactcgctcattggtggaaatgcctccgcgtgaaggccccgatgggcgaaggtaccgaacagcacagttaatcactggttgtcgatcattgtcatagaacctatcacctagcagtgaaagcaagtttcacacaaagaagcctacaagcaagtacatcaaacgattacatgacaatcaatcaacagggaaacttgaagcaacagagaccagaaagaagtaaaaccttttattgacagggggctgttgaacaaatcaagcacatccttgcctaatttcaaaaaactacccagtcctttatgggtgaaaaacatgaatccagatggcatggttgctctattggactaccgtgaagatgggtggtgaccccatatatgattttctttaaggatggtttaagaaatgggaaaaatgttaacaaatgtgggcaattattttgggatctatcacctgtcatcattaactgggcttctgcttggtcatccacacaacaccagggacttaagaccaaatggggactgatggtcatctttgagctccttcattttattttggactggggatttattttggaagtggaggccattgttttttaagaaaaacatggtcctgtaaggttgtctaaaaataaaatgcattaacccatttggagatgctttagttaatgctatttaactaattgtnccgagtgtcctgagagctgagcctgttgnggcacacnctcattactcacgtgggctctccggntggattaaaagtcaggtcgttgatccaaaggaacc

SEQ ID NO: 156728 - DNA, 794 bp, Homo sapiens
gagacataatctcgctctttctttctttcattctttctttttgttgagatggagtgtcactctgttgccaagtctggaatgcagtggcgcaatattggctcactgcaacctccacctccgggcttcaaccaattctccttcctcagcctcccgaatagctgggattataggtgcctgccacttcacctggctaatttttgtattattagtagagacaaggtttctccatgttggtcagcctggttctctaggagcacttgaccaacgcctgacctcaagtgatccacccgctcggcctctcaaagggctgggattacgggcctgagccactgcatctgcccagattattatttcttaggcatgttcactacgtaattgattcctagatgttgaaaatagatataatgtgattaggctagtgcgtaagggtagcactgaaaagatagaaatagaccttcaagtagagcatgcatgatcttgaataaaataatagttagtaagtatatagcggaatggcagggagacagagtttgcactctgtagcacatttaggagaaattttaaccaaaagtaatttgggcaaagaatatttgatcaactgtgaaattacctaccttttcaaagttctatcttgatacaaaggaagcaaaatttactcaaataatatcttgaaattaagatatacagacaatggcattatggtggcctgtgaatctaataacttcatgaaaatacaaagaaaatgaagagagctttacatgtcttattctgtaaaaaacctatgtattttttta

SEQ ID NO: 156729 - DNA, 454 bp, Homo sapiens
tttttattaagatacatggtcttcctatgttgcccaggctggtctagaactcctggcctcaagcaatcctcctgccttggcctcccaaagtgctgggactgcaggcgtgagccactgtgccactaataaaatggcatgaaaatatacacacgcaaaacctgacagaactatagggagcaactgacaagtcctctactatggaattcaacacagcttcgtcaattattgatagctataaaagataaagtagttaagatacttgattttaattttacatctaacaattagggaatgcatagtcttccacagcacaaatggaaaaactgactaatactaggccataaagcaaatcttaactattttcttccagaccaccatctatgactgcaattcattaaagtcagtaacaacaaaaaaattataaatctctaatatttagaaattaaaaacatac

SEQ ID NO: 156730 - DNA, 5964 bp, Homo sapiens
tttttttttttttttttattattcatatttgttattttattatatattattgtatacaactttgataatgaggatattataaatcatactttaagcaaaaatctatgcatgatatatgtaagcagtaacattttgaagaaaaaagccatgaaagcatttacctaaaatttagtaacatccgaaaaacactagtttgtgcatagtaatgttgaaagcttcataatacactaggaatactgggtaaggtcttcagggtattgtaaggaaaaacctgggtacagggaaaaggcttaaaattaggacacatccatatccttaggatggtggcaccatcatctagaaataaatcccacaatggtaggcagtgcactaagtatcctttggtttgggcacttaacaatacagacaaaccgtgtattttagagtttaacgtgattttaataatccccttaggatacatattagttattttatatagataaaaattatccaatattgccttttccaaacttttaatttttataactgtataactgattgtcatcatattcatgattaaaaagcctattttcccactaaacaadtttatccagtaacatgtgggaagagagtaacaaaaaatggtttaatgtaaagacttataataaaagggtttaaatgtaaaaatagaggtattaatctaggacctctgggcttaaatccttaggatacctcatgctgggaaacaaattatggaaatgttttcaggacaaattttttccaacacttaaaattggattctacagggttttaaaggttttggactggaaaatacacagaactcagagatattttgtccgaagccattttttaattccttaaccttccctaaaaaagggaaaggaaataaaaattgtattttttttttttttttggagacggagtctcggtctattggccaggctgggagtgcagtggggggcgatgcttgggctctgcaacctccggttccccaggttcaggctattctcctgcctcagcctcccgagtagctaggactacaggctcacgccaccatgcccgcaatcccagcaactcgggaggctgaggcaagagaatcacttgaacccaggaggtagaggttgcagtgagccaagattgtgccactgcactccagtttgggcggcagagtaagactctctctcaaaaaaaaaaaaaaaaaaagaataaaagatggtgtcattttttctttttgaaagtccatgttaggacagtaaagttggtagggtgattaatttgcctattggtaatgaagatcagtatatcattaaaaaaacctaaagtttgaaggtaaacgaactatgtggttgtctttttattaataccaactttaagcagttggattcattacttgatttcttagaaagacacattgataaagtatgtaaagccccaacaaattaagtgcatatataaggtatggactttttaaaatgaaaaactgcaaatatcttacaaataattttgttcattatatctatacaatgcaccattcaattcactcattacaatactttgcaccaaaccttgctatctgcaatcttaacactcctcaaatatgagaaaaacacatagtttccactgttctaagaagcgaaatttataaagtcaacacaatatattatcaaggattataggtctaaaacagtttttaaagacaatttatacacattgaaatgggtgctttgcttaattaaaaagctagaaataaagcttcttgcaatttaataaacaaggttgcagttaacagcagatttttcacattgcaacattcaactatcatcatggagatatcaataaaggtaaagagtggtatatttatttcttctgaaaacactgttgaggaatttaagtgctattgtcttaatatttttataataattaagaaataatttggaaagacattttacttttaaattttttcaacataaggcacatagcaacatttatagtctagaaacaactaaattatgtaataaataattattttttcgatcattatttgcccttttacctgaagaaagtaggtaagcagtggagttaaaatatgcctgaattaatgaaaattggttggatttaggaaacacaaataatatttgtgtgcagaaagatattaatttaaaaaagaaaaagaatactttatataaaatatacatcctagagtgttataggtagaaaaaaatgtgaggcacttagatgaaacagtgaaggaggaaagcactgagattatctttttataaaaagcaccaaaccatttattttaacatctgagataaaagcagaggttaacatgataggaaaaactagtttagttctctaactttgtatttggggaactaataagaatccagtagctcaaaactcaaagtattttatttttactgtgacagaaataattcaaatagagaatattttctaatttaaaagaatcttagtttccctgataaagttttgtatattttgtggtgcccagaataatgtgaaatgtagacggtacctcaccactccgtggcagcaccctttctatcttgactgtagtatatgtaattttgataccatttttaaactcccttttctaaaagcaaaaattaaaatttggtttggaataattgtgaatagcatgcatcaatgcctccatgtgaacttgctgacgtccaacagtgacagttttatttttccataatccttcacaaactaatttaatccaaaaaccagggtcaaaattgggcttggaattacaggaatccactggatgtcaaatcaggaaaaggtctggcttctgacggatgatgaagtggctgaagatgtgtggtagtctgagtgttatttatgttatttaattcagctggatatgtttcatttaaaactccattctgaaacttgtttaaaaatgcctgttggcctggcagtactggattgtactgcatctgacccacgtgggtgtgctgaggttctggctggcactgatacatcgacacggccccagcataacatgtctgaggagttattatggctgactgtggatttaatccatgcttttggttttcaggaagttgtaaacaagtgacaaaatcttctaaactagaagtagtggggtatggggatggttcaaaactccccatagggtagtccagctctgtacatttggaatgttgtggtaatacaggctgattacaggaaataaagttctgtgtataaggcatagaatccatttcagatttgtaggggaactcttgactgatcccatgtaagtctgtaaagacattatattgttgtgggtcttgctgtggacaattgaaaggcacgaattggttagagttccaattttcaaacatgccattaacttgcatgtgcttcatcttctgacacagctgttgctgtggctccactactacttgcttttggtgatgttgctgttgctgttctagatgtaggtgttcctgtaccatacagcttgagttcagagccaaggactgttgctgttgataatctgaaggtatgaagggagacttacttaaagaatcttggacatacgtcaggatttcatccgttaagtcaatgtctctgaagtcaacctcaccagaaaaatcatttctgaaaaatttttcattctgcatgtgtctgatgtcttcaaaatcaatgcctaggtttttcattatgctgtacaagtcactgtttttactatcttgaaagagccctgggtgacctccagcaaatgagttcacatcctgaggctggtcaatttgctcatgtttcaggatagtatcatttcccatcggtgcagtattatcttgccaatttctgcattcattcatagattcgttgaaaaagttgttttcaaaaggtgcagtacttgaagtacttgaagcaggatagagataaatagactcatcttgttgcatcatggcagccaggagggaactaggattgagagagtccttgcttagagtggatgtggtagcagagtcttttccactagtgccatttttagtccttagtggtaagggatccattatggcaggaaaagggttggttgcctcatacaacacagcttctccagtggtaaacataaaaggcaacttcgtatttcgttttcgtaaatgctctgttccttcctcatctgttagtggtctctgagttacaatgatataatctggtcttccatttttataaagcaggcgtgcattagactggacccaagtccatcggttgttttttgtaagaagccggaaaactatcatgccactttctccagtcttaatcattcggatatgggactcggcacaataaagcatatcagctgcatgaataaactgataacctgagcctctcgtgcacagctctgcttcagtatatcctaaaacaattcttcctttggcatcacaaccaataggtgtgaagtctagtttgtgtttggttctaaagataaaatttttggtccggatttcaagtatggatggtggctgaagtggagtagctatcgcaaacaaagccaactgaggtggaagtattgatccatctttccctttctttttctgtccatgaagatactttaacttcccttggaaattcattgccagaaaaccagatgaattatccagcagacaccttagacgacatatgaagcacctctccattaaaggagagttttctggaggaatctggtctgggttataacagactactgtctgggggagaccagtggcttcttcaattccttgtccagactctgtacactgagaaggatttaatgcccagtgtagctgacgctgaaattcagctcggtcttcggtatggataagttcatatacactctgatgtatgacatcagactgctgaaaccctagataatcttgtatagtagaagaagcataaaagaccaaagcatctgtagtgacaactaatacaaagccattcagagcctgtaataagaattctccttcttgtaagttcaggccttctctgaaatttgctgctctacagttatcctggcctccgtttctttcagtaggggaggattttaatgcaacatcaaagaagctcttggctctcaggtaactgacgctgagcctaagaactgaaagtttgtccaacttattaataacatcttgtgggaaaggcagcaggctagccaaacggtccaactctgtattaagtcggtctctatgccgcttggaaggatttgacttgattccttcagctgggattggctttactgttttctgcaccggcttccgccgcttgcgactggcgtaggtgatgttggcgctgctgctgttcatggtgcccagccgacggcggcggctactccccgggcactggcggccgggtccccggaacccggtgtaggctgggaccactgcggcggccggcgccgggttccgcgaagccgcgcccgctccacctgcgtcctctcgggacagtggcgtgggcgccgcgcctcaacgcctcggctcacgcaggcttccgcagcccgcgccagtacaggtgagctgcctgggcctggcgcagtgagggtgggcgaggggcggagacccgcgagcaaggcggcgcaggtgccgtctacaccggcggaggcggcgcggcaatgcccgcaggtgaggcggcccgggcggaggaggagcctgggccgtctatttagaatcctggcctgggtcgctcacggtggcgccgcgccccgtgaccgtcgccgcggccccttgggtgagggaggtgccgccgcgctgctcccgggacttcccaaatccagggtgcttcccgcctgcggagctcgggcgcgggccaccagtcccggctgctcccagcttccgttcggctacacggctgcccctgttctgagctggcggtccggggcacgctctcggaacagagcgtcgacgggactccccagccactgcctcccgccgccgcgcgcaccggctgaat

SEQ ID NO: 156731 - DNA, 1031 bp, Homo sapiens
tgggagtttcgctcttgttgcgcaggctggggtgcagtggtgggatctcggctcacagcaacctccacctcccgggcccaagcaattctcctgcctcagcctcctgagtagctgggattacaggcgtgcgctaccatggctggctaattttgtatttttagtagagacagggcttcaccatgttggtcaagctggtctctaactcctgacctcaagtgatccacctgccttggcctcccaaagtgctgggattacaggtgtattgggcctggcctcaacgtattttattgaagttatctaaaagtatcttatgttttatgagaaggcctatgaatgcagttttgttttttgatataacagtaaatagtatttttaaaaaaatgtttctaatagctttttgctggcatttagaaatactattgattacatatatagaacttgtactttactcccctgctgaactcactattctagttgccttttcctagattctatggggctttttacatagatgatcatatactctgcaaataaagacagtattatttcttgccaatctgtaaaccttttatttttcttgcctgaatgtactggctaggcgctctagtacaataatgaatagaagcggtgagaatggacatccttgttttatgcctgctcttagggagttctgtaatccaatactatcttaatcttagtaaagaccacgcagagcacagcactaaattttgggagactaggcaactgattctgttatctttgccaaaacatgttgtttgattccttttttccccagaggtcaaatcctatttaaagtgttttcagagaacttaattggggtaacaatgcagcccaatacctgtcaacagcatgaatactctttgctataatataatgctcattgttaatcttgctttttcaggaaatgagactagtgtctgatctacagtttgccatgttctagctactttacattaatacaacaattacaaaaataactaagggtttattatggcatattcccaatgaca

SEQ ID NO: 156732 - DNA, 690 bp, Homo sapiens
  misc_feature (1)...(690): n = a,t,c or g
cgaagggactatgtcttcattgaattttgtgttgaagacggtaaggatgttaatgtaaattttgaaaaatccaaacttacattcagttgtctcggaggaagtgataattttaagcatttaaatgaaattgatctttttcactgtattgatccaaatgattccaagcataaaagaacggacagatcaattttatgttgtttacgaaaaggagaatctggccagtcatggccaaggttaacaaaagaaagggcaaagcttaattggcttagtgtcgacttcaataattggaaagactgggaagatgattcagatgaagacatgtctaattttgatcgtttctctgagatgatgaacaacatgggtggtgatgaggatgtagatttaccagaagtagatggagcagatgatgtaagtctaaaaattcttttttctggttactttcatactattaaatagtaagaaacaacatatttacaaatggttttatatagattcacaattacttcttattttctnnnnnnnnnngagaagggaaaagcaatttttaaaatgtgcccatttttgacgaatgggggtatctattagggaactggttgtaccgtagaccattcctaaatggattagatttccaaagaatcattggatagagacattatatattaataccgtactcaattataacagtcagtg

SEQ ID NO: 156733 - DNA, 665 bp, Homo sapiens; identical to SEQ ID NO: 111315

SEQ ID NO: 156734 - DNA, 508 bp, Homo sapiens; identical to SEQ ID NO: 136990

SEQ ID NO: 156735 - DNA, 965 bp, Homo sapiens
  misc_feature (1)...(965): n = a,t,c or g
acccgtcccgaattcccgggtcgaaccaccccttcccaaaagggctaagggaaaaaagaagaaaagccggaaacttgaaaggaaaggactggaccatctgaaaaaggggaaactaaagcttaaaaaggacttttccattaaaaaccttcccactggaatggaacaatggcttttaaaagaaaatttcttcattccttcaaccggtgatagcacgttcttaatgtctctttttattgcctgtaaatggttaattggccaggatccccacatcctcctcgcctcaacctgttaaatgtcctcaaccctcccagaggcaccccccaccccagcacactgtcagtaagggggcagattgaaacagtgagagttaggggtacagtagaaaantcctgcatgtttgcagtgactagaatcagatagtagggtggtggtttttttttttaatcattatgaagagtgggagcttgcaggtaaaggctcctgtggtgttttgaaaagcagaaagcaataaatgaaacaaagtgtttgtgtaatatattcctgccttgtcttcttcactcagagttgaaaataggttttgcagtaaagctggaaaaaaaaaaagaaaacaaatgttccaaaactgtgtgtgttggtgggtggcaatttcctttgcttatagtagtttcagtagtaactatatgtttttttttcctttctttttcacaggcacagaaactgaaatctgtagataacaaggaagaattgaattgtcatgaaaaattggggttgattttatgtatctcttgggacaacttttaaaagctatttttaccaagtattttgtaaatgctaattttttagagctctactagttggcatacgaaaatatataaggatggacattttatcgtctcatagtcatgctttttggaaatttacatcatcctcaagtaaaataaatatcagttaaatattggaaaaaa

SEQ ID NO: 156736 - DNA, 1531 bp, Homo sapiens
gtgcagctgcagcgcagaggcagcatccagcggcggcgcagcagttccagtccgttgctttactttttgcttcaccgacatagtcattatgccgaagggaaagtctccagagaatacagagggcaaagatggatcccaaagtaactaaacaggagcccacaagacggtctgccagattgtcagcgaaacctgctccaccaaaacctgaacccaaaccaagaaaaacatctgctaaagaaagaacctggagcaaagattagcagaggtgctaaagggaagaaggaggaaaagcaggaagctggaaaggaaggtactgccaccatctggaacatggtgaaactaaagcctgaagaggccacagaaaactgaatctgtagataacgagggagaatgaattgtccatgaaaaattgggggttgattttatgtatctcttgggacaactttttaaaagctatttttacccaagtattttgttaaatgctaatttttttaggacgtctactagttggcatacggaaaatatataagggatggacattttatccgtctcatagtcatgctttttgggaaatttacatcatcctcacagaaaataaaaatttcgttaaatattggaagctgtgtgtaagattggattcagcattccatgcacttgcttttaaaatttagtccctgtgcatactgtgggtgtttttactgtgcatatttgaatttttcatgcagtttttctagagcaataatcagtggtgcttttgtacctaggttttatgtgattttaatgaaacatggatagttgtggccacctgctgactatttgtggtttaaaataaaaggtttacttgtctgcagaaaaattcaaatatgcacagtaaaaacaccacagtatgcacaggactaaattttaaagcaagtgcatggaatgctgaatcaatcttacacacagcttccaatatttaactgatatttattttacttgaggatgatgtaaatttccaaaaagcatgactatgagacgataaaatgtccatccttatatattttcgtatgccaactagtagagtcctaaaaaattagcatttacaaaatacttggtacaaatagcttttaaaagttgtcccaagagatacataaaatcaaccccaatttttcatgacaattcattctccctcgttatctacagattcagttttctgtgccttcctttccagcttcctgcttttcctccttcttccctttagcacctctgctaatctttgctccaggttctttcctttagcagatgtttttcttggtttgggttcagcttttggtgaagcaggtttcgctgacaatctggcagaccgtcttgtgggctcctgtttagttactttggatccatctttgccctgtgtattctttggagactttctcttcggcataatgactacgtcggtgaagcaaaaagtaaagcaacgaactggaactgctggcgccgccgctggatgctgcctctgccgctgcagctgctcacgcgcagggcgagttcctcc

SEQ ID NO: 156737 - DNA, 1282 bp, Homo sapiens
ctgctgggaactcctccattcagggacatggtggatggacactacgtcactccattctgtccttcctttccctcctcccattctcccgagggcctcagtgcatgggcgctgtccaacctctggtgctgaagcagccaagagacgcaagcctgcgtggctgcctcttaggatatgacagcacagccactggcctctactgaatcctatgcaacctcagaagacacccaggagtgatgccatcatgtggtgcaagagttctgagggaccacaatcctgaagacattgaatggctgtgttcctgctcattgctggaggtactgtcagggtccctgtcctcaacccctggtctgacacttgcagatcaggcaggacattctggaggaatcatgcccttggaaggatccctgaggagtgactgttgctaaattaaaaaacagtggcaaagagcaatacagagagttgcctaaattcacccccctggtcccaggtttgaagcaagcagtctgtacctgcagtccttgtctgtaaccatggcaccctggcttctcacacatctcatcgtggaagttccaccatgtgtcaggcatggcactgagcaccttcttttaagaatatacatcgtaattatgtagattattaattctacttcaaaaagccacacaggcttcatgtgataaaatgaaacaattgctcaactgatctcctggggatctctactaagatgttggcagcccggccagctggtctggcctgggacgtgccttcatggtctggttatgcttcatgacctgcactgtgggtcagtgccattttgcagactttgatcacagtgaacacgttccacgggaacttgggccatgagaaacatccttcctaaccacgtgactgcagaaacatccttatcgcgtcctcctgggcaaaggcccaacagcctgactgcagggacatccttgccatatcctgctgggcagcaagctctaccacccagatccctccctcccagtcccatgattaccccagcctgtgagtggcagttggtgctggcactaagctggtttcctcctccccagggttttgctggcaataaagatgtttctgcagtcacgtggttaggaaggatgtttctcatggcccaagttcccatggaacgtttcactgtgatcagagtctgcaaaatggctggaggtttacgaaatggtacaggttagactaacagtaacatctcccaggtaagtggttttacaaagtaaacttcccttgagcatctacactgtaccagaca

SEQ ID NO: 156738 - DNA, 372 bp, Homo sapiens; identical to SEQ ID NO: 148754

SEQ ID NO: 156739 - DNA, 1751 bp, Homo sapiens; identical to SEQ ID NO: 148756
  misc_feature (1)...(1751): n = a,t,c or g

SEQ ID NO: 156740 - DNA, 624 bp, Homo sapiens
gcgtcgacctttttttttttttttttttgctagttgtatataaaatttaatctcaccgaatgtacagttatcaaatttcacgtgtatattaaggaactgatgcatctgagcattgtcaaacaaacgggaagaagaagttaaagggcagcctggcattgatggctggtggagctctgaagcctgcctctgcaggtggagaacacatccacaaaagtaaccgcagtgggaaataagaaatcgccttttcatttcctgagttgggcctcagggaaagggagggatgaaattaggatttggcagttacatttgactatttttggcctgtggattcagcagggttccgtattttagtccacttcacttctataaccaaagcccctggggagctgggcaggaatcctttcctgtttgaatgactgggtgatgaagtggatgggcacccagtccagcatgtcctggggcctgggaatttccaaaaggggccacgtaatctgggaagccctggccccacagcaggctcttcaccttctgtggctacgagctgacacgggagagctccagtcagtcttagtttacagccagattgcatagtgtaaccaaataatactggggtccggaccccct

SEQ ID NO: 156741 - DNA, 425 bp, Homo sapiens
tccagattttttttttattcagtacagatgcaaagtagtagctcagaggctctgggtaatagcattcctgagattgatgacatccattacctcactagtccaacttctccagactaacgcagacttttctcttcccttggcctttcctctcctcgccattgggccaattccttcgatttctcatttcccttgaagttagggccattcacagtttcatggtcaaagccagttccaggttcaatagtctgtgatttatccaggctctgaggtatgcaccgcttctagagaagacagtgtcagaccgaggccccctggaggacctttggaacctctgatagtctgtcataccagagcatgattttctctaatgttcagacctggcttcactgaggaatagttcaggggatcagggcctagagacaaga

SEQ ID NO: 156742 - DNA, 580 bp, Homo sapiens
aacactttcatggtactgcaagtcatcaagtttactaaggacctgcccgtcttccgttccctgcccattgaagaccagatctcccttctcaagggagcagctgtggaaatctgtcacatcgtactcaataccactttctgtctccaaacacaaaacttcctctgcgggcctcttcgctacacaattgaagatggagcccgtgctccctatcttacagaccgacctggagttacccagagagatgagattgatcagctgcaagaggagatggcactgactctgcaaagctacatcaagggccagcagcgaaggccccgggatcggtttctgtatgcgaagttgctaggcctgctggctgagctccggagcattaatgaggcctacgggtaccaaatccagcacatccagggcctgtctgccatgatgccgctgctccaggagatctgcagctgaggccatgctcacttccttccccagctcacctggaacaccctggatacactggagtgggaaaatgctgggaccaaagattgggccgggttcaaaggaagcccagtggttgcaatgaaagactaaagca

SEQ ID NO: 156743 - DNA, 1588 bp, Homo sapiens
gtgagcttgctccttaagttacaggaactctccttataatagacacttcattttcctagtccatccctcatgaaaaatgactgaccactgctgggcagcaggagggatgataatcctaactccaatcactggcaactcctgagatcagaggaaaaccagcaacagcgtgggagtttggggagaggcattccataccagattctgtggcctgcaggtgacatgctgcctaagagaagcaggagtctgtgacagccaccccaacacgtgacgtcatggccagtagggaagatgagctgaggaactgtgtggtatgtggggaccaagccacaggctaccactttaatgcgctgacttgtgagggctgcaagggtttcttcaggagaacagtcagcaaaagcattggtcccacctgcccctttgctggaagctgtgaagtcagcaagactcagaggcgccactgcccagcctgcaggttgcagaagtgcttagatgctggcatgaggaaagacatgatactgtcggcagaagccctggcattgcggcgagcaaagcaggcccagcggcgggcacagcaaacacctgtgcaactgagtaaggagcaagaagagctgatccggacactcctgggggcccacacccgccacatgggcaccatgtttgaacagtttgtgcagtttaggcctccagctcatctgttcatccatcaccagcccttgcccaccctggcccctgtgctgcctctggtcacacacttcgcagacatcaacactttcatggtactgcaagtcatcaagtttactaaggacctgcccgtcttccgttccctgcccattgaagaccagatctcccttctcaagggagcagctgtggaaatctgtcacatcgtactcaataccactttctgtctccaaacacaaaacttcctctgcgggcctcttcgctacacaattgaagatggagcacgtgtggggtcccaggtagagctgttggagttgctctttcacttccatgatacactacgaaaactgcagctccaagagcctgagtatgtgctcttggctgccatggccctcttctctcctgctccctatcttacagaccgacctggagttacccagagagatgagattgatcagctgcaagaggagatggcactgactctgcaaagctacatcaagggccagcagcgaaggccccgggatcggtttctgtatgcgaagttgctaggcctgctggctgagctccggagcattaatgaggcctacgggtaccaaatccagcacatccagggcctgtctgccatgatgccgctgctccaagagatctgcagctgaggccgatgctcacttccttccccagctcacctggaacaccctggatacactggagtgggaaaatgctgggaccaaagattgggccgggttcaaagggagcccagtggttgcaatgaaagactaaagcaataactgcctcttcatgcggtcatggggatagtgggggtgaccataggaacaaagttgttctctggaagcacagaagatgggaaggaggaaacctcagggctaagaggtaaagaagctccttctgg

SEQ ID NO: 156744 - DNA, 1192 bp, Homo sapiens
  misc_feature (1)...(1192): n = a,t,c or g
ctgtttcatctcactttttccagattttttttttattcagtacagatgcaaagtagtagctcagaggctctgggtaatagcattcctgagattgatgacatccattacctcactagtccaacttctccagactaacgcagacttttctcttcccttggcctttcctctcctcgccattgggccaattccttcgatttctcatttcccttgaagttagggccattcacagtttcatggtcaaagccagttccaggttcaatagtctggggattaatccaggctctgaggtatgcaccgcttctgttttgctcgttcctccaagagctaagttttggccagaaaaggggatgctttaatacccattagaacacattcacctttctaagaacctgctctagaaaggcccaggcccctcagattcccacatgggttggagttctggcccaagtctggagctttcttcacactcggctctccagagctcctgggttcagaaaaaactgagcatggtgagagaagacagtgtcagacgcgaggccccctggaggatcctttggaacctctggatagtctggtcataccagagcatggattttctctaatgtttcagacctgggtttcactggaggaattagttcaggggatcagggcctagagacaagactcccaactgccttatttccctcctgttttcctggcaaccccactacttcctccaaaggtttctgtatgcgaagttgctaggcctgctggctgagctccggagcattaatgaggcgtacgggtactatatccagcacatccagggcctgtctgcgatgatgctgctgctctaagagatctgcagctgaggctatgctacttcgttcaccagcttacatgaataccgtgatacactgagtgcgacactgctggaccaagatgngctgggtctatggagccagtggttgcatgatagctaacgacaaagaagtattaaagcttgtattagggcgaactatccttaggaggtattacgttgcttccgcgtttcactcgaaggaactgttcgcctaatcgttgggaacccctgttgtggcgttgtgaggtgctatcaaagagcgccctacgcgttgtggcgtataccagcttctttgaaggnataactgcattcccaatggtccacgtgggttatcaactccggcgcattcct

SEQ ID NO: 156745 - DNA, 693 bp, Homo sapiens; identical to SEQ ID NO: 135545

SEQ ID NO: 156746 - DNA, 1029 bp, Homo sapiens
atggcttcagagggtgcaagccccaagccttggcagcctcaacatggtgttgactctgcagttgcacagaagtcaaaaattgaggtttgggaacctccacctggatttcagaggatgtacgaaaacacctggatgtccaggcagaagtttgctgcaagggtggggccctcgtggacaacctctgccagggcagtacagaagggaaatgtggggtcagagcccccacacagagtccccagtggggcactgcctggtggagctatcagaagagggccaccatcctccagatcccagaatggtaggtccaccaacagcttgcattgtgtgcctggaaaagccaccgacactcaataccagcttgtggaagcagctgggaagggggctgtgccctgcaaagctacaggagtggacccacccaaggctgtgagagcccacttcttgcatcagcatgccctagatgtgagacatggagtcagaggagatcattttggaactttaaggttttatgactgccctattggatttcagacttgcatgaggtctgaagcctccacccagtggacagctttgaagagagtagtggttctcccagcacgcagcttgagatctgagaatggacagactgcctcctcaggtgggtccctgacccctgagtatcctatctgggaggcacctcccagtaggggcagactgacacctcacatggccgggtacccctctgagacgaaacctccagaggaacaatcagacagcaacatttgctgttcagcaatattcgctgttctgcagcctctgctgctgataaccaggcaaacagggtctggagtggacctccagcaaactccaacacacctgcagctgagggtcctgactgttagaagagaagtccttaaaagacctgatggagctgaaaaccacggcacaaggatacgtgatgaatgcacaagcttcagtagccgatttgatcaactggaagaaagggtatcagtgatggaagatcaaatgaatgaaatgaagcgagaagtttag

SEQ ID NO: 156747 - DNA, 2292 bp, Homo sapiens
atgagctccaaaattaaatctgtaataaatagcctactaaccaaaaaaagccctgaacctgatggattcacagctgaattctaccagatggacgaagaagagctggtaccattcctactgaaactattccaaaaaattgtaaaggaggaactcctccccaactcattctatgaggccagcatcatcctgataccaaaacctggcagagacaaaacaaaaaaagaaaacttcaggtcaatatgtttgatgaacattgatgtaataatcctcaacaaggagattagggtctgtgagatccatgaagacagcagcaccagaggctcccggcatttctactatgatggggagctcttcctctcccaaaacctggagactcaggaatggacagtgccccagtcctccagagctcagaccttagctatgaatatcagaaatttctgggatgaagatgccacacaggccaagacactttcaccctgtgatggcagaccgtctgcagaaactacagtaacatctcgaatcctaggagggcatcaggagaacagaatatctctctggcctggtgtcaggttggggcattttctgagccaggatgcccatcggtctgtgggtgtcctgcccaatgggaatgggacctaccagacctgggtggccactaagattccccaagaagaggagcagagggctacctgctatgtgggacacagcaggaatcacagcacttaccctggtgtcctctgggaaagccctgatgcttcagagtctatggcaaccgttccgtatgttgcggctgctgctgtttttgttatcattattattattctctgtgtcctttggtgcaagaagaaaatatcagctgcagaggacccaggtgaggagtgggcagcaaggagggccgtggcacctgctctgtcctcatccccatccctctgtctctcaggctcaccagcgtgcatcagcgtgggatgggaaggttcatcccctgccctgcagcaagagggccccgtccaggaggcacccacagcaggggcagtgcagggagaagaagaagattccctgtgggctgtgagggcagtggcctgggtggaagccctgctaggaacagggcaggaaggtcttgcagcctcagcaagcagcagccctggggtggaggtgcatttccagggagcacatgagcctacgaagcccagatcaacacctggttgggacaggagaccaccagggcaccatacagctggaatttcagtctctggtgccagctcctgggtctgctggctccactggattcaactccctacccaggccagcatcatcctgataccaaaacttggcagagatataacaaaaaaagaaaacttcgggccatgcatgatgaacatcaatgcaacaatcctcaataaaattctggcaaaccgaatccagcagcacatcaaaaagcttattcatcacaatcaagttggcttcatccccaggatgcaagctttgaagagggtagtggttcttccggcatggagtttgagatctgagaatgaacagactgcctcctcaagtgggtccctgacccctgagaagcctaactgggaggcatctccctgtaggggcagactgacacctcacacggccaggtacccctctgagacaaaacttccacaggaacgatcaggcagcaacatttgctgttcagcaatattcactgttctgcagcctctgctgctgatacccaggcaaacagggtctggagtggacctccagcaaactccaacagacctgcagctgaggacggagaatgactttgatgagctgagagaagaaggcttcagacgatcaaacttctccaagctaaaggaggaagttcaaacccattgcaaagaagttaaaaaccttgaaacaagattagacgaatggctaactagaataaccaatgcagagaagtccttaaaggacctgatggagctgaaaaccatggcaggagaactacgtgatgcgtgcacaagattcagtagccgattcaatcaactggaagaaagggtaacagagattgaagatcaaatgaatgaaatgaagcaagaagagaagtttagagaaaaaagaataaaaagaaatgaacaaagcctccaagaaatatgggactatgtgaaaagaccaaatctacgttggcttggtgtacctgaaagtgacagggagaatggaaccaagttggaaaacactctgcaggatattatccaggagaacttccccaacctagcaaggcagaccaacattcaaattcaggaaatgcagagaatgccataa

SEQ ID NO: 156748 - DNA, 1097 bp, Homo sapiens
ttgccttccagctgccctttgctgagggcgcgggcgatggggcgcgcctcgacttcgtggtgcgctatgagacccctgagggcactttctgggccaacaaccacggccgcaactacacagtcctgctccggatcgcacccgctcccacacccactgatgccgaagggctgccccagcagcagcagctgccgcagctggagccacagcccgagtgccagggtcccgtggaggctgaggccaggcagctgaagagctgcatgaagccggtgaggcgcaggcctgccgaggaggaactgaagacgaagaacatggatgataacacctttgccatggcagagcatcctgatgtccaggagtcagtgggtccactggtagcccccacccctctccgtccatggccccagatgacacttcaggtctgctggagtttgttggagttccactccagaccctgtttgcctgggtatcaccagcagaggctgcagaacagagaatattgctgaacagcaaatgttgctgcctgatcggtcctctggaagcttcgtctcagaggggtacccggccgtgcctattacttaagaaatttacatttcataaggctattgctgacatagatagtgagtcctgtgatggagctgggcaaagtaaatttaaaaccatctggaaaggattcaccattctagatgccattaagaacatttgtgattcacgggaggaggtcagaatattaacattaacaggagttgggaagaagttcattctaattctcatgaatgagtttgaggggttcaatacttcagtggagggagtcactgcacatgtggtagaaatagcaagagaattagaattacaagggcattctgaagatgtgactgaattgctgcaatctcatgataaaacttggatgaatgaggagttgcttcttctggacaagcaaccaaagtggtttcttgagatggaatctactcttggtgaagatgctgtgaacactgttgaaatgacaacaaagaattcagaagattacataaatttagttgataaagcagtggcaggttttgagaagattagctccagttttgaaagaagttctactgtgg

SEQ ID NO: 156749 - DNA, 978 bp, Homo sapiens
gtggataaccccagggaaagtctttaggcaccgcgcgtaagcccatatataagtgctgtgtcctgccgcttcctcgctaatcgagggttcgccctgtcgttcacctgcggcgagcaccaatggtctgccaaggacacaccacccccccggtctgcggttctctggctggtcctggcgactgcgtgcattattccgttccggccgggtacccctctgagatgaagcttccagaggaacaatcaggcagcagcaacatttgctgttcagcaatattcgctgttctgcagcctccgctgctgataacccaggcaaacagggtctggagtggacctccggcaaactccaacagacctgcagctgagggtcctgactgttagaaggaaaaataacaaacagaaaaggacatctacaccaaaaccccatctgtacgtcaccatcatcaaagaccaaagggaaagaccaaatctacgtctgattggcatacctgaaagtgacagggagaatggaaccaaggtggaatacactcttcaggatattatccaggagaacttccccaacctagcaaggcaggccaacattcaaattcatgaaatacagagaatgccacaaagatactcctcgagaagagcaactcccagacacataattgtcagattcaccaaagttgaaatgaagcaaaaaatgttaagggcagccagagagaaaggtcgggttacccacaaagagaagcccgtcagactaacagctgatctctcggcagaaactctacaagccagaagagagtgggggccaatattcaacattcttcaagaaaagaattttcaacccagaatttcatatccagccaaactaagcttcacaagtgaaggagaaataaaatcatttacagacaagcaaatgtggagagattttgtcaccaccaggcctgccctaaaagagctcttgaaggaagcactaaacatggaaaggaacaactga

SEQ ID NO: 156750 - DNA, 2357 bp, Homo sapiens
gattggtgggtagaggcgcttttatttattctctactcatgcagcattaatccctatttcatcaggtacctacagtgctgtaattctagacgtgaccttgggtcttgatttacttcagctccgtcttctttataaatgtgccatgaaagaggtacatgaaagatagccaacatcaaagcgccttttaaagtaaattggttgataggaattccctggtatttaacactgtctgtcaaatgtttcagctggtttgcatccttttacaagctattgcttgctgcatgaaaagaaatttaaagcagctgttttaagtcttggggagggtggttgtgatggtgctgatggtgctgatggtggtgatggcagcggcatggcaaaatcaggacccttagctgcaggtctgttggagtttgctggaggtccactccagaccctgtttgcctgggtatcagcagcagaggctgcagaacagccaatattgctgaacagcaaatgttgctgcctgattgttcctctggaagcttcgtcttggaggggtacccggccgtgtgaggttatcgtcagtgaagcaggagcatcaatctacagtgtcagccctgaagctaacaaagagatgccagggctggaccctaatttgagaagtgcagtttccatagcaaggcgtgtacaagatccattagctgagctagtgaaaattgagccaaagcacattggagttggaatgtatcagcatgacgtatcccagactttactcaaggcaacactggacagtgttgtagaagaatgtgtcagctttgtgggagtggatattaacatctgttcagaagttttgttaaggcatattgcaggactcaatgccaacagggccaaaaatattattgaatggcgagagaaaaatggaccctttatcaaccgagaacagctgaagaaagtgaaagggctgggcccaaaatccttccaacagtgttgctgggctttcatcaggaatcaaccaggattatatccgaacgttttgcagtcagcaaacttgaaacttcaggccaaattccaaggagttgctgtgacatcttcagcagacgttgaggtcacaaatgagaagcagggcaaaaagaagagcaaaactgcagtgaatgttttactgaagccaaatcctttggaccaaacttgtattcatccagaatcatatgacatagcaatgaggtttttgtcatccattggagggacactgtatgaggttggaaagcctgaaatgcaacaaaaaataaattcattccttgaaaaggaaggaatggagaaaattgcagaaagattgcaaacaacagtacacaccttacaggttcatcatagatgggtcttcagccagcctgaaggctttgactttcgaacagatttttgataaacctggattttcaaggaggaaggcatagtatgcctggaagatctgcagattgggacagttcttacaggcaaagttgagaatgccactctctttggaatttttgtggatataggagtggggaaatctgggctgattcccatacgaaatgtaacagaagcaaaactttcaaaaacaaagaagagaagaagccttggactgggccccggagaaagagtggaagtccaagtactcaacattgacatcccccgatctaggattactctggacctcattcagggtgttatgagtatcccacgaaggccagacgctgattttattttctcatttccacagattgacaaggataagtcagttgtttgtaaactctaaggtagcagatgagaaataattcacttaatatcagaaatattttccaaacactttcctttattttttcttctgaataaatagaaaaccaacagtttgatttccttttccccttaaaggaaacaactaatacacattcttatatggctttatgtagtaatagttttctgactaaaattttgttttttattttttgtaaatttacctttaaaccccttttgcaaatttgtataacagattgccttaacttcctacttgcccaacatcctgcccttgctggacttgtatggggattgtcctccttgatttgaattgtacccgtctttgttgacacagtaggggctgggcagtgtttaatccttcccattttatagattttttttttaatcaggccttttggacttcattcataattttgcaataatctcttttcccttgtcatgcaagccaaaaatataccagtaaaacagattctgacgtgtttgtagttatcaaatgaatggctcgaaacacttctcaaaagggatatacggtattgaccccaacaataaatgtttgtggctagtgaaaaaaaaaaaaaaacctcgtgccg

SEQ ID NO: 156751 - DNA, 427 bp, Homo sapiens
agccttcagattttcaagttctgttcgaattcatgaaaggtctcacactggagagaaaccttatgaatgcaaacaatgtggaaaagccttcatttcttccagtcactttcgactgcatgaaaggactcatatgggagagaaagtctaagaatataagcaacattctgaagccttcggttgttccagctccttctgaatacacaaaagagtttatactggacagaagctgtgtgaatacaaacattgttctaaagcccttgattgatccagtttcttttgagcacgaaagaattcccactggtgagaaacaagtatgaatgggaacggttgtggtttaatacttcagtttgaccgaagccatttcaagagaggacttcagcctcagttgattctatttggggtggggataaacaaaatttgcggaagg

SEQ ID NO: 156752 - DNA, 499 bp, Homo sapiens
ctttgcagttttagtcaaatattgccatctttctagtggaagactttgacatgtaagttctagattatactttcatttataaataactgtgtagcttaatgagatggcccctgttagtatcttaggccatctattgaaggtttactaaattcttccaaggcacgtgagtctgctcctcagcaaagcagtgacaaacctgcttttccctggtttccccaactatgtaaaaccttattaaagaattcctgaacaatataaagttccctcagcaagacggaacttcccaagctcttgtctcaggagagaatgtggattatagaaagattgtgggtgtgagtggagtgggaagttatttaggtagtaagattttcaggctcggtgcagtggctcacacctgtaatcccagcaccctgggtggccgaggtgggcagatcacaaggtcaggagatggagaccatcctggccaacagggagaaactccatctctactaaaaataca

SEQ ID NO: 156753 - DNA, 618 bp, Homo sapiens
ccatgtactctctgttcatgggagctgctgcccccacctccagtctgaccgcttccatttatttaagaaaaatccgacacagtggtgggtagaacccgagagaaaaatggctgtgggatggggtaggggcgacactggctcccttctgcatttgcccaccctgaagtccctcacagcattccctggtgccctctactcccctcccgggttccgtcttgtgggggataggtggctgcctgccctgtgctgcagagggaagtcgcagtcagcagggtgacgggtggctaaggcgtagtagtgttgaccttgctgtgggggacggggaaggcaaggaggtccccaggcctctggctctggggtgtgatttggctagagatggatccaggactctttcccctttaggtccctgcccaaagcccttggggcagaggtgggagtcctgagaactcaggaaggtgcctggcttggcaccagacctctctgtagagtcagctcccaggtcctgggaggcacccgaatgccagcagatgctacaactgtccccctaacccccagatatttcgtccacagcaagatccttggcagggcaggcagctgccacctccccaccctgcagga

SEQ ID NO: 156754 - DNA, 376 bp, Homo sapiens
gcttactacagccttgaactcttgggctcaagtgatcctcccacctcagtcttcttagtagctgggactacaggtgcatgccaccacacctagctaattaaaatttttgtttgtttgttttttagagatggggtcttgctgtcctgcccaggctgctcttgaactcttggccttcagcaatcctcccaccttggcctctcaaagttctagaattacaggtgtgagccaccacatccagccaggaccaccatttctaaaggcattttgggaaaatcaccatttatttaattatccacctgaacaggagactaaagaaattatagtttttgagaaaatgcgtttctgagtgatcctcctctgtggtcatcgtcgacgc

SEQ ID NO: 156755 - DNA, 1941 bp, Homo sapiens
  misc_feature (1)...(1941): n = a,t,c or g
cagagggtctcttctgggactattggtttaaaggaagatgctgtggacagtggattataaagaccaaatgaaggtagaagtaattttattcaagaaaataaagaaanctgataccataagaaagttatagtatcagtatatattttatcatctgagaataaatgtaaatggataaatgagtcctttttttttttttttttttgagatggagtcttgccctttcgcccaggctggagtgcagtggtgcgatctcggctcactgcaagctctgcctcccgggttcacaccattctcctgcctcagcctcctgagtagctgggactacaggcgcccgccaccacacctggctaattttttgtatttttagtagacatgggttttcaccgtgttagccaggatggtctcgatctcctgacctcatgatccgcccgccttggcctcccaaagtgctgggattacaggcgtaagccaccatgcccagcctataatgtttttaaagatgatgggtaacataaaaatactatgtggtaataacttagaatactaggtctggaggaggagaacaggcctagcccatgtgaaagaataagcagtagctaatctatgtggtcttgaggtatagtataaacctggaaagttctctgaacctcttcagatactgagggttgcccaattaaaacaacaacaacaacaacaacaacaaaactttatcagatgtactgaatgacttcattctctgataaatttcaaagcttccagaacagaggatcaactattgtaactattgcccatttctggtccaggaaatacctttctgataaagagtgctcataaaacgcttgtgttgttttcattcattctatctagaagtgggcaaataccaaaacctttatcccagattaaggtcggataataagtgaacctgatgacctactttagaatgacaattcaaacagctatccctgaaaccagacaactacacgagttatgccttgaagcagatctttcaaagtgcaacgaaacattactcctgtttttcacttgaggagactaaattatggtcatatcttttccatgatactgattttttatttaacataaaccaaatactgactgaatcaaagactaaaaccccacaaaatttcatcctttaaaacaaaaagcaataaaatcccacccctaaatcaggcctcaaagttcaaagaaatgtttaaaaatcccccatatgggatctgacatgaatgtctattattgtcccccccaagtcttctcaaaaatcactttaaaatcttgctttgagaccctaagttttcttggaaataaaatacatttatagattgttttaaacctactgaattttactatttctgcttgctttcttcccatttaataaaatcaaaataaaaaattttgaccaaataaatatttattgaaaggtcctgccaccaaaaaagcttcaggtttttaaaaacatataatcaaacaacaatgttcttctgattaaaaaaaaaaaaagtacttatttaaatctgaggatccttatatgttcaatagaggattgtggtgatcctttgtattttaaaaatattatttgtggggcctactttacgtatctcctgtataaaaaccagctttcactccacatgaatagagaagatgctgaatacgcaggaatctgattatccctcacgtgattattaccggcccctctggggcaatctgcttgctcactcattctgccaccattctcttcattcaagtgtttaacagcacatttatcaaaggcagctctccgatgcaatgtttaacgagtgtcttctcaggagtgtatccgtgtcatttattcttctcatccaggtaagcacgaacttcacagtactactaaaaatcttcttcaaattatattgataatggacttatttctgaccgtttttggatttg

SEQ ID NO: 156756 - DNA, 692 bp, Homo sapiens
atcgatcgccttaggtaccgtttgagaatccctgggtcgacccacgcgtgcgcccacgcgtccggtttttttcaactggtacctttagatgctgcgcccactgaatttcatgactattacaatcgggatcttcccaggcaagcttgtgtcgttataatgaggagagtcaaaaacatgcagccttaagcctcagcaaagagcataatccaactcagtatgaagagcggatgaggatacagaaggctggaggaaacgtcaggtaaccaagggactgagaggagctcatgggaaggagggctgttagctgtagaagggtcccgagaccttcaaggagtagaacttcccctgttacgtagtcttcagtgtgacgaggctctgtctgagatctaacactggtgacataggtggatgacagttgtagatttcacatgtgtccacgtggaaggaaacttgcctccctacatttgcaaaaggacaaattcatatttaccattcacagtgttttctctgtgcctaggaagtttcttaaatactgtcacttttcgtggtggcgggcgcctgtagtcccagctactcgggaggctgaggcaggagaatggcgtgaacctgggaggcggagcttgcagtgagccaagatcgcaccactgcactccagcctgggcaacagagcgagactccatctcaaaaaaaaa

SEQ ID NO: 156757 - DNA, 544 bp, Homo sapiens
ttttgctcctggcagcctgaggcacagctgcctgtattgtcctcatctgttctgactgaaggatggaggtgctgaataaattaggcctcaggcctctaccaccagagagctggagaatgggttccacgtcattcaaggacctgaattttttatgttcagggagcattgggaatcttcttctttccagggaggaattagcctgcaaggttaggacttgaagagggaaggtatttaataactgggcgaggatgggtgtggtggctcacacctgtaatcccagcattttgggaggctgaggtggccagatcccaaggtcagaagatcgagaccatcctggctaacatggtgaaaccccatctctactaaaaatacaaaaaaaaattagccgggggtggtggcgggtacctgtagtcctagctacttgggaggctgaggcaggagaatggcgtgaacctgggaggtggagcttgcagtgagccaagatcgtgccactgcactccagcctgggcgacagagcaagactccgtctcaaaaaataaaaaaa

SEQ ID NO: 156758 - DNA, 1163 bp, Homo sapiens
ccccgatttttcatgtttgccagtaagctcctgtgaggggttgagacggcggaagcttaagagtgcagtgttcctcccttccttgcctctagaggcatgctgacttccttccttgtcacagagcccttgcaaagccaaggcaaagccagagctcagaacctagagacttccttttgacaaagcagcgcctcagaagctcttctaggctttagttggggaagctttttgttgttgttgttgtgacggagtctcactttgtcacccaggctggagtgaagtggcacaatctcagctcactgcagcctccacctcctgggttcaaacaattttcctgccttagcctcccgagtagctgggattacaggcgtgggccaccacgcggctaatttttgtattttttttttttttttttttttttttgagacggagtctcgctctgtcgcccaggctggagtgcagtggcgcgatctcggctcactgcaagctccgcctcccgggttcacgccattctcctgcctcagcctcccgagtagctgggactacaggcgcccgctaccacgcccggctaattttttgtatttttagtagagatggggtttcatcatgttggccaggctggtctcgaactcctgacctcaagtgatccacccaccttggcctcccaaagtgctgggattacaggcgtgagccaccacgtccagcctggggaaggtttttgtaactgctgctcgtcgtggtcagaatctgggcccttcaaggagcgggtggggtaggatagtgaggggaagcctcccaagctaggacaagagcaagcagaaacaggcaaatttgtgtaagttcaggttcaaggactctccatcctagctcatctccaaagagttgatgtactcccgaacccatttcttctctgggttggcacacacttggcggttctttcgggtgacaaagacgactgctgggttggagcacttgccactggtgtagaaatactccttgatgtgggcacggggcagtgggcgggcaatgtaggcaaagcagcagggtgtggtgtccgaggaatatggggaggcagatgccaggagcgcagagggcagtagcaatgaggatgacagcgaggcgtgccgcggagaccttcatggtacctgtggagaggctgtcggagg

SEQ ID NO: 156759 - DNA, 526 bp, Homo sapiens
ctcattggtaaaatgtgggtgctggattggatcttaaagatcccttccagctctgaaatgctgattgtacagtatattcttcccagattgactcactgtgcaatctttacaatactttttatcttttcacttttgacataggtaatgttgttgagcagttgagcaatgttcagtccagttgtgaagctggagaagagaaatgggttttaaaaattaagtgaggggaggccgggtgcggtggctcacgcatgtaatcccagcactttgggaggccaaggcaggtggatcacgaggtcaggagatccagaccatcctggctaacatggtgaaacctcgtctctactaaaaatacaaaaaattagccagctgtggtggcgggcgcctgtagtcccagctactcaggaggctgaggcaggagaatggcgtgaacctgtgaggcagagcttacagtgagccgagatcgtgccactgcactccagcctgggcgacagagcaagactctgtctcaaaaaaaaaaaaaaaaaaa

SEQ ID NO: 156760 - DNA, 615 bp, Homo sapiens
acttgatatgattgttgggaaggcatggaatatgtttgcttcaaaagcctacattcatcagtacacaaaatttggaatcgaagaagaggactttttagacagtttcacgtcattagagcaggttgttgccagttactgtaatctctgatcttgaacaatgggaaaagtataccttaaggcatttctggactaaaatattttcaatactattttctctgtaaagttttcaaagttctccatcctggctaacacggtgaaacaccgtctctaccagaaaatacaaaaaattagccaggcgcagtggcgggtgcctgtagtcccagctactcgggaggctgaggcaggagaatgacgtgaacccaggaggcggagcttgcagtgagccgagatcgcgccactgcactccagcctgggcgacagagcgagactccgtctcaaaaaaaaaaaaaaaaaaaaaatgttttcaaagttccattctgttaaagtaaccacgtagaatgctgagtctattctgcatactatgcccacagaaaaggaagaaaactttttaaaatggagaatcgcatgttttcaatgaaaacattcacttggtatttcatttgtaagaaaaaaaaa

SEQ ID NO: 156761 - DNA, 5435 bp, Homo sapiens
gagatggagtctcgctctgttgcccaggctggagcgcagtggcgcaatctcggctcactgcaagctccgcctcctgggttcaatgttgtgaatattcttaatgcatttcattatttatatacaatatgatactgatgaggagtcattatattctgagtagttttcctgaagaccacaagtctcaagtcaaggaaagtatccttaatctaggggaaaaaaaggaagtttctaaattgttccacaatacacttcactaagaattgtactgtatgacaatgctaatttttaaaaataatatatatatatatttttgtttctgttaaggatggtggtatttgcttaatactggttttcctgtatagcagatattttcttatggctatatttacttgaatgaaaaatcaaagatgactacctgaatattccagtgtataattacagtacaacctcatgaaatggttgattctgtggtctcaagtctagaatccagaattgctgcccaatactgtaaatttattcagaacaaaataaggcagttggacgtggtggctcacgcctgtaatcccagcactttgggaggccgaggcaggcaggtcacctgaagtcaggagatcaagaccatcctggctaacacggtgaaaccccgtctctactaaaaatacaaaaacagaattagccgggcgtgctggcgcatgcctgtaattccagctactcgggaggctgaggcaggagaatcacttgaacccggggggcgggggttgcagtgagccaagatcacgccactgcactccagcccaggcaacagaacaagactctgcctcaaaaaaaaaaaaaaaaaaaaaaaaaaacagaacaaaatataaccaattaactaagcacagtttacatcttttaaaaaaatcattttaatactacaggcttgaccatgaaataatgacatgtctatataaaagtgtaggttgacaaacttgtcatggaatgccaaggagactgtggagggagagggagacaaccactaaagatataacagtcatatgcaaggaattaactttccttattggcttgggtacctgggtgctcaaagaatgtgtacaaatattaaaaataccattctttaaaacttacatccaaaaccaggaagtatgtcttgatatacttttctgcctcattccaaaattttcctatgctcattatataagacaggcaaaatcagaaggagaaaatttagaaacactaaaccaaaaagccaatagagaacgtgatgtttgaaaaatatggacttaatctcaattgaaagagttcattttttcttaccacagagctcattagttagaaaagtgctcgaagcatatctgcacatttaatattaaaaataaaaaaataaataaaagccagcgttctgattcaggcaaagattttaagaaaccgaagaaagaaaaatgaagaaatttcaagattaaaaaatggactgggcatggtagcatgcacctgtagtcccagctacttggttagctgaggcagggttgcttgaacccaagagttggaggctgtagtgtgctataactgcacctgtgaatagccactgcactctagcctgggcaacatagcaagaccttgtctcttaaaaaaaaaattggagagggggtgggaggtaagtgatttagcctgggaactcagttctctcagataaagaaatacaaaattttaagctatactgagtctggataaatatgatctgttaagtgtaatcaatacactagcccttctgttcagcctttcctataataagctcctggttgattatggtcttttgaagttccccaaacttgaaaaagtaatctgcctaaaggtactagaggtgctgctctctttatcgcctaagaatgctggtattacataatttgcagaggacagggcagtaaaacttaggagttttccctcactatatttaaactgtgttaaaatagctcaaggttgtgaacatatccacattttacatataatagatatttcaaaattcataaccaatttgtcttctcatctgaatttctcagccactatcagcaatgtcatgtttgtgattttaagtttactattttagcttcttataacaattctagaaaaataaagcaacctcaaaatgagcgatttcaatttgtcatcccataaaagttaaacatcaacacaattcctaagggaagtgagaaacagacgtgactgagatgaaatgatctccactacttcctcctcctgtcagcaaacagccttattcaaattttcaaaacatgcaagctttaggtgacttccctggaaaaggccccatcccctgcaaatcatttcatgtaatgcactaacgaagccaagcagaacatggaggacaggagcacattagggagcctctcttgagtgttaagcagagatgtcaaaactaccaagtatttacgccaaatcctgaaagcaaaacctcatttttgcagtaacctggtctggagaccctctcagatacatctagtctctgaagcaccttttgagttgtacggatgtaagaatagctttgaattatagaagttatatgcatctttaagaatcacattttgatgattataaaaatttttttctattttacaacataggttcagctacactgaaaaaattacactgcttattgaaatacatttcattttagaaacagactaccaaagaagtctatacaaaaactctaaaataatttctgtagtaaaataaagagtgcgttaggagagctacacaaagaagaaaatttctgtctttctctataatgcttgatatactgtgaaacatggccagctcaactctgtagctggcaccaaaagctgaaaagaattccttaccatacacagtgatacaattaatgctctggattaatctcacagccttcccgattagtacaaaggaaaccaggcctatcccctctttgaggagaagtctgggatataaaagcaagcatacctcatcagctgatatgaaattataaaattccacaagtctgagtatttgaaacttataaaagtcatcagaaaatgcaagcaaattgggctttagttcagtggttcccctggtttagatgacagtccctctgtgagctcaaggtagtcttcttgttcattcccttggatctgttgattcagtgacactggcgaagctcttggtagaggcggaggagagtctgagaactaaggaaatgctcaccgactccctctgtgcacgctcacacatggggacgtgtctcctggagaacacactaaggagacggatgttaatgatgctgtgctgaactgttcttctctgccaggtgccgcagaaagttgtcctcactctggcctctatgatttaaaggctcactcttaaagagagctggaggtggcgggaggtgagggactggagggatgggaaggtggtgtgggtggtgagggtgtgggtggatgtgcaggtgtgagaaggggtgggggatgggccgagggggaagagtgcttacaggattcatattgattggaggggttggggttgtggctgtgttcaccacagaaggaactggggtggctggggaagttgtaagtgggatctggacagcaggtggcacattcacggggctggtcacccgaaagcacttctccttgtgggccttaagcatgttcgagaagcggaaccgctggccacacacatcacatggatagggcttctcgcctgtgtgagttctgcggtgtctcttcatgttggggcggctggtgaagcttttgccacagatttcacagataaagggtttctctccagtgtgtgttttcatgtgttcgtcgaagtactgcttcatgttgaaatccttgccacaccactggcacatgaactgtttgtgcccaatatgaatgctcatgtgggagcgtagctggtacttgtactgaaacctttcgtcacagttctcgcatctaaagggcttctctccagaatgctgcaaggagtgcaccttgagtgacatactgcgtttgaatgattttccacaggtttcgcatgtaaatggcatgtcttttgtgtgtgcaaccatgtgtttccgcacatgagccatggtatagaatttcttctcacaaatttcacaggaaaatttcttttctgcatatccatggacgatcttgatatgttcatgaagggaccagagtttcttgaacgatttgttacaggaaacacactgaatgtttttttcacagtctgtttgctggtgaagggacagctcactttccaggacaaacttcttgccacatttatcacaaatctgcatgcgcctatgagtaacgttcatgtgcttctccaggtaccagcgagtgttaaataccctggggcacttctcacaggtcagagtctctttctcttcacacttagctttctggactggtgctttgggctcctttgtggcccgcttcttacgcttaggtggctctacactcttcctacgacctcttgtagttctgggagtaggggaagtggtagctgcggcaacagaggcagctctcctggttctcctttgtgtaacgctgactttctctactatcttctcctttttcttctgcttttcattctctccatagtcattgctgtcatctgtggcctcttcctcactctcttcctcttcctcctcactgcttgtcttaagaacaggagtctctttggactgagaagagacacccttttcccctttagatacatttaatgtttgattattaaggtttacctccactatgatctgctcccttttgtaagagacttcttcctcttcctcctctgtgtcatcagaattctcccggtcttccttaacagcatgcacgtcagacactgctcttgtctccctgaaatatggctgttcttctgtttcatggagatgcggtttgctcatcttggtgtccactaacacagaataaggacttcctgattcccttttgtacactttggtggacaggtcaagttcttggttggcaccatgataaaaggaagatggcacttgaccacgacggctatcttcttgtgccattcctgctacatgcacagcacagttttcaaccagctcctgacaagaactggctgtgtggctcattggtaagtggcccaatttattaaacagttcagactataaagaaatagctttaaaacaaggtaattattaagactcaaatcttttctcatccacaaagaatcactcaaatgaaaaaaagatattcctggaaactgtgtgcaattcttccagtgttgcagcaccaaagcatgagtcaaaaaggtttggtattatggcaagagcagagcactagtgatttttcttctgaagagagctgcaagggacttgggagcatcttatcttttctgtctcctgccacattgtgagcgctccgccgcccagataaccgccggctccccgc

SEQ ID NO: 156762 - DNA, 6550 bp, Homo sapiens
ctaatattttctccccgtggggtgaggcagttgaattattcatcatttctgtttatggacctttggtattcagcaaagcagaggcaaaaacttagaaagagcgctatgtccagagatcagtattctgaaagggcacttgtcaagtggaatttcttatttgctgcctgaatcttcagaggagacaactgaattaattaataaaacaaaataccagaattttgggaggccaaggcaggcagatcacgaggtcaggagatcgagaccatcctggctaacacagtgaggccccatctctactaaaaatacaaaaaattagccaggtgtggtggcgggcacctgtagtcccagttactcgggaggctgaggcaggagaatggcatgaacctgggaggcggagcttgcagtgagccgagatcacaccactgcaccccagcctgggcgacagagcgagactccatctcaaaaaaattaaaaaaaaaatacattgagagacagagataccaccaacatatgaaacacccatggagcactaagattcagtatgtatgtatggatggatgacacagatcagtagagaaacagataatacaaacattgtgtatgtttgtattcacacacacatattgaggccagctatgggggaggggtgagagagagagtggctcaaaaagaactagaacaagggatacacaaaaagatagaataaaaactcagtgtcataaatatgtcagtggcagaaccggagagagtaatcaagagaaaaagcatgtagcagaaaaagaaactgtacatcaaaaatgaaagcacccaagccaggagatccaggcggtagtgacttattgactacttacctccctggagaagcagcaagaccactactcctgcaatagatgggtggaaagagaaatctgttgagccaaacctggttctgctgtcccagataatggcagtgaaaatgtgggtgtgctcacatacaagatagagccacacttcatctgggctccccagccacagctgctgtggtttctttttttttttttttttttggagacggagtctcaactctgtcaccccaggctggagtgcaatggtgcgccatctcggctcacatgcaacgtccgcctcccgggttcacgccattctcctgccctcagcctcccaaggtagctgggactacaggcacatgcccaccatacccggctaattttttttttttttttttttttttttttttttttagtagagacggggtttcaccgtgttagccaggatggtctcgatctgatggtctcgatctcctgacctcgtgatccacccgcctcggcctcccaaagtgctgggattacaggcgtgagccaccgcgcctgccccagaatggtttttaaagccacagttgagaggccacccattgcccggcgcctggacagtgatcatcttgttcatcttgttcagtcctttcttgtgtgattggaattattcatcccctttgaaagatgagaaggttgagatgcaaagagtctacctttccaagttctcactgctggaaagagctagaagcacagttcaaagttctggcttctggactctgcagtccaggtctcccttctcccacttgcctaccctcaatgccacactgtttttgaagtggcccataacttgaaggaaaagtttaaagacagttcaatttaatcatcagaatgcattcttttttttttcggagacggagtttcactcttgctgcccaggctggagtgcaatggtgcaatgatctcggctcactgcaacctctgcctcctgggttcaagtgattctccagcctcagcctcccgagtagctgggattatgggcgcccaccaccacgcccggctaattttttgtattttttttttttagtagagatggggtttcgccaggttggccaggctggtcttgtgaactcctggcctcaggtgatctgcccacctcatcctccaaaagtgctgggattacaggcatgagccaccacacccggccccccttcaattttaaagccatcactatgcaccctatgtctatgccaggcactaaaataagatgaagcaccttcttggagtttacatgctggtaattatgccagacagtaataaaataggtaagaacggctgtgggggaagtcagctgggttctagttacagtcgcatttcaggaaatgatttaacatgctgactttaacaacctaagcctcttctccatgtgtgcacacagggtagatctctgaacacaggtgaccctagaagtgctgtaacttctaggggaatggctgtgttgagtcaaggcaggatgacagttcagcctcctcccaggctagtgcaaagggctcttcactcggattaaaaccttctctcccagaccgaattgccaactcccaacacccctcctacagaaaatttggagtcctcgcttattccctggcagcccctacctaatagggtggtgaattaattatcaaacatgcgacagtttagcgaaaatggcaacactttggaataaatgactgtaatgtacatcctggcgcccattttgcaggtcagttgctctccctggaaggaagagtgttctcggatttcaccttaaaggaggaaggctgccagaactgaactagcacttctgaatatcctgaggcgaggtccggtgacttccttgggaagctctgccgcgcccccatcccaccctaccccaccctaccccaccacagcaggcgctggagtcctgggaccaccaggatctgaggcccaaatccttcctcactaaggggaggagaggggtgctccggcagggcaggatgggaaggcgtgcttgggcgggattgtgacatgagtgccctggtgacatggagcagttctgtggcataaataaaggtgtcataaagacagggcgggactcatgcttacaaggggcacgagcgtctcggagctgccagaatgacttccgctcagtgcccggcactagcgtgtgtcatgtccccgctgcgtttctggggcccatggcccctccttatgtggcaactattgtggctactagtcaaggaggctcagcctctggagtgggtcaaggacccgctccagctgacctctaaccccctggggccgcctgagccctggtcttcccactcctcccatttcccacgggaatctccccatgcgcctactctcccagcagacccgtgggactttgatcacctggggccctctgcttcctcagagatgccagccccaccccaggaatcgactgaaaatttggttccattcctggacacctgggattcagctggagagctgcccctggagccagagcagttcttggcttcacagcaggatttaaaggacaagctgagtccacaggaaaggctccctgtttcgcccaagaagctgaagaaagatccagctcagcgttggagccttgctgagattattggaattatacgccaattatccacacctcagagtcagaaacagactttgcagaatgaatattccagtacagatacaccgtatcccggtagcctgcctccagaactccgggtgaagtcagatgagcctccagggccctctgagcaagttggaccttctcaattccatctagagcccgaaactcaaaatccagagacccttgaagacatccagtcctcttcactccagcaagaagccccagcacagcttccacagctccttgaggaagaaccttcttcaatgcagcaggaggccccagctctgcctccagagtcctctatggagagtctaactctaccgaatcatgaggtgtcagttcaacctccaggtgaggatcaagcttattatcacttgcccaacattacagttaaacctgcagatgtggaggttaccataacttcagaggctaccaatgagacagaatcttcccaagctcagcaggagaccccaattcagtttccagaggaggtggaaccttctgcaacccaacaggaggccccaattgagcctccagttcctcctatggagcatgaactttccatcagtgagcagcagcagccagttcagccttctgagacttctagggaggtcgaatcttctccgacccagcaggagaccccaggtcagcctccagaacatcatgaagtcacagtttcacctccaggtcaccatcaaactcatcatttagattcacccagtgtctctgtgaagcctccagacgtgcagctcaccatagcagcagagcctagtgcagaggtgggaacttctctagtccagcaggaggctacaactcggctctcagggtcaggtaatgatatagaacctcccgccatccagcacgggggcccacctctgctttcagagtcatcagaagaagctggacctttagcagttcaacaggagacttcatttcaatctccggaacctattaataatgagaacccctctccaacccagcaggaggctgcagctgagcatccacagaccgctgaggagggtgagtcttccctaacccatcaggaggccccagctcagactccagagttccctaatgtagttgtagctcaacctccagagcattcacacctgactcaagccacagttcaacctttggatctggggtttaccatcactccagaatccatgacagaggttgaactttctccaaccatgaaggagaccccaactcagcctcctaagaaagttgtaccccaacttcgagtatatcaaggggtaacaaatccaacaccaggtcaggatcaagctcagcatccagtgtcacccagcgttacagttcaacttttggacctgggacttaccatcactccagaacccactacggaggttggacattctacagccccgaagaggactatagtttctccaaagcatcctgaggtgacacttccacatccagaccaggttcagactcagcattcacacctgactcgagccacagttcaacctttggacctggggtttaccatcactccaaaatccatgacagaggttgaaccttctacagccctgatgactacagctcctcctccaggacaccctgaggtgacacttccaccttcagacaagggtcaggctcagcattcacacctgactcaagccaccgttcaacctctggacctggagcttaccataactacaaaacctactacagaggttaaaccgtctccaaccacggaggagacctcaactcagcctccagacctgggacttgccatcattccagaacccactacagagactggacattctacagccctggagaagactacagctcctcgtccagaccgggttcagactctgcatcgaagcctgactgaagtcacaggtccacctactgaactagaacctgctcaggattcactggtgcagtctgaaagttacacccaaaataaggctttaactgcaccagaggaacacaaggcctccacaagcaccaacatatgtgagctctgtacctgcggagatgagatgttgtcatgtattgatctcaacccagagcagaggctccgccaagtgcctgtgccagagcccaacacccacaatggcaccttcaccatcttgtaagaatcacttttcctcaattgtcctctgtgtcctgcctgacatggcagccttttcctggaggccttcctgggccttctttatctccccaagccatatggacaactgactttctgctttcacctttgcttgtcaactctcccttctcctcattctcttttaatgttaggccccttctccagtcttttccttttactctggtcttttactcgtttttgtatccatttttatttagccccatcacatcattgcttaaccgctgctctcctcccattttcgcttcaccctctttacagcagcctgtccctctcccgatctcagtgatgatgctctaagtggttaagagttgattccggagccaggctgcctgggtttgaacccagatctatttattagcttggtgacccagagcaagttattctgcctgtgactcaatttcctcacctttaaactggggatcatgctagttagcatttcataggattgttgtgaaatttaggtgagtgaatatatgaaacacttcatcagtgcttagcatatgtaggagagttggctgttcacatgattattcagtcctttagttttgtccagaactcatttttgtccctagctttctatatgtagaactagttttatgtcaaacccagggccaagtatgctactgtctccagaacacgaaaatgataggagggaagaggctgggtgtggtggctcacgcctgtaatcccagcactttgggaggccgaggcgggcggatcatgaggtcaggagatcaagaccatcctggctaacatggtgaaaccccatctctactaaaaatacagaaaaaaattagccaggcatggtggtgggtgcctggagtcccagctactcgggaggctgaggcaggagaatggcatgaacctgggaggcagagcttgcagtgagccgagattgcaccactgcactccagcctgggcgacagagcaagactccatctc

SEQ ID NO: 156763 - DNA, 790 bp, Homo sapiens
gggctagtgtaacagcatgcaggttgaattgccaaggatgctcgccatgccagcctttctgttttcctcaccttgctgctcccctgccctaagtccccaaccctcaacttgaaaccccattcccttaagccaggactcagagaatccctttgccctctggttaacctgggactccatcccccaaacccactaatcacatcccactgactgaccctctgtgatcaaagaccctctcttttggtgagggttggctcttagctcattgctggggatgggaaggagaagcagtggcttttgtgggcattgcttctaaccctacttctcaagcttccctccaaagaaactgattggccctggaaccttcacatccactcttgttatgactccacagtgtccagactaatttgtgcatgaactgacataaaaccatcctacggtatccagggaacagaaagcatgatgcatgatggcaggacaggaacgcaggctgggacatttagagagacataaatgacaaagaaaacccagaacccatttctcagggcactttccagaactctctcatattcgtgggctggcatcaaccctgctgcttgaggaaagcacacggaaaggaacaaacatctggtggaaagctcaggtggcagcggactctgactccactgaggaactgcctcagaagctgcgatcacaactttggctgaagcccctgcctcactctagggcacctgacctggcctcttgcctaaaccacaaggctaagggctatagacaatgagttccttaggag

SEQ ID NO: 156764 - DNA, 526 bp, Homo sapiens
tttttttgagacagagtctcgctctctcacccaggctggaatgcagtggcccaatctcggctcactgcaacctccacgtcccgggttcaagcaattctcctgtctcagcctcccaagtcgctgggaccacaggcacatgccatcaggactggctaatttttgtatttttagtagagatggggtttcaccatattgatcaggctggtcttgaactcctgacctcaggtgatccacccgccttggcctcccaaagtgctgggattacaggcgtgacacttacacctggcctttttctctctttttttaaattgagatgggtggggtctcactatgttgcctaggctggtctcgaactcctgagctcaagcgatcctcccgccttggcctcacaaattgctgggattacaggtgtgaacccaccacgcttatcctggggcttttaattcttactgaaaatcatagtctaaatttcccaaagggattcagaatcctttggggtacattcaagtcttctaggccatctctg

SEQ ID NO: 156765 - DNA, 571 bp, Homo sapiens
gacatggagactcgctgtcgcccaggctggagtgcagtggcgcaatctcagctcactgcagcctctgcctcctgggttcaagtgatcctcctgcctcagcctcccaagtagctgggaatacaggctcttgccaccacgcccggctaatttttatatttttagtagagacagggtttcgccatgttggccaggctggtctcaaactcctgaccttaggtgatcagcttcccaaactgctgggattacaggcgtgagccaccatgcctggccagaatcccactgtatttttttcatttcctctctgtggattataaaagttctctttaaaaataaagtaacttttaaagttcgtgaaaacgtatgagattaaatgatgtaagagttcgttcatttctaataaaaaggtattttttgtacttaggaaaatgggtatatggatacacaaacaactttattgaccatttttattttgcctgggataagttccaagttttcaatgttgcactgcatcatcttacagaacagattccactttgaacacgaaatgtacaacgaattccaccgcactgac

SEQ ID NO: 156766 - DNA, 336 bp, Homo sapiens
tgaactattacatcatattgcaggagttaagggtctcatactgtcacccaggctggaatgcaatgaagtaatcacggctcactacaactttaccttcccagcctcaggcgattctcctacctaaacctcccaagcagctgggaccagaggagtaacaaggaaggctagcagtgcagcccaggtccagagctgatgaatggtgcagtgctgctgttgtcatagcaaccaagaggaaaaaagcagcaccatataaggatctgtgacatggattctgggaacaatttatattaaaaagctgtaagctcctcatgccttaaagctgtaaaaaaaaaaaaa

SEQ ID NO: 156767 - DNA, 435 bp, Homo sapiens
gctttaaatgattttattaaaaattgtaccaattgatggggggaaagatatacacacatacacacatatgcatgtgaagaacataaacacataaagccaaaggtcctgtacagttttttaaaaaatggggcccctttcttcttcctctctcccagaggcagagtgcccagaccccagggcagctaccctggggatgaacaaaatgctacattctcactgggtctcctcgatagcccctgtggatccagggatggggtagaaggctgccagtggcccagactttgaaacaggccaggcagaggccaggctgagtcctccaccctcattgcaggagtccagcgtctggcctggggacttccctcaccagatctgttgaccaacttctagaaacccctgctttggggttgtgaattagaagggctgttttgaccctga

SEQ ID NO: 156768 - DNA, 1517 bp, Homo sapiens
ctggcagagtagctgtcaggaaggagaaaggttctttctggctggttgtttttaattggcttagtgatctaaactggccccttcctcctctgcctggtgagttggcctaaacattcctcaagtctagcctcaggagacctgcgccggcgccccgacctccaccccctcagactccatcccccacccccaggagcctggctgtctctagcgaggggtggaggctgctattaagcatgacgctagagtctgacctggatcctgacctgtaaccagctgaagacggtggaggctttgtggcttgctgagggtgggggttgggagagggactggaaaccttcctcctcgggaaagaaatgcctgggaggaagggaagcctgatattcagggtcaaaacagcccttctaattcacaaccccaaagtcaggggtttctagaagttggtcaacagatctggtgagggaagtccccaggccagacgctggactcctgcaatgagggtggaggactcagcctggcctctgcctggcctgtttcaaagtctgggccactggcagccttctcttgctcaatccgaggtggaaaaagatcacctcccagtgacctccctcagcccccaggggagtaggtctgtgtcccgaagctatgtggcaggcttgtttgaaggacccagaggggcccagctgacctgtctcactgctcctggcagcccagccccatcggcaggtggcccctgcctggggggttattcgggacggttcagccagggcctcccaggaaagagtgctgtggagccacggtgacttgtccttggacagcaaggagcatgcttaccccagttgagcacttctttttgagggacttgatggggaggtggggtaggcagaagggacgtggcagaagcgggaagactttggtcaccatggctctgcaggccttctgcaaatcagtgctggcctgggctggaaacagcttctgtgtgtgaaggtgaggactctttggaagcaggccatcctggccagacaccctagcaggaaggggctcacctgtcacccttaggccagcctgagggcttggtggggacttttggagtcttggaggggaatagcggaaaaaaagctgagctccataggtgccccagccagcctccccagcttaaaggtgctcaagagccccaactgccccctctctctgtgcaggtggccagtgcccctccctgctctgggagcattgctagccttctaccccatccctggatccacaggggctatcgaggagacccagtgagaatgtagcattttgttcaatccccagggtagctgccctgagatctggagcagctctgcctctgggagagaggaagaagaaaggggccccattttttaaaaaactgtacagagcctttggctttatgtgtttatgttcttcacatgcatatgtgtgtatgtgtgtatatctttccccccatcaattggtacaatttttaataaaatcatttaaagcaaaaaaaaaaaaaaaaa

SEQ ID NO: 156769 - DNA, 406 bp, Homo sapiens
aatatacacacacatacactaaattgatcctatgttttctttatagggacacatggaaggagaggtgtggggtttagctacacacccttatctgcccatctgtgctactgtaagcgatgataaaaccttaagaatatgggatctctcacctagtcattgtatgttggctgtccggaagctgaaaaagggtaagaggctctcacacttgaacgtagattaagctctcacagttttctaacctttacaaatataagaaagcaaaactaggcacattttaaaaaggctttaaatatgttgaaatatttattcaatgtctacttgctcatggtgccacatagagaaacgtaattgtactcagtcttggctttatgggacctcctatcatcatgcctaaagtgagcaaatt

SEQ ID NO: 156770 - DNA, 5748 bp, Homo sapiens
atgcccctcaagctgcaaaactgccttgcattgcatcctgaacgagtgttggtagcaacaggacaagttgggaaagagccttatatttgtatttgggattcatacactgtgcagaccatatcagttttaaaggatgttcatacacatggtatagcttgcttggcgtttgacttagatggacagtgcagtgtgaaagcagtcatagacaatgcacgaaggaatgagtgtggctatattccagtaaaactttatttacaaaaacatagtttctctttgatttgtttgcctttttattccttcctggacttcttggacataaatcagcgcttggtttcagttggacttgattcaaagaatgcagtttgtgtttgggactggaaaaggggaaaaatgttgtctatggctcctggtcatacagatagattctggagtttatgtggaaatgctctgaccccaaaacgaggtgtctttggtaagacgggtgaccttcagacaatactgtgcctagcctgtgcaagggatgaattaacatattctggtgcactcaatggggatatatatgtttggaaaggaatcaatcttatacgaacaatacaaggagcccatgctgcaggaatttttagcatgaatgcttgtgaagaaggctttgctactggtggcagagatggttgtattcgtctttgggatttaacttttaaaccaattactgtgattgatctcagggaaacagaccagggatacaaaggtttgtctgtaaggagtgtgtgttggcgaggtgaccacattctagttggaacacaggacagtgaaatttttgaaattgtggtgcaagaaagaaataaaccttttctaattatgcaagggcattgtgaaggtgaactttgggcacttgctgtccatcctactaaacctttggctgtgactggaagtgatgatcgttcggtcaggatatggagcctagtagatcatgcattaatagcaaggtgtaatatggaagaaccaattcgttgtgcagctgtcaatgcagatggaatccatcttgcccttggaatgaaggatggctcattcactgtacttagagtaagagatatgacggaagttgtacatattaaagataggaaggaggcaattcatgagttaaaatattcaccagatggaacttaccttgctgttggatgcaatgacagctcggttgatatttatggagttgctcagcgttataaaaaagttggcgagtgtttgggatcccttagtttcatcactcatctggactggtcttcagacagtagatatttgcagacaaatgatggaaatgggaaaagacttttttatagaatgccaggaggaaaggaagtgacaagtacagaagaaataaaaggtgttcattgggcttcatggacatgtgtttcaggccttgaagtaaatggaatttggcccaagtattcagatatcaacgatataaattcagtagatggaaattatattggccaagttttagttacagctgatgactatggaattataaaattattccgatatccatgtttaagaaaagaaagtctggctgactctcatagtgatgaatcagattcagatctgtctgatgttccagaactggattctgaaattgaacaagagacacagctcacctaccgtcgacagtgttctgcaggctgtacaagcagggcaccagcatctgctcagcttctggtgaagcctcaagaagcttttactcatggcagaaggcaaagggggagcagttacagaggttatgactgtcgaagtaatctgttttatactcaaattggtgaaattgtgtaccatgtggcagcagtgggtgtcatttataatcgacagcaaaacacacagcgtttttatctgggtcatgatgatgatattctctgcctaactattcatcctttgaaagactacgtggcaacaggccaggttggtagagatccctcaattcatatatgggatacagagaccattaaaccattgtccatattaaagggccaccaccagtatggtgttagtgccgttgatttctcagcggatgggaaacgtttggcatcagttggcatagatgatagccatactgttgtgctctgggactggaagaaaggagagaaactttcaatagcaagaggaagtaaagataagatttttgttgtaaagatgaacccctatgtgcctgataaactaattacagctggaattaaacacatgaaattttggcgtaaagcagggggaggattgattggaagaaaaggctacataggcacactggggaaaaatgacacaatgatgtgtgcagtgtatggatggactgaagagatggctttttctggaacatccacaggagatgtgtgtatctggagagacatctttcttgtaaaaacagtgaaagcgcatgatgggccagtgttcagtatgcatgcattggaaaaagggtttgtaactggaggaaaagatggtatagtagctctttgggatgactcttttgaaagatgtctcaagacctatgctataaaaagagctgcattggccccaggatctaaaggtcttctcttggaagataatccatctatacgtgccatatcattaggacatggtcatattttagttggcacaaagaatggtgaaatactagaagtggataaaagtggcccaataacacttctggttcagggacacatggaaggagaggtgtggggtttagctacacacccttatctgcccatctgtgctactgtaagcgatgataaaaccttaagaatatgggatctctcacctagtcattgtatgttggctgtccggaagctgaaaaaggtgcaaaagggaaatgtggggttggagcccccatacagagtccctactggggcaccgcctagtggagttatgagaagagggcaaccatccttcagaccccagaatggtagaacaactgacagcttgcaccatgtgcctggaaaagccacaggcactgaatgccagcctgtgaaagcagccaggaagggggctatactctgcaaaaccacaggggcagagctgcccaagaccatgggaacccacctcttgcatcagtgtggcctggatctgaggtttgctggaggtccactccagaccttctttgcctgggtccctcccacacctcgaggtatcaccagtggaggctgcaaaacagtaaagagggtcactgaactgataccagtggaaacgcccctgtataaggtgtctagcaacccctgttggggtggtctcacccagtcaggaggtacaggatccaggacccacttaatgaagcactctgactaccccttggcagagggggtgcattacactgggggaaatcccacttgtcctgactgcccagattcctcagagctgggagctcagtcatctgaggcagcagacagccaaagtgatgacagccgtcccttcccccaggaacttggtagtcttcggcagtctgtagctaagtggccactgagaatctgtgcagctctatgcttgggactcaaggaactggtggcatgggctcacggaggggatctcctgatccaccagttgcacagatccatggaaaaagtgtggtttcccgggcaggatagcacaatcactcactgcctctcttggctgggagtaggagctccccttgtcctgtgcagctcccagaaagcagcaaccctagtactaagggagagtgaacaagttaaaggtgattcagacctgtttggaaatggtgtggctgccaccagaacattcagtgagcttgtggcgaaaaagcttgccagagggtgcagccctcagtggaacagtgagagtagtcacttggtgaaggagaagcttgccagaggcagcaggccagagctgaatggtgggaggtgttgctgtttttctcctgatggtaaagctttagccgtaggtctcaacgatggaagcttcttaatggcaaatgcggatactctagaggatcttgtgtcttttcatcacagaaaagatatgatttcagatattcgattttcacctggaatttggccagtaattggagaagttacagatgtaactgcttcttgcctcaccagtgacaaaatggttctagctaccggggacgatttgggatttgtgaagttatttagatatcctactaaagggaaatttggaaagtttaagaggtatgtggcccatagtacacatgtcacaaatgttcgctggacttatgatgacagcatgttggttaccctaggcggtacagatatgtctttaatggtgtggacaaatgagatggaaggctatcgagaaaaaaggccttgtgatagtgaagaatccgacattgattctgaagaagatgggggctatgacagtgatgttacaagggagaatgaaatcagttacaccatcagagccttatcaacaaatattcgcccaatgttaggaatcaagcctcatttacaacaaaaagaaccctcaattgatgaaaggcctccagtgagcagggccccaccacagccagagaaactccagacaaacaatgtaggcaagaaaaagagacctatagaggaccttgtgttggagctcatttttggttatcgaggcagagactgtaggaataatgttcactatttaaatgatggtgatgatataatttatcacactgcatctgttggaattctgcacaatgttgctacaggttctcagagtttttatcaggaacataatgatgatattctgtgcctcacagtaaaccagcaccccaaatttatcaacatagtggcaactggccaagtagctacagctccttctattcacatctgggatgcaatgaacaagcagactttatctatcctaagatgctaccattcaaagggagtatgttcagtcagcttcagtgctactggcaaactattgctgtctgtgggactagacccagaacatactattaccatttggagatggcaggaaggtgccaaaattgccagcagagctggtcacaatcaacgtatttttgtggcagaattccgaccagattcagatacccagtttgtctcagtgggagtaaaacatgtgaagttctggaccctggcaggaagagctcttcttagcaaaaaagggctactgagcacactggaagatgcccggatgcagaccatgctcgctattgcatttggtgcaaataacttgacgtttacaggtaccatcagtggtgatgtctgtgtgtggaaagatcacatattgtgtagaatcgtggcgagagctcacaacgggcctgtgtttgccatgtacaccaccctgcgagatggacttatcgtgactgggggaaaggaaaggccgtcaaaagaaggaggagcggttaaactgtgggatcaggaactgaggcggtgccgtgccttcaggcttgagacaggacaagccacagattgtgttcgttctgtgtgcagaggcaaaggcaagatccttgttgggacaaggaatgctgaaataatcgaagttggagagaaaaatgcagcttgtaatattttagttaacggtcatgtggatgggccaatctggggactagcaacacatccttccagggattttttcctttctgctgcagaagatgggacagtgagactttgggatattgctgataaaaagatgttaaacaaagtgaatttgggacatgctgctcgtactgtgtgttacagccctgaaggggacatggtggctattggaatgaaaaatggagaatttatcattttacta

SEQ ID NO: 156771 - DNA, 1084 bp, Homo sapiens
gcctccagaactgtaagaaaatgaatttctgttctttgtaaattacccagtctgaggtattttgttacagcagcacaaaaaaactaaaacacagagtgaccttttctataggatttgaacaaatggttctgaccatctgactgctcatcaacttctgaggttcctctgttctaatgattctactgaatcacagaatcattagaatgagtctatgaatagcctatgattgtattatccatcccattatcaagctcctaattaggtatggactatattcatctaaccacagaaatcgtcattacagacaaatgttcatttctctaacttttctagaataaatctcagcttttataatgatacccagatatcctaaattttaccatatgataaattccatttagaaactattttccccccataaagcaacattcttctgtataatactaatctttccttactttccacttaattttagtaatgttcagcacagaacctgatacacagtaaaggcactcaagtgactgctgaatctgagtaacagtaaactcaatcctcaaagatttaaaaatcatagtgtcagacaaaaatttaactttttatgacgatttcagtttttgaaatacacaactcttacaagcacaaacacagtatttacatttcaagttctttgtacaaaagatgtatgccattttggaagaatattgttgagatcatgatctaaaatacctgtcagagttactcatgggaatctgctcttcacaaatccattgtattatggacataaaatatgggctaggacgccaagggtttaaccatacataaaaatactaattctcgggctggggtgcactgggcttatggcctggtaatctcaggcactttggggagggcagagggcagggtgggatccacctgaggggtcaggggggtttcaggatagggcctggaccaattatgggtggggaacccccgttcttcttacttaaaatttaccaaaatttaggcaggggtgtgggtgggccttggcacccgttaggtcccagctactcaggaaggctgaggacagaactgcttggaacccggg

SEQ ID NO: 156772 - DNA, 435 bp, Homo sapiens
attccaaactaccttattcaaataattaagagaagcatttagcagggcatttcagagagcaagaagcgcccttaaaagaaggaggtggggggtttccttaaaatatgaagaaatgctaaagctgggttataaaatatggtgctgcatctaaatatttacattcaattatcatttaaccgaaaatacacaatacaatctaattctgcaaatttcaaaagatttattaaaaatgcaatagtgtatgaattatattcctttcttgtgtctctgtgagggcagattcgacttcatttatgttttactttttcaatttccttatgctaaaatacatgtaattctaaaggatatctcttaggtgttataaaaaccaaggaaggtcaccaccaagtcaaagttagagtcaaagatacttcaaagattccatgaaatgatctg

SEQ ID NO: 156773 - DNA, 623 bp, Homo sapiens
  misc_feature (1)...(623): n = a,t,c or g
tggctgcatgaagtcaaacagggtaacaccagtgaagctcaagtcaagagctgtggatattttgtctaaccaacaagaagtctcaagaaatcaggcagtgcagctgcctgctctcagctatcgtatccagccaaaagatgcatgatgatggagtggtgggggaaggccacttcagtatcctatttaaaagtaaacttcctgaataatggatatatgtggagatacagacatagatatatagatacagctgtaattatttagcctcaagtgactttctccattgcttcacgctatgccactattttgcttctttaatttttttaaccttgcttagtattctatagcttgcccaaccagttttacgtccaaggaaaattagccaatgcataaaatatacaaactatgaaaggcaaggatcaggaaaccagagacttttgccaccaaatctcagattattagaaactaggtgtcagggtttatcaagaaggccaggaaggccttttgggttaagccttacattcatgaagaacctcgagggtagatttttgagagcattccaaatggatggtctctggtcaaatgaatgaatgcacaaatgaataaatctgccctcactgaantac

SEQ ID NO: 156774 - DNA, 1834 bp, Homo sapiens
cagtcatttacatattgttttgagtctttctaaaacttatctgtatttttatactgtctcatatataggatcacaaattaagtttactatctgtatgtagagtgatcttttctttctttattccaaactaccttattcaaataattaagagaagcatttagcagggcatttcagagagcaagaagcgcccttaaaagaaggaggtggggggtttccttaaaatatgaagaaatgctaaagctgggttataaaatatggtgctgcatctaaatatttacattcaattatcatttaaccgaaaatacacaatacaatctaattctgcaaatttcaaaagatttattaaaaatgaaatagtgtatgaattatattcctttcttgtgtctctgtgagggcagattcgacttcatttggaatgatctcaaaaatctacccttgaggttcttcatgaatgtaaggcttaaaccaaatggtatgaattatattccttttccttttgtatctctgtgagggcagatttattcatttgaccattccattccatttgaccagagaccattccatttggaatgctctccaaaaatctacctccaagttcttccatgaatgtaaggccggctagtagctctaggtcaagtgtcattctccccatcaaagccatgttctggctttatatgtaagtttttcatagagtgagttctgacccacataatctcaatgcgcttgtgaagaatgggggaggccaaaaaagtcaaacctgttcacctcatcatatattcatgatcttgcatataactttttcacatctgattcattcagggtaaaagaaagtaaaagtaacccacccaagtctgaagttggtgttggtggcttggcatctaccacaaggcttttgaaatactacactaataagtacaatacatttatttttaaaaatctatttatttatcaaaacagtattgggacaagtaaattctccatattatcatcaaataataaaattgctactttctgtactcaattctttagaatcctagaaattgbcaaatgcattcaatttaacaatattgtaaataacaatacaaaagaaagaactctgcatatttatggggaacattgttgatgggtacagttctactggaaactcatacacatttcactatttaatttacatatgggtcttgttgaaaaaaaaccagtatgttttactttttcaatttccttatggctaaaatacatgtaattctaaagggatatctcttgggtgttataaaaaccagggagggtccaccaccaagtcaaagttagagtcaaagatacttcaaagattccatgaaatgatctgaaaacaaatttaaccaaaaaatgtgtactgtattggggcacatccatggccacccaaactgtattctatctctgactgtggcatcaaagaaaggtatatggaattataattgaccttcatgatattgctccaaagtggattgactaacactttcccctcttgacccaacatcccaagttttccttaataatgcaaacatcagtcatttacatattgttttgagtctttctaaaacttatctgtatttttatactgtctcatatataggatcacaaattaagtttactatctgtatgtagagtgatcttttctttctttattccaaactaccttattcaaataattaagagaagcatttagcagggcatttcagagagcaagaagcgcccttaaaagaaggaggtggggggtttccttaaaatatgaagaaatgctaaagctgggttataaaatatggtgctgcatctaaatatttacattcaattatca

SEQ ID NO: 156775 - DNA, 573 bp, Homo sapiens
tggtaacttttttcatttcacgtgtcaggcacaatggcccacacctgtaatcccagcactttgacaggctgagggaggatcacttgaggcctggagttcaagaccagcctaggcaacacagtgagatcccatcgctataggaaaaaaaaaatagcctaggcatcctgggccacatacctgtaagcccctagttaccttgggaggctgaggccaagaggatagcttgaagcccccaggagttggagtcaaacaagtgaccctacgaattaatgcccattgaaactcctagcctggggtaaaaccctgtctccaaaaaattttccctttgtttcattctaacaatacagtgggggaaaggaagcctactgttacccatgaatacttaaaaactgattttgaaattaaaaataactacttccactttgaaacacattatttaatcccatgaacctcagtttccatatctgtaaatgggatgatatttacctatatagattgttcattaattcaaaaacatttgaacctggtcctacttggtagggacttatctcataactaaaaagtcatacaagg

SEQ ID NO: 156776 - DNA, 538 bp, Homo sapiens
  misc_feature (1)...(538): n = a,t,c or g
cccagttttggagagtttttttnttttttaaagaatttgttcattttatgcaaaatctaaaaacaactttaatgaggcatacttaatatataaaactgcacatatgtaataaaagtgtacaatttgattagacatatgtatacacctatcactgcaataaagatcatttcaactagatttaaaatttattggtattcactaatattctcttaaatatgtatacatatttttgagacacggtctctcactccaattgcccaggctggagtgtggtgccatgaccacagctcactgcagcctctacctcctgggctcaggtaatcctcctaccttagcctctccagtagctgggactacaggcacacaccaccatgctcagctaatttgtgtgtgtgtgtgtgtagagacaggagggtttcaccatgttatccaggctggctcttaaatattttaaatgtctgcataatctgaagtaacttacctgttttcctttctgatattggctattcctctctcctgccctttctccttccttccc

SEQ ID NO: 156777 - DNA, 1345 bp, Homo sapiens
ttttttgagatggagtctcactctgtaacccaggctggagtgcagtggcctgatcttggctcactgcagcctctgcctcccgggttcaagtgattcttctgcctcagcttcccgagtagctgggattataggcacacaccaccacatccagcttatttttgtatttttagtagaaacggggtttcaccatgttggccgggctggcctcgaactcctgaccccaggtgatccacctaccttggcctcccaaagtgctgggattacaggcgtgagccaccgcgcctggccaagatagaacttttataattttattccagttgaactaaactaaggaaccacccattagcccagttcttaggagaggtacttcaaacttgaaagaatatgtatttcggtaacttatatgtgggctaaccatcaaatacataggtcatctaaggctaaaactttctgtatttatacagttaaaacttattaaacccaaaaatttttaatgggggtaatttttaaatatattttagggaatttacagtttgtatctgtttcttagtaggtgtggcctttaaaatatgtgcttattcattgttaaattccagaataatagagtaatacttaatactgtacattcccacttacgtatattttattaaaatttataagcaagaaattatacataagtggtcatgatcttagggagacaaagaatttctcttagaaaagagaagtaatggtaatgtaaataaaaatactgtttatattcacatgattttaaggaaaactgtaaaaggcaaagattttgtaggtaatgacacaaatgtaacaaataggatgttttcttaaaattgggcagtcagtataattatgtttctgcctatggtggttggggggaggttgtatcagtctgattcttagtttttttttttcatctgttaagtagaacgtactattacttaccttaaagagtggctttgagaattttgtaaggaacaacatgtttttttggttctggaatataggaggtgctcaataaaagttgactctgactggcaaataatattgttttgtaaatgcatgatgattatttttgaccatatttgacttaagtttcattaggctaatgttaattggtactatatgaaagtgagtcaactaattataaaagattagaaatgtcttaggtgacgatgggggaaaaacttaaaatttttgcataaattatggagagatgatagagttattacagtgttattaagtattcctatgttgcattttgcaaatacttaatttaatacagatgaaaataatcttgagtcacaataaagtaatgatatgttaagtttcaaaa

SEQ ID NO: 156778 - DNA, 1020 bp, Homo sapiens
acaaagatgaaaaaggggaagaagatggaaaagaggataaaaatggaaatgagaaaggagaagatgcaaaagagaatgatgatggaaaagagaagggagataaaaaagaggggaaagatgtaaaagtcaaagaagatgaaaaagagagagaagatggaaaagaagatgaaggtggaaatgaggaagaagctggaaaagagaaagaagatttaaaagaagaggaagaaggaaaagaggaagatgagatcaaagaagatgatggaaaaaaagaggagccacagagtattgtttaaaactgccctatgtagtttcataatttggtaacatgtaccttcatgttgtaaagttaatagagataaatatttttatcaaaaattttataaacacagcctttctttagcattgatttaatttcagaacatcttcatattggattattagccataaagtttctaacatgaaacatttatctataaattttgtgattatagtagtggaatacatagaaaaaaatatgctttcaactttgtgagtgaatttcgtgttgtgtaagttatatgtcaaaatctttgaattttaattttactcttttatacatgtgataatttcataaagggagggatcccaaaaaaagagtttcatccaacattcttgttctgcaggttgcttttataaagaaggtgaactattttcatgtaatgttaagagttaaacttatctttcccaaatataactttattattagcttgggaaaaaagaaattgtattcccatttttaaaataaatacaaatgtttatttcagaagggcagttttgattatatgtgaatacacaaattttactggatttatcttaataaaaagactctgacgatgattgtgttttgttatatcttcaaaaatatagctagcgaaatattgtgcttaatttttttctattgggctattcatgaaaatatttaatattcactgacataaaattaatataaagtaaaaatcaccattttaattataataaaaa

SEQ ID NO: 156779 - DNA, 2012 bp, Homo sapiens
  misc_feature (1)...(2012): n = a,t,c or g
atggatggagggacagagaagccttttgcctgcccagttctgtgatgtacaaagagatacaagaatgtgaatggcataaagtatcacgctaagaatggtcacagaacacagattcgtgtccgcaaaccattcaagtgtcgctgtgggaagagttacaagacagctcagggcctgcggcaccacacaatcaatttccatcccccggtgtcggctgagattatcaggaagatgcagcaataacatgcttgttattacttgtgccaagaaatcctcaccagcagttgctgattttgaaaacagccaccttttttcaggggaagcattcagcaaccctttaaagaaaaagaattaaatgcatgctttaaattttttctgtaattttggaatgatgtatctttgtagagttaatgattttgtacatttgcacatgtaatcatcatacccattttcattactttgatataaggtgctaaacaaaaaaagctataggttcttcagcacatttcccccaaaacaaaataaaattgagggcatgttgcatattgttgaattgtattgcggtggtatcaacctggggggaggaggggctggcactgagatttttttttcaagattgtaatgtgattgaagttttcaacacatcaactcacatatgttcaaaaccaaaataataccttcattatcaaactggttaccatgccttacataatggagttagtatttgtgagtagaaagactttaggtaatggaaatataaataagaaagaatgtttaacataatatgctaaaaatattttcatatttaaataacatacgtaaaggtgtgctttctgtgttttatattatcttgcaaatccttttgccctttaaaaagctgaaaatcttgccatctgacttactagtcattttagtgttataaatggcattttgtacaaaatagtctattcagttcgttcattcatttaacacacattgattgagtgcctgctgggtacaagggattcaatttatgcctattgatatctgcggaccaagatacccatttagtgaaatacttttttccctgaaatctgttagaaaagactttgaaatacttcagtgcaaagtgtgtgtgtgtgaagtttagttatatcttcatcttcagatgaagttttaaagcactttgtagttctctattgccaacaatttaatgtttatgtgttgccaattcttgcaaccactgccctaccaaacctgtgggttgcaaatcagaactaaaattctaagcacgtttcaaagatgaacacttttgttaaggacccctattgcctcttcttcatggctncatttttttaactttttttaaaaggtacttttctcatcacattgtagagaggtctgcattcatcattggaaatgtctgtttagctttataaaacaaacactttgctgaaataggaaaatgagccttattgacaattaagtgcttcttgcagcaggtggtcaaagaaaagcatgactaatacgacctattagagtaatctacatctggggccattccttaagtttttcctcaccgacagtaccatcatgccttgagtgttcttttctcccaagtgctattccttaaacacgagagtttaccagttgcctaatagtgcaatagaaaaatgctttgaggataggctaactgcccataaaaacaaacttcaaattgcttataaaggtttcttcccctgttcccctttgatggaaaggtcttacatcacatataactgggaagcaggggtccctcctcaattttcagacattttgaaaggatgacagttcttgttggtagaatgagtaaacctctatattcataagttctaaaatccttcattatgagggattcaaagtatttataaaaacactgccctctaaaaatttcctcaggatctgaagtatggtcttggtcctgaatatacagtgttatcctatgtttaaaagggtgatccagacatgagacggcaactagttggtgcataagaggg

SEQ ID NO: 156780 - DNA, 688 bp, Homo sapiens; identical to SEQ ID NO: 125050
  misc_feature (1)...(688): n = a,t,c or g

SEQ ID NO: 156781 - DNA, 4665 bp, Homo sapiens
  misc_feature (1)...(4665): n = a,t,c or g
ttttgtgcttcttgagaaattctaagaattggcccagattcatgtgatagtcattccttaatccatagtcaccatgagcctcaaggagtaactcttcaaaagaatggaaaaggcgcaggtcctcaccatttccttctgtctccacgctttcagcatgcttacaggaaatgtgcttccaattggggtacctaattgtgtgccagaactcctcacagtgctctttgaaaccctccacacagattataccaggctttcctgtcatgcaaaatccagtcacatctaaccttttcccaacatccaaaatctttttccttaggtcctgctgatatatatggtgactgtagatccacattcggaggaatgtgttcttgactggctttgcttgtgtagatggttcatatacaagctttctgttcaggaaataagatgcactgttgtcctgtagccactggattgctgcacatacacagagctcacctggatcaaaagtccctatgtaagaagtgagacctttgttgagaagtagctgctgatgtctgtcaagttcagatgaccgtccaaacagctgcaatgctacataggggtagcatattatgggcactttggaaaacaaatagaggggatcctctagagtcgacctgcaggcatgcaagcttggcactggccgtcgttttacaacgtcgtgactgggaaaaccctggcgtacccaacttaatcgccttgcagcacatccccctttcgccagctggcgtaataacgaagaggcccgcaccgatcgcccttcccaacagttgcgcagcctgaatggcaaatggcgcctgatgcggtattttctccttacgcatctgtgcgaaacgctggtgaaagtaaaagatgctgaagatcagttgggtgcacgagtgggttacatcgaactggatctcaacagcggtaagatccttgagagttttcgccccgaagaacgttttccaatgatgagcacttttaaaggtctgctatgtggcgcggtattatcccgtattgacgccgggcaagagcaactcggtcgccgcatacactattctcagaatgacttgggtgagtactcaccagtcacagaaaagcatcttacggatggcatgacagtaagagaattatgcagtgctgccataaccatgagtgataacactgcggccaacttacttctgacaacgatcggaggacccaacgagctaaccgcttttttgcacaacatgggggatcatgtaactcgccttgatcgttcggaacccgagctgaatgaagccataccaaacgacgagcgtgacacccgatgcctgggacaatggcaacaacgttcgcaaactattaactggccaactactactctagctcccggcaccattaataactggatggaagcggataaagtctcacatccaggtcatgctgatataagaggtgggttcacagtcttgggcagctctgcccttgtggctttgcaagaaatacaaaaaactgtcagagactattatgaacacttctatgcatgcgagctagacaacatagtagaaatggaaaaattcctggaaacatacaaccacacaagattgaaccgagaagagattgaatccctgaacagaccaataacaagttccaaaattgaatcattaataaaaaccctacaaactagaaataacccaggaccagatgaatttacagccaaattctaccagatgtataaggaagagctgggcaatgaacagcatttatcaattctctcttccaaagagaaagaagagctaaaccatggcaaatctccaaatacaacctcctcaggagtaggaggagcagaaggagaaggagaagaagaagaagaagaagaagaagaagaagaagaagaagaagaagaagaggaagaagaggaagaagaagaagaagaagaagaagaagaagaagaagaagaagaagaagaagaaagaagaaagaagaaagaagaaagaagaaagaagaagaaagaagaagaaagaagaagaaagaagaagaaaagaagaagaaaattagccgggtctgtgggtcagacctcagcaggtggtgcctcgtgtgaggaacgctgcagcggcctggtgattgtgacgtatcccttgacatcgaaggtgaaaagggctgtgcagtcatcttcacaaccggcagaccaggagactccctctggtgcctatgctaccagggccctgggtttcaagcacaaaactgggcagccttttggggaagccactgagctagctgcagaaggatcacaactccttgcagcaagggaacaaaactggatgaacaatgagtttgatgaattggaagaagtaggcttcagaagaataaccagtttagagaagaacataaatgacccgatggaattgaaaaacatagcacgagaactttgtgaagcatacacaagtatcaatagccgaattgataaagtggaagaaaggatatcagagattgaagatcaacttaatgaaataaagtggaaagacaagattagagaaaaaagaatgaaaaggaacaatgaaagcctccaagaaatatgggactatgtgaaaagaccaaacctacatttgattggtgtacctgaaagtgacaggaagaatggaaccaagttggaaaacacacttcaggatattgtccggaagaacttccccaacctagcaagacaggccaacattcaaattcagaaaatacagagaacaccacaaaaatactccttgagaagagcaaccccaagacacataatcatcagattcaccaaggttgaaatgaaggaaaaaatattaagggaagccagagagaaagtattggatgttctggccagggcattcaggcaacagaaagaaataaagagtattcacataggaagagaggaagtcaaattgtctgtgtttgcagatgacatgattgtatatttagaaaacctcattgtctcagttcaaaatctccttaagctgataagcaactttagcaaactctcaggatacaaagccaatgtgcaaaaatcacaagcattcctatacactggtcatatacaaacagagagccaaatcatgagtgaactgccattcacaattgctacaaagagaatacctaggaatccaacttacaagggatgtgaaggacctcttcaaggagaactacaaaccactgctcaaggaaataaaagaggatatgaacaaatggaagaacattccatgctcatgagtaggaagcatcaatatcgtgaaaatggccatactggctcaaggaggaaagtagcaaactactgcatcatcaggaaacaagctagcacagtaacctggggaattaagcctcaggtttacgcactttgccctaccgagcagagcagggaaaggaatgaggtatgcagacaagtggaaggtgaacaagatgaaaagaagctttattcagcattacaacagatcagaggagacccgcagtgggtagctcctctctgccagcaggtcatctctgcagctctcagcagagaagggcttttacggacctcagaggggaggatgtgcttgctgattggtccatgggtggctatgggtggcccagaagaggcccacgaatccccactctggtcggcagaggagctcactctatggccaccaccaccacagacccacacagagtattgccagcctatcaccaatgttccccatgcatctagagggcccaattcacccgtatagtgagtctgtattacaattcactggccgtcgttttacaacggtcgtgacgtgggaaaaccctgggcgttacccaacttaatcgcctttgcagcacatccccctttcgccagctggcgtaaatagcgaaggaggcccggtaccgatccgccctttccccaacagtttgcgcagcttgaattggcgaatggcaaaattgtaagcggttaatatttttgttaaaaattcgcgttaaaatttttggttaaaatccagctcatttttttaaccaataaggccgaaaatcggccaaaatccccttataaatcaaaagaatagaccgagataggggtttgagtgttgttcccagtttggaacaaagagtccacttattaagaaacgtggacttccaacgtcaaagggcgaaaaagccgtcttatcagggcgatggcccactaacgngaaaccatcacccctaattcaagtttttttgggggtcgaggtgccgtaaagccactaaatcgggaaccctaaagggagcccccgatttagagcttgacggggaaagccgagcgaacgtggcgagaaaggaagggaagaaagcgaaaggagcgggcggctagggcgctggcaagtgtagcggtcacgctgcgcagtaaccaccacacccgccgcgcttaatgcgccgctacagggcgctgtcccattcgccattcaggctgcgcagcttgttgggaagggcgatcggtgcgggcctcttcgctattacgcccagctggcgaaagggggatgtgctgcaaggcgattaagttgggtaacgccagggttttcccagtcacgacgttgtaaaacgacggccagtgaattgaatttaggtgacacttatagaagagctatgacgttgcatgcacgcgtacgtaagcttggatcctctagagcggccgcctactactactatgactgcgag

SEQ ID NO: 156782 - DNA, 396 bp, Homo sapiens
  misc_feature (1)...(396): n = a,t,c or g
cggacgcgtgggaacagacccaggacacagagcttgtggagaccaggcctgcaggggatggaaccttccagaagtgggccgctgtggtggtgccttctggagaggaacagagatacacatgccatgtgcagcacgaggggctgccccagcccctcatcctgagatgggagcagtctccccagcccaccatccccatcgtgggcatcgttgctggccttgttgtccttggagctgtggtcactggagctgtggtcgctgctgtgatgtggaggaagaagagctcagatagaaacagagggagctactctcaggctgcagtgtgagacagcttccttgtgtgggactgagaagcaagatatcaatgtagcagaattgcacttgtgcctcacgaacatn

SEQ ID NO: 156783 - DNA, 178 bp, Homo sapiens; identical to SEQ ID NO: 122013

SEQ ID NO: 156784 - DNA, 1565 bp, Homo sapiens
atggccgtcatggcgccccgaaccctcgtcctgctactctcgggggccctggccctgacccagacctgggcaggctcccaatccatgaggtatttctccacatccgtgtcccggcccggccgcggggagccccgcttcatcgccgtgggctacgtggacgacacgcagttcgtgcggttcgacagcgacgccgcgagccagaggatggagccgcgggcgccgtggatagagcaggaggggccggagtattgggacggggagacacggaaagtgaaggcccactcacagactgaccgagagaacctgcggatcgcgctccgctactacaaccagagcgaggccggttctcacaccctccagatgatgtttggctgcgacgtggggtcggacgggcgcttcctccgcgggtaccaccagtacgcctacgacggcaaggattacatcgccctgaaagaggacctgcgctcttggaccgcggcggacatggcggctcagatcaccaagcgcaagtgggaggcggcccatgtggcggagcagcagagagcctacctggagggcacgtgcgtggacgggctccgcagatacctggagaacgggaaggagacgctgcagcgcacggacccccccaagacacatatgacccaccaccccatctctgaccatgaggccactctgagatgctgggccctgggcttctacccctgcggagatcacacctgaccctggcagcgggatggggaggaccagacccaggacacggagcttgtggagaccaggcctgcaggggatggaaccttccagaagtgggcagctgtggtggtaccttctggagaggagtcagagatacacctgcccatgtgcagcaatgaagggtcttgcccaagcccctcaccctgaagatgggagccatcttccccagcccaccgatccccatcgttgggcatcatttgctgggcctggttctccttggagctgtgatcactggagctgtggtcgctgctgtgatgtggaggaggaacagctcagatagaaaaggagggagcttacttttcaggctgcaagcagttgaacagtgcccaggggcttctggatgtgtctcttcacagcttggtaaagtgttgagacagctgccttgtgtggggactgagaggcaagagtttgttccctgccctttcccttttgtgactttgaaggaaccctgacttttgtttcttgcaaagggcacctgcatgtgtcctgtgttcatggtaggcataatgttaaggaggttggggagaccacccaacccccatgtccaccatgaccctctttccccggttgagccgtggctccctctccaatcatctttcctgttccagagaggtggggctgaggtgtctccatctctgtctcaacttcatggtgcactggagctgtaaattctttccttccctattaaaatttagaacctgagtataaatttactttctcaaattcttgccatgagaggttgatgagttaattaaaggagaagattcctaaaatttgagagacaaaataaatggaacacatgagaaccttccaga

SEQ ID NO: 156785 - DNA, 341 bp, Homo sapiens
  misc_feature (1)...(341): n = a,t,c or g
caggagagaaacctcacaagtgtggtgattgtggtaaagcctttaattcaccttcacaccttattaggcatcagagaatccatactggacagaaatcttacaaatgtcatcagtgtggcaaggtctttagtctgaggtcactccttgcagaacatcagaaaattccttttggagacaattgtttcaagtgcaatgagtatagcaaaccatcaagcattaattgacatcagagtcaaatcagcattgacctgagtttgagttgacttaacattgatttcaagcattaatcgacattaaactgtttatgttaagaggaatgngccaggcgtggtgtctcacac

SEQ ID NO: 156786 - DNA, 396 bp, Homo sapiens
  misc_feature (1)...(396): n = a,t,c or g
cgttcacaagtcattaggcatcagagaatccctactggacagaaatcttacaaatgtcataagtgtgacaaggtttcagtctgaggtcactccttgcagaacatcagaaaattcatttttgagataattgatgcacaggcaatgagtatagcaaaccatcaagcattaattgtcattagagtcaattcagcattgacttgagtttgagttgatttaacattgagttcaagcattaattgatgttaaagtgtttatgttaagaggatnnnnnnnnnnnnnnnnnnnnnnnnnnnnnnnnnnnnnnnnnnnnnnnnnnnnnnnnnnnnnnnnnnnnnnnnnnnnnnnnnnnnnnnnnnnnnnnnnnnnnnncgtgtgccacttttcccagccagtttt

SEQ ID NO: 156787 - DNA, 559 bp, Homo sapiens
tacaaatgtcatgattgtggcaaggtcttcagtctagcttcatcttatgcaaaacaggagacttcatacaggagacaaacttcacaagtatgatgattgtgagcaaagcctttacttcacattcacacctcattagacatcagagaatccatactggacagaaatcttacaaatgtcatcagtgtggcaaggtcttcagtctgagatcactccttgcagaatatcagaaaatttatttttgagataatagttccgaatgcaatgagtatagcaaaccatcaagcattaattgacactagagtcagttcagcattgacttgagtttgagttgacttaacattgagttcaagcattaattgacattaaagtgtttatgttaagaagattgggccaggcggggtggctcacgcctgtaatcccagcactttgggaggccaagaccaatagatcacttgaggtcaggagtttgagaccagactggccaacagacatgagtcacttttcccaccctgtattttgtttctttaataaaaactgttccgggttaaaaaaaaaaaaa

SEQ ID NO: 156788 - DNA, 405 bp, Homo sapiens
ggacacatcgaaaggaatcgcagatgtccccgagtggttcaaaggcagtcggctcaactatgcagaaaacctcctgcggcacaaagagaatgacagagttgccctttacattgcaagggaaggcaaagaggaaattgtgaaggtgacttttgaagagctgaggcaagaagtggctttgtttgcagcagcaatgaggaaaatgggtatgtacaattcagttcagcgtatgaacttgtatctctaatctgatgtccatttttatattttttgaaactgagcacaatgaaatcctttcttgaatcattttccttttggattataaaaatatgggggaaagtgctatgatgaattttatgcaataaatgtatacatgtgtgcacatgcacccatgctgaaaaaaaaaaa

SEQ ID NO: 156789 - DNA, 2229 bp, Homo sapiens
agccttcccatgtgatgggtctgtctaggcagtgctgcctaggtatgtatcacaggcaaagcttccattttctgcgatcctgagtcttgaatttcagcatgaccacaggaggtcatttacttagcggatcctctggcaggaaggctcggctaaaacgtcaatcaccagatgtggggggttcattctaatttccatatcacctctcccactgctccctgaagagaagccccacctgtctgggatgttgcagtgtttgtctgggagagtagatatttgtcctcttggcaccttctcctttgttgctcactaatttaacacaatttgtcttgggcttctaaattttgagtctccctttgccattgcttgcaggaggcaccgacatcatctcctgcttcatgggccacaatttttctcttcctgtgtataaaggggagattcaggcccggaacctgggcatggccgtggaagcgtggaacgaggaatgaaaggcgggctggggagagagcggcgagctggcgtgtactaagccgatcccttgccagcccacacacttctggaacgatgagaacggcaacaagtacaggaaggcgtatttctccaaattcccaagtatctgggctcatggcgactactgaagaatcaaccccaagaccgggggcatcgtcatgcttggccggagtgacggcaccctcaaccccaacggggtgcggttcggcagctcggaaatctataacattgtggaatccttccaggaggtggaggacagcctgtgtgtcccccagtataacaagtacagggaggagagggtgatcctcttcctgaagatggcctccgggcacgccttccagcctgacttggttaagaggatccgtgacgccatccgcatgggcttgtctgcgcgacacgtgcccagcctcatcctggaaaccaagggcatcccgtatacgctcaacggcaagaaagtggaagttgccgtcaaacagatcatcgctggaaaagccgtggagcaaggaggtgctttctcgaaccccgagaccctggatctgtaccgggacatccctgagctgcagggcttctgagtcagactggctggcgtgtcactcagccgcacccgtgtgcactgtaacttttgtgtgctcaagaaattatgacagaaaccttacagctgttgtaaaaggatgctcgcaccaagtgttctgtaggcttggggagggatcgttttctctgttttgtttaaatctggtgggtacctgggtttttccacacgagttgggattctgggcctttcagagaccagggagggagtgtctgggccgcaggtgttggcactgtggtgagagtgtgtgtctttgcacacacagtgcagcgggaacggtggggctggctggtgctgaagacagacacactcctgagccaaggtcttgtcttcaacctccccgtcccgttgtcccattttgctctgtgaaggtgcaaatccctttcttcccttcccatctcaggctctcctgttttccctcagggtccagtatgcctttgagctttagctgttagaaaggaacccccgtgacttgacacagctttcacagctggctgctaggaccggcgggctgggtgttcaccgtgtgctgtgtcatggatggcaatgcaggccctgggaggactgtgcgtcacccgtcaaccagagcgtgcctccgggccagcttccctccaaggaatggagtggatttcatacaggatctctttattgcacagactgaatggcttttacatgtttctaatgtgaattaggccatgtgaaagccagtgggtgtcccacccgtgtccctcatgggtgagccctcccagctgtgaagccccaggcagtgtggtcaccgaagtgaggacccctccctcaccccggaacccgcatcccctgtgctgccctcccacctgagagttgcctagggggttccttgtcgagatcatgtcatcagcacccctaagtcaagtccacgggtttcccatagcccaggcaagttggtatgtacaattcagttcagcgtatgaacttgtatctctaatctgatgtcccatttttatattttttgaaactgagcccaatgaaatcctttcttgaatcattttccttttggattataaaaaatatggggggaaagtgctatgatgaattttatgccaataaatgtatacatgtgtgcacatgcacccatgctgtggaaaaaaaaaaag

SEQ ID NO: 156790 - DNA, 1050 bp, Homo sapiens; identical to SEQ ID NO: 144729

SEQ ID NO: 156791 - DNA, 916 bp, Homo sapiens
tttttttttgagacggagtttcactcttgttgcccaggctggagtgcagtggcgtgatctcggctcactgcaacctccgcctctcaggttcaggtgattctcctgcctcagcctcccaagtagctgggactacaggtgcctgccaccactcctggctaattttttgcattttcagcagagacgaagtttcaccatattggccaggctgctggtctcgaactcctgacctcgtgatctgcccgcctcggcctcccaaagtgccgggattacaggcatgagccaccacgcctgtccggttatttgatttttataagaaaattttactattattttcagataaaatttatgtcactgtcattcattacattttaatttttgaaactgatgtctttcccagaatttatgtactctataacggtgtgaatgattaccagtattaagccattttctcatctgatatattgagctatgttttatgtaagtattgcttattcaagtagttttaaaagatatgtaattggttgttgtttcatgtcctacacagtaagaacaagagtatgttaacctttttgtcaggatatttgctatttcatatctttgaaatagagtagtagctctatttctaactaaattctatttatgtaacaacacagctaatttactcttggatctcattctccctttttatcctgagttaccatcagtgctaatgttcctcttttgggtatagttctccaggagaacttgtcctatatttctttgtgtgtgtttttttccttccagcttaaacaaattaaaactaaatatctaaaccttgtatacagacattaaaattagtgagagaaacaaaatatccttgtgtcttggcttttactttttgaagtcattaacaaataataaattaatgaataaaaaa

SEQ ID NO: 156792 - DNA, 351 bp, Homo sapiens
aaagctttcaagctctttgatgatgatgaaactgggaagatttcaggatttcttctttagtatctttctcagacattttctgggtcatcacagttaaaaagtcaccaaagttcatttttgttttcatctgattcaacagaattcctaataacttctttactacttattattgatggaaacttgggcaagtcacaacctgcacaagtttcagtctcataatctataaaagaaaaacaatgatgacaacacaataagagcgtgaactcacaggggctcaatgtccactaactcatgcactgcttggagcacgttggagaggtctaagcctattttcttcagcctaatggattc

SEQ ID NO: 156793 - DNA, 674 bp, Homo sapiens
tttttttgagatagagtctggctgtcaaccaggcgggagtgcaggggcgccatctcaggtcactgcagcctctgcctcccaggttcaagctattctccctcctctacctcccaagtagctgggattacagccatgcaccactgttcccagctaatttttgtatttttagtagaaatgatgtttctccatgttggccaggcaggtctcaaactcctgatctcaagtgatccacctgccttagcctcccaacatgctagggattacaggcatgagctgttgcgaccggcctcaatttcccagtttttcatttcagactattttattctccttcacactacttccactgactataagcaattttaaagaaaactccagaataacaactcactgtaaataacatgaggatttcctaatatagattcctaaaaaatccatgagcctttttttataatcccatagatcctacatatcagtgattttcaaacatcttggtttcaggacttctttatacacatggattataaatagttcccacattagaaaggaaaaactgttaaaaaatcttaaatatatatgcaaaaatatggtaagaagcaaaacattttgttttacacttttgcaaaactctttactaaatggcttgaaagaagtcacttagattttgacctcgtgcc

SEQ ID NO: 156794 - DNA, 651 bp, Homo sapiens; identical to SEQ ID NO: 125079

SEQ ID NO: 156795 - DNA, 896 bp, Homo sapiens
cggaagcctgaagcatgggcgctgagtgggagctgggggccgaggctggcggttcgctgctgctgtgcgccgcgctgctggcggcgggctgcgccctgggcctgcgcctgggccgcgggcagggggcggcggaccgcggggcgctcatctggctctgctacgacgcgctggtgcacttcgcgctgggaaagaatatggcaaagctgatgcaagatgggtttattttgatccaaccattgtgtctgtggaaattctggccgtcgccctagatgtgtctctggcattgttcctcatttatgccatagtcaaagaaaaatattaccggcatttcctgcagatcaccctgtgcgtgtgcgagctgtatggctgctggatgaccttcctcccagagtgggctcacccagaagcccccaaccttcaacaaccggcaactggctggctgtactggttgggctttaccctgttttttttttaacggtgtgtggggttcctgatccccaggaactggctactgtgggcagtccatgggcctagaacctcaagaaaatggcatcagaaaggaaaccagtttcagtggaaggaagttttcagtggaacttttcaaaacccataaacacccttattcttaactttcatggaaccagaatgaattcaaatctttttgtttggcccaaaatgtaatacattccagcctacactttggttttgtattgtagctcccgaacaacctgtttcaaaatgggttttaaggcgaccagttttcgttgtattgttgttcaattaaatggtgatatagggaaaagagaacaaatttgaatttgtaataataaaatgtttaattatacattttatggctggcattaattgttccacattagtaaaaccaattatcttag

SEQ ID NO: 156796 - DNA, 439 bp, Homo sapiens
atacaccgtggctccgagactttcatgatcccattgtcgaggttgaggtgtccgtgttcccgggtgagcccctccttttctcagcaccaggcctgcctgagcctagggctggtcattctgtccccagtggcctcagtgtggttgcttttccatcgttttcttctgacaatgtcccaggttccttggagcatcttcttgttctccatttccccgggggcgacgtgtccctcctgcgccctttgtgccttcctatctaggagtgaggagctaagatcccacctttgccacaggtgagcagggcagctctcacatctgaaatggtgtcctggctctgcagtaccactccgatgagtgtcgtaccttggattcccggccaatgcaacaaaatggtatggctctgatgactggaggaacactagggtccttgcccacgcgtccg

SEQ ID NO: 156797 - DNA, 1857 bp, Homo sapiens
gacccacgcgtccggctacggagtcactacagggagaggtctcatcactagaaatagccgaagaacctgcagcctcaaccagcgttaaggaggacgtgccgtttctagggagtcttagtcggggctcaccagcttcctgcattttctgaccggctccaggaatagaaccaaaagaagctgaacaaggaagcagcgcggcaccaagaaaagcagaagtcggggccttggaggcgtgactttcccctcgggtccaggtagggcctggagctgctgcaagtgccgcctgtgctggggaagggaccatgtggctgccttgggctctgttgcttctctgggtcccaggatgttttgctctgagcaaatgcaggaccgtggcgggccccgtggggggatccctgagtgtgcagtgtccctatgagaaggaacacaggaccctcaacaaatactggtgcagaccaccacagattttcctatgtgacaagattgtggagaccaaagggtcagcaggaaaaaggaacggccgagtgtccatcagggacagtcctgcaaacctcagcttcacagtgaccctggagaatctcacagaggaggatgcaggcacctactggtgtggggtggatacaccgtggctccgagactttcatgatcccgttgtcgaggttgaggtgtccgtgttcccggcatcaacgtcaatgacacctgcaagtatcactgcggccaagacctcaacaatcacaactgcatttccacctgtatcatccactaccctgtttgcagtgggtgccacccacagtgccagcatccaggaggaaactgaggaggtggtgaactcacagctcccgctgctcctctccctgctggcattgttgctgcttctgttggtgggggcctccctgctagcctggaggatgtttcagaaatggatcaaagctggtgaccattcagagctgtcccagaaccccaagcaggctgccacgcagagtgagctgcactacgcaaatctggagctgctgatgtggcctctgcaggaaaagccagcaccaccaagggaggtggaggtggaatacagcactgtggcctcccccagggaagaacttcactatgcctcggtggtgtttgattctaacaccaacaggatagctgctcagaggcctcgggaggaggaaccagattcagattacagtgtgataaggaagacataggcttttgtcctgcctcgccatcggagctctcatgggccccaggaagtccagggacagctcccttatacctggcccacgtccttctcagcctgccctcgacaacagtgaccaacagacaggcagctgggtttcccaggccatccctctgttgccatcagcttgattggcttccccgagggccagcagggctgggggctccggagagcagcaggaagcactcccagccaccagtgcctgtcgcctctttcccctttgcccctgcttcatcccagctctgtgtgtggaggacaaagcttcttcctgcgtggctccaggaaaagatgtggctcacgtaggtggcacctgccaatagctttgtcaatcacagccccataggaacgtctggaattgcttgggagttggggagaactgtcaagaagagtgaagagagtgccaaagcggagatctgttcacctgggggccatggaggggggacccactaaagatcaagatcaaagattctccccatctcacagacaaggaaactgaggccagagggaggagagaattgctcatggctccagaactggtggcaagtttctctggactcttaggtttatttttaatatgaaatataaaaacagtttcaaatatcttaaaaaaaaaaaaaaaaaaa

SEQ ID NO: 156798 - DNA, 835 bp, Homo sapiens
  misc_feature (1)...(835): n = a,t,c or g
cccacgcgtccggtgcttcatttacacggggaaggctccaaacctcgacaaaatggctgatgatttgctggcagctgctgacaaggtaagataagaatagaaaaataatcaggactaggagttattgtgacttcttgtgtttcatgaacaggattctatgttgcattgtgggtaaaatgagcatatatcttggtttggccaagacggtcctggtttacacatattattccaacacaattattaatagcacactttttattctcaaaagtgtcctgttttgaatagtaaactatatgatcacctaactatgggaaagaaggataagtttgacttctacctctcctcttttttccatctcaaatttaaccacagtgatagtaaagattcaaataatactaacatttggattgtgctttataatttacaaaatggttttgagtttattaatgtatttaaactttatcagtaannnnnnnnnnnnnnnnnnnnnnnnnnnnnnnnnnnnnnnnnnnnnnnnnnnnntcaaggaagtctataactctttggttagggtctccacacttagctaggccctcaacactgccaatagtttttctacagatgtttaggcaactccctttcttaacgatagctgtctcaaaccttaaccactctttaactccttccaaactcctaaaagattaccttgcctacttcctccaagagaaaaggaggcccttttgtaggaacttcctcaactcttgcttcttacctcacctgcattctcagaggaggtgttcttcctcgtggacaaagcagactttntttctacctctgctctgttttatatcccatc

SEQ ID NO: 156799 - DNA, 1496 bp, Homo sapiens
atgtcgagtggccccgtagctgagagttggtgctacacacaggttgtccacttcctatttaattgcttcctgtttttctatcaacagatcaaggtagtgaaattctcctacatgtggaccatcaataactttagcttttgccgggaggaaatgggtgaagtcattaaaagttctacattttcatcaggagcaaatgataaactgaaatggtgtttgcgagtaaaccccaaagggttagatgaagaaagcaaagattacctgtcactttacctgttactggtcagctgtccaaagagtgaagttcgggcaaaattcaaattctccatcctgaatgccaagggagaagaaaccaaagctatggagagtcaacggggcatataggtttgtgcaaggcaaagactggggattcaagaaattcatccgtagagattttcttttggatgaggccaacgggcttctccctgatgacaagcttaccctcttctgcgaggtgagtgttgtgcaagattctgtcaacatttctggccagaataccatgaacatggtaaaggttcctgagtgccggctggcagatgagttaggaggactgtcggagaattcccggttcacagactgctgcttgtgtgttgccggccaggaattccaggctcacaaggctatcttagcagctcgttctccggtttttagtgccatgtttgaacatgaaatggaggagagcaaaaagaatcgagttgaaatcaatgatgtggagcctgaagtttttaaggaaatgatgtgcttcatttacacggggaaggctccaaacctcgacaaaatggcctaatgatttgctggcagctgctgacaagtatgccctgggagcgcttaaaggtcatgtgtgaggatgccctctgcagtaacctgtccgtggagaacgctgcagaaattctcatcctggccgacctccacagtgcagatcagttgaaaactcaggcagtggatttcatcaactatcatgcttcggatgtcttggagacctctgggtggaagtcaatggtggtgtcacatccacacttggtggatgaggcataccgctctctggcttcagcacagtgcccttttctgggacccccacgcaaacgcctgaagcaatcctaagatcctgcttgttgtaagactccgtttaatttccagaagcagcagccactgttgctgccactgaccaccaggtagacagcgcaatctgtggagcttttactctgttgtgaggggaagagactgcattgtggccccagacttttaaaacagcactaaataacttgggggaaacggggggagggaaaatgaaatgaaaaccctgttgctgcgtcactgtgttccctttggcctggctgagtttgatactgtggggattcagtttaggcgctggcccgaggatatcccagcggtggtacttcggagacacctgtctgcatctgactgagcagaacaaatcgtcaggtgcctggagcaaaaag

SEQ ID NO: 156800 - DNA, 398 bp, Homo sapiens
cagggtgagctgggaggtgaggctgtcgccattcagcgtcgtgtgctgcaccgagggccctgggccccgcacgtgccccacagaggtgaccgaaggccggaagggtctttccagagagaacttcctgaacatgaggttgacctgctccaggtcgtaggcatccaggccctcggattggtgggaggaggagaaggagtggatgcagtagggtccgaaggagtagcgttcgtgactgtcatcatccagatctaaggcgtcaaacccgccgctgtcattgtcttcttcgactgtgctgcgatggggcgcgtcctccttgtagcgtctgacgatggagtcgtttcccgggggctcggcggtaaatgaaatgatgctgctgcggctccgggggggctgcatct

SEQ ID NO: 156801 - DNA, 2390 bp, Homo sapiens
agtctgcccaggaacctgccagtaaccatcatctctcaggactttggggatgccagccccaggaccaatggtcaagaagctgacgattcttccacctcggaggagtcacctgaagacagcaagtacttcctgccctaccatccgccccagcgcaggatgaacctgaagggcatccagctgcagagagccaaatcccccatcagcctgaagcgaacatcagattttcaagccaaggggcacgaggaagaaggcacggacgccagccctagctcctgcggatctctgcccatcaccaactccttcaccaagatgcccccccggagccgcagcagcatcatgtcaatcaccgccgagcccccgggaaacgactccatcgtcagacgctacaaggaggacgcgccccatcgcagcacagtcgaagaagacaatgacagcggcgggtttgacgccttagatctggatgagctggcagcaggggagactgtggctcagagtcctccaggtgtgccctgccagccccctctcttccagggctcccccagcctttgccagctaaggctgccaaccgatgaaacgaaagatgagtggtcctccttaatggggaagcatcagcgctaccaagtgttaaagagagatgacagtcacgaacgctactccttcggaccctcctccatccactcctcctcctcctcccaccaatccgagggcctggatgcctacgacctggagcaggtcaacctcatgttcaggaagttctctctggaaaggtgcagaaaccgaggcccacagaggaaggggcttgccaaggccatgcagcatggcagaggcaaagaagtgggacccagatacccagcagtccccatccatgacacagtggagcccgacccttccggccttcggtcacctctgtggggcacgtgcggggcccagggccctcggtgcagcacacgacgctgaatggcgacagcctcacctcccagctcaccctgctggggggcaacgcgcgagggagcttcgtgcactcggtcaagcctggctctctggccgagaaagccggcctccgtgagggccaccagctgctgctgctagaaggctgcatccgaggcgagaggcagagtgtcccgttggacacatgcaccaaagaggaagcccactggaccatccagaggtgcagcggccccgtcacgctgcactacaaggtcaaccacgaagcccagcagaaaatccgtgggcctgcagaatatgatgtgggcagcacctccaaagcccggagctgcgcagcagcacagccctgcaagtctggaattccagggaaagaaagttcattccggcaggggtaccggaagctggtgaaggacatggaggacggcctgatcacatcgggggactcgttctacatccggctgaacctgaacatctccagccagctggacgcctgcaccatgtccctgaagtgtgacgatgttgtgcacgtccgtgacaccatgtaccaggacaggcacgagtggctgtgcgcgcgggtcgaccctttcacagaccatgacctggatatgggcaccatacccagctacagccgagcccagcagctcctcctggtgaaactgcagcgcctgatgcaccgaggcagccgggaggaggtagacggcacccaccacaccctgcgggcactccggttcgtcagcaggtccgagaacaagtataagcggatgaacagcaacgagcgggtccgcatcatctcggggagtccgctagggagcctggcccggtcctcgctggacgccaccaagctcttgactgagaagcaggaagagctggaccctgagagcgagctgggcaagaacctcagcctcatcccctacagcctggtacgcgccttctactgcgagcgccgccggcccgtgctcttcacacccaccgtgctggccaagacgctggtgcagaggctgctcaactcgggaggtgccatggagttcaccatctgcaagtcagatatcgtcacaagagatgagttcctcagaaggcagaagacggagaccatcatctactcccgagagaagaaccccaacgcgttcgaatgcatcgcccctgccaacattgaagctgtggccgccaagaacaagcactgcctgctggaggctgggatcggctgcacaagagacttgatcaagtccaacatctaccccatcgtgctcttcatccgggtgtgtgagaagaacatcaagaggttcaggggaccagtagccatgtttctgccccaacaagtaacctccttgccctgtcctggctcccgggatccttcctctggtggtctgcacgggccacggcgctcagggtgccgcagcggcaaagtgggcagtggtcgcccgtgttccagggaaggaggagggtga

SEQ ID NO: 156802 - DNA, 304 bp, Homo sapiens
  misc_feature (1)...(304): n = a,t,c or g
cattctagtttaaggtggttgatggatttagccatatatgctgcaggttatttagctagcttagtgttgaactaaattttttttaaacaaggcaaggtttaatgctgttttgagattttgaaattaatgaaaatacttatttcagaaatgcatttaatgctttttttcttgtgacagttacgcaaatcagcttgaattccatatgtccctgagttatttttatcataaagccccaaatgtattataacaaggcaaattgtaatatatataatcctgaactcnnnnnnnnnnnnnnnnnnnnnnn

SEQ ID NO: 156803 - DNA, 408 bp, Homo sapiens
tattttactaactgtaaccctaaaattgatgtcttttggtttatgaaatcagtaatttttgatatttccccagttctttttaatggggtcaataatggacatagggagtgaagtggagttatggtttcattcaatagagtattgctgattatacttgagtggaatcctttcctcacgtactcccccagacgtctgggcctggaaattttttttttattttattttaatgtttttttttttagaaaaaccccccttttattatgtacaataaaatatttcattagcttgaattgtatagatttttaaaaattcaatgaaagcatgttgtttaatttctttttaaaatccctgttgggctttgaaagcattgagaatataatatgaaattatgaaaaaaaaaaaaaaaaa

SEQ ID NO: 156804 - DNA, 109 bp, Homo sapiens
gggcctggaaattttttttttattttattttattgtttttttttttagaaaaacaccacttttattatgtacaataaaatatttcattagcttgaaaaaaaaaaaaaaa

SEQ ID NO: 156805 - DNA, 1219 bp, Homo sapiens
ttgtaatatatataatcctgaactcatgaccatgtctcagtttattttttttttcttggattgaaaagtactgaaattcaatgtgacattaaaatgcaaattttcctatttatttgagtagaaaatcacttaccagtgagcatatatattttaaaatactttctttggatattgtaattcttaactggttgtaaattagaaaagctgggattacatatggtgtgcggttacagtctaaattttttcatcctcctatgcatcataagcatgtttgtaatattttcaaaaatagttctactgatgctacaggaattttctagtttaaggtggttgatggatttagccatatatgctgctaaagaaattgtctaccttttcttcctcacctgttccatttatgtaaagttgagattagagggaaagcattttctatatcaattgtgtttaaacctttcaagaaggttatttagctagcttagtgttgaactaaattttttttaaacaaggcaaggtctaatgctgttttgagattctgaaattaatgaaaatacttatttcagaaatgcatttaatgctttttttcttgtgacagttacgcaaatcagcttgaattccatatgtccctgagttatttttatcataaagccacaaatgtattataacaaggcaaattgtaatatatataatcctgaactcatgaccatgtctcggtttattttttttttggattgaaaagtactgaaattcaatgtgacattaaaatgcaaattttcctattaaataaagaaattgtctaccttttcttcctcacctgttccatttatgtaaagttgagattagagggaaagcattttctatatcaattgtgtttaaacctttcaagaaggttatttagctagcttagtgttgaactaaattttttttaaacaaggcaaggtctaatgctgttttgagattctgaaattaatgaaaatacttatttcagaaatgcatttaatgctttttttcttgtgacagttacgcaaatcagcttgaattccatatgtccctgagttatttttatcataaagccccaaatgtattataacaaggcaaattgtaatatatataatcctgaactcatgaccatgtctcggtttattttttttttcttggattgaaaagtactgaaattcaatgtgacattaaaatgcaaattttcctatttaaaaaaaaaaaa

SEQ ID NO: 156806 - DNA, 1993 bp, Homo sapiens
ctcgagttttttttttttttttttcataatttcatattatattctcaatgctttcaaagcccaacagtgatttttaaaaagaaattaaacaacatgctttcattgaatttttaaaaatctatacaattcaagctaatgaaatattttattgtacataataaaagtggtgtttttctaaaaaaaaaaaacaataaaataaaataaaaaaaaaaatttccgggccccagacgtcttgtgggagtccgtgaggaaaggattccactcaagtataatccggcaataccctattgaatgaaaccataactcccacttcactccctatgggtaaatactaacatttcaccacaggcttgaaattcctgtagcatcagtagaactatttttgaaaatattacaaacatgcttatgatgcataggaggatgaaaaaatttagactgtaaccgcacaccatatgtaatcccagcttttctaattttacaaccagttaagaattacaatatccaaagaaagtattttaaaatatatatgctccctggtaagtgattttctactcaaataaataggaaaatttgacattttaatgtcacattgaatttcagtacttttcaatccaagaaaagaaaaaaaaaataaaccgagaacatggtccatgagttccaggattcatatatatttacaatttgcccttgttaataataacatttgtggcttttatgataaaaataaactcagggacatatggaattcaagctgatttgcgtaacatgtcacaagaaaaaaaagcattaaatcgcatttctcgaaataagtattttcattaatttcaggaatctcaaaacaggcattagacccttgcccttgtttaaaaaaaatttaggttcaacactaaggctaggcctaaataaccttcttggaagggttttaaccccaattggatatagggaaatgctttccctctaatctcaacctttacataaatggaacaggtgaggaagaaaagggtagacaatttcttttaggcagcatatatgggctaaatcccatcaaccacccttaaaactaggaatggtccattattggacccccatttaaaaagaactggggggaaatatccaaaattactggatttcataaaccaaaagacatcaattttagggttacagttagtaaaatatttttgagacacttcaaaaacttttaaccataaactagaagaatcatctcttcattgtaagaaagaaaggcctaaccagaaagacatttaaactaaactgattttcaatcctcttagaacaaacaaaatgaaaaataatggttgatatagctaagcaatgtgctctaatcaaactaattaattacagtgattttaaatggcaacagcccatctgactgggcagcttgacagttcagaatacttttgcaatgattttttaacgcaaagacactaaaatgatccagtcatgcaatgttcatcttatgcattctgcatctctttgccaatcttgtagctaaggatcttgttccaatcaatcttagtgcgtgtaactggcaactgtcaacgtaaggctttgaaagtagtgtccgacattgtctaacttttaaccataaactagaagaatcatctcttcattgtaagaaagaaaggcctaacagaaagacatttaaactaaactgattttcaatcctcttagaacaaacaaaatgaaaaataatggttgattagctaagctttgtgctctaatcaaactaattaattacagtgattttaaatggcaacagcccatctgtctgggcagcttgacagttcagaatacttttgcaatgattttttaacgcaaagacactaaaatgatccggtcatgcaatgttcatcttatgcattctgcatctctttgccaatcttgtagctaaggatcttgttccaatcaatcttagtgcgtgtaactggcaactgtaaacgtaaggctttgaaagtagtgtccgacattgtct

SEQ ID NO: 156807 - DNA, 1490 bp, Homo sapiens
  misc_feature (1)...(1490): n = a,t,c or g
gactagtaggaaatgtagttttattcagtaaattatcgcctcatctccgattaagaaattatcaatggtttgaatgattggtcacctgtcttttactctaaactttcacaggttcctggttgtcacggaaaagccaatcctaccacattttcttttgtacttatatatatttatacttacatttaaaaaaaattatatattttatagggaaattagttatgttctttgtcagagtggtcagatagtgtcagttaggcatactcatgttctaaaaagtctgtaatcagtgatcaacaaaacactgccttgattttacccgccctgcctccccctctcctttttttttggctgtaatggaagacctttctaaaccttgccatcataaaaatatgatctgatagtgtaaacccacaattaagagttttcaaaattttaaactgatcattaggcattttaaagacacacatacagataaagctatttttctttttcttttcagcactcacctttgccctgggtactcttcttgtatgtgtttccatatatctctatggattacccagacaagacactacatccatccaacaaggagaaacagcttcaaaggagagagttattggtgtgtgattttagcctcacgtgagaactccttttaagactaaaccattttgcattaaactagagcctttaagtcaatctcagaaggtagcataaccaaataaaagattaactgtatggcatgatcagtgcggttatgtggaaacaacaacaaacaaacgaagctatctgagtgaactgctaatacagaaacttaatgtagacctgtttggggtctactattgttttagaatgaaggaattgtattattgtgtggtatatataatttgtaaataaaaagtatggagatgataccggtgttaaaaaaaaatcatggtaaggctacaatactcaagtaacaaggtttgggacaatgtcctaagggttaaagtgcccaaagccatttctgtactaactgttctcttggttccggtaccggggagaaggatgacccctccttattctccgaattccatgtacagtattttgtccctagcagcataaagaccctagctcttttcttaccaagagggcagaaaccaaggacaggcctagttccataaacaaactgaatgtgtaactaacttcctcaaaatgaatcctatttccataactcggacaatttctggggtggtgactgggagtacccgctttagtgagtacgcncctttagtgctatatattgtgccattcattatctggttcatatttcttttctgttagatgatacacatttcttcaaaaaaaatttctaatgtcacttttgtacttttttaaataaagtatgtttaactgttgggctctcaataatttgtgaaatttcagtgttttctataatgttaatggggaaattcagcaataaactttatttgtaagaaaaaaaaaaaaaaaaa

SEQ ID NO: 156808 - DNA, 418 bp, Homo sapiens
  misc_feature (1)...(418): n = a,t,c or g
aaaaacactagttcccttaatcttaccaattattactaccttagccaacccctgcaaaaaagattgatacccatactacgtaaaaatatctattgcatgtgtnnnnnnnnnnnnnnnnnnnnnnnnnnnnnnnnnnnnnnnnnnnnnnnnnnnnnnnnnnnnnnnnnnnnnnnnnnnnnnnnnnnnnnnnnnnnnnnnnnnnnnnnnnnnnnnnnnnnnnnnnnnnnnnnnnnnnnnnnnnnnnnnnnnnnnnnnnnnnnnnnnnnnnnnnnnnnnnnnnnnnnnnnnnnnnnnnnnnnnnnnnnnnnnnnnnnnnnnnnnnnnnnnnnnnnnnnnnnnnnnnnnnnnnnnnnnnnnnnnnnnnnnnnnnnnnnnnnnnnnnnnnnnnnnnnnnnnnnnnnnnnnnnnnnnnnnnnng

SEQ ID NO: 156809 - DNA, 510 bp, Homo sapiens
tcccggttcaagcgattcttctgcctcagcctcccgagtagctgggattacaggcatgcacccacccacgccctggctaatttcgtatttttaatagagacagggtttctccatgttggtcaggctggtctcaaactcctgacttgaggtgatctgcccgccttggcctcccaaagtgctgggattacaggcgggaaccactgcacccggcaggtacagtgtttctttaggtgctgggggtacaccagggaatcagggcagaagctggatcctgcaagagtaatgtttgagaacaaataaatactttcgaaaggaggtcgaaacaaaaaggagtgtaggtgttattactgcagagaagactgaatggagtccacttttcttattagtaacttactaaaaatgatctcaaatgggctccacacactttgccctggccatgaggcaaacttgttgggtttggagaaaaacacataaccctaaattcactattttttgcctatataaaacatt

SEQ ID NO: 156810 - DNA, 499 bp, Homo sapiens
acaggtactcattttcatttttatttattattagtattgttatttttagagatggggcctcaatctatcacccaggctgatgtgcaggggcataatcatagctcactgcagcctcaaactcctgggctcaagcaatcctcccgcctcagcctctagaatagctgggactacaggcacacaccaccacacccggctaatttttttagaattttgtagagacaggggtctcactatgttgcccagggctgatctcaaactcctggtctcaagcaattctctcgcctcggcttcccaaagcgctggggttacaggcatgagtcaccacacatggccagagacaggtactcttattgtccccatttcccagatgaagaaactggagacccagagagatgaagtgacttgcccaaggtcacattgctggaaaggggcagagcagggattcaaatggggccaaacagggatataatccaaggtgagatgggccgatacgatacca

SEQ ID NO: 156811 - DNA, 416 bp, Homo sapiens
  misc_feature (1)...(416): n = a,t,c or g
agcagctgtagtggagccacctactaaaaatgctgcagcgttatagctcttgtaacgtgtgatgaaaacgtcgcggtctgatccgaacatatgggcttgatatgtgcagccagagtttatgtcagtacgcgaaggatatcggtttcattaagttggactaaatgctcttccttcagaggattatccggggcatctactcaatgaaaaaccatgataattctttgtatataaaataaacatttgaaaaaaccnnnnnnnnnnnnnnnnngggggggctgtttaaaagaatcctttggggggccaaagttaacgggggcatgcaacctaaaaattttttccttatggggggcagaataaaaatctacctgggaatctttgtaaagaaaccttatttttggggggaaacaaaattgaac

SEQ ID NO: 156812 - DNA, 1240 bp, Homo sapiens
atgcgacggcggaagcgggccccggccggcatcctcttcctgcgcccgcgccgccgcgggtggccgcgcgggtctgggtaccgggcgctgcccctgggtgattttgaccgcttccagcagtcgagcttcggctttctgggctcgcagaagggctgcttgtccccggagcggggcggcgtggggacaggggccgatgtaccccagagctggccctcctgcctctgtcatggcctcatcagtttcctggggttcttgctgctgttggtcaccttccccatttctggctggtttgccctgaagcccgaggaggcagagagagtgaaggcccaggttcaggccctggggctggctgaagcccagcctatggctgtggtacagtcagtgcccggggcacaccccgtgccagtgtacgccttctccatcaaaggcccttcctatggagaggatgtctccaatacaacgacagcccagaagaggaagtgcagccagacccagtgccccaggaaggtcatcaagatggagtctgaggaggggaaggaggcaaggttggctcggagctccccggagcagcccaggcccagcacctccaaggcagtctcaccaccccacctggatggaccgcctagccccaggagccccgtcataggaagtgaggtcttcctgcccaacagcaaccacgtggccagtggcgccggggaggcagaggaacgcgttgtggtgatcagcagctcggaagactcagatgccgaaaactcgcccgctgagcaggctgccacccccgatgctgagcctcacagcgagcctcctgatcaccaggagcgccctgccgtccaccgtgggatccgctacctgttgtacagagcacagagagccatccgccttcgccatgccctccgcttgcaccctcaattgcatcgggcccctattcggacttggtctccccatgtggtccaagccagcactcctgccatcacagggcccctcaaccatcctgccaatgcccaggaacatcctgcccagctgcaaaggggcatcagcccaccccaccggatacgaggggctgtgcgatcccgcagccgctccctccggggctcctcccatttatcccagtggctcaacaacttttttgccctccccttctcctccatggcttcccagcttgacatgtcttccgtgggtgggccccatgctccccagctcatcccagacacccacctgcccaccctcattgagggcagac

SEQ ID NO: 156813 - DNA, 3587 bp, Homo sapiens
ctaagctggggtccatggagcctgcacccgcccgatctccgaggccccagcaggaccccgcccggccccaggagcccaccatgcctccccccgagaccccctctgaaggccgccagcccagccccagccccagccctacagagcgagcccccgcttcggaggaggagttccagtttctgcgctgccagcaatgccaggcggaagccaagtgcccgaagctgctgccttgtctgcacacgctgtgctcaggatgcctggaggcgtcgggcatgcagtgccccatctgccaggcgccctggcccctaggtgcagacacacccgccctggataacgtctttttcgagagtctgcagcggcgcctgtcggtgtaccggcagattgtggatgcgcaggctgtgtgcacccgctgcaaagagtcggccgacttctggtgctttgagtgcgagcagctcctctgcgccaagtgcttcgaggcacaccagtggttcctcaagcacgaggcccggcccctagcagagctgcgcaaccagtcggtgcgtgagttcctggacggcacccgcaagaccaacaacatcttctgctccaaccccaaccaccgcacccctacgctgaccagcatctactgccgaggatgttccaagccgctgtgctgctcgtgcgcgctccttgacagcagccacagtgagctcaagtgcgacatcagcgcagagatccagcagcgacaggaggagctggacgccatgacgcaggcgctgcaggagcaggatagtgcctttggcgcggttcacgcgcagatgcacgcggccgtcggccagctgggccgcgcgcgtgccgagaccgaggagctgatccgcgagcgcgtgcgccaggtggtagctcacgtgcgggctcaggagcgcgagctgctggaggctgtggacgcgcggtaccagcgcgactacgaggagatggccagtcggctgggccgcctggatgctgtgctgcagcgcatccgcacgggcagcgcgctggtgcagaggatgaagtgctacgcctcggaccaggaggtgctggacatgcacggtttcctgcgccaggcgctctgccgcctgcgccaggaggagccccagagcctgcaagctgccgtgcgcaccgatggcttcgacgagttcaaggtgcgcctgcaggacctcagctcttgcatcacccaggggaaagatgcagctgtatccaagaaagccagcccagaggctgccagcactcccagggaccctattgacgttgacctggccgaggaggcagagagagtgaaggcccaggttcaggccctggggctggctgaagcccagcctatggctgtggtacagtcagtgcccggggcacaccccgtgccagtgtacgccttctccatcaaaggcccttcctatggagaggatgtctccaatacaacgacagcccagaagaggaagtgcagccagacccagtgccccaggaaggtcatcaagatggagtctgaggaggggaaggaggcaaggttggctcggagctccccggagcagcccaggcccagcacctccaaggcagtctcaccaccccacctggatggaccgcctagccccaggagccccgtcataggaagtgaggtcttcctgcccaacagcaaccacgtggccagtggcgccggggaggcagaggaacgcgttgtggtgatcagcagctcggaagactcagatgccgaaaactcggtgagtggcccagaagttcagcccaggactcctgcctccccccatttcaggtcccagggggcacagccacagcaggtgactctcagacttgccttgcgcctggggaattttccagtgaggcattgagtcccaagctgtgctgaggacagtctccaaatgacagctgcatgcctggaccaccccagccctcccactacaccagggccaggagctcttctgaaatgctgatagcatgtgtccagagcactgtctcttttctggaatgtccaagacctttgtctggagcttccttatgcattttctgtcctctaagtcctcagtgaggagggctggacaagaatccattccttggtttattacagccagtgggggccagtgaaggggtgtcaggccacagggcagctatataggggccaaacaagtgaggtttgactccatccatgtagaaagatatataaatccattccacagtgaaacaggtggcctcgtgggtagtgacccttctgtccctagaggtttattactagaggctggactatcacctgtccaggggaaaaggggatctgaatagagtgaaaggttggactgggtggcccctgaggtctcttccagccctcagtctgaggttctgtattggaaagtgcatggaacccatggagaccgccgagccacagtcctcgccagcccactcctcgccagcccactcctcgccagtccagtctctgctgagagcacaaggagcctccagcctgccctgtggcacataccaccccccagcttggcctccccaccagcccgctgagcaggctgccacccccgatgctgagcctcacagcgagcctcctgatcaccaggagcgccctgccgtccaccgtgggatccgctacctgttgtacagagcacagagagccatccgccttcgccatgccctccgcttgcaccctcaattgcatcgggcccctattcggacttggtctccccatgtggtccaagccagcactcctgccatcacagggcccctcaaccatcctgccaatgcccaggaacatcctgcccagctgcaaaggggcatcagcccaccccaccggatacgaggggctgtgcgatcccgcagccgctccctccggggctcctcccatttatcccagtggctcaacaacttttttgccctccccttctcctccatggcttcccagcttgacatgtcttccgtggtgggggcaggggaaggcagagcccagactcttggagcagttgttccccctggggactctgtcagaggctccatggaggcctctcaagtccaagtgcctctggaagcctctccaattacattcccaccaccctgtgccccagaaaggccccccatcagcccagtcccaggcgcccgtcaagcaggcctctgagagtgctacccttctcttgtaaccttgcagccaacacccctgcccggcccctgagctgcctcctccagcccatgctcttacaggccctgcacagagtagcactcattaattcttggttaaggaatgaatcaacgaatgaatggctatgcatggacctctgggcagggagacctgggtcttctctggctgagaggggaaggctaaggcatggctgagattcaagccaccattccaggcctctttgcccaagaaagaaacttctgtcacccttgcactctcctgtgttctgagtccctggccaatagcacagccttccatgccccgacccccaccccaagcctctccactaggcctctgccaggatctaagcccatgagcacagggactggctatcccaagacctggcagatgtggctgctcaataaacacttgttgaaccatcaaaaaaaaaaaaaaa

SEQ ID NO: 156814 - DNA, 451 bp, Homo sapiens
ggcttgctgcctgctgtaccgtggtgacatggttcccaaagatgtcaatgctgccattgtcaccatcaaaaccaagcgcaggatccaatttgtggattgatgccccactggcttcatggatggcatcaactaccagccttccactgtggtgcctgttgaaaacctggacaaggtacagagagctgtgtgcatgctgagcaacaccacagccattgctgaggcctgggctcgcctggaccacaagtttgacctgatgtatgccaagcgtgcctttgttcactggtacatgggtgaggcgatggaggaaggcgagttttcagatgcccgtgaagatatggctgcccttgacaaggattatgaggaggttgatgcggattctgttcaacgatagggcgatgaagacggacaggaatactaataatccattccttttggccctgcggatgacaat

SEQ ID NO: 156815 - DNA, 420 bp, Homo sapiens
  misc_feature (1)...(420): n = a,t,c or g
atagcgagcggccgccctttattttttttgctgcctgttttaccgtgttgacgtgggggggnnnnnnnnnnnggctggcgttgccaccatctagaccaaccgttccatccagtttggggattggtgccccactggcttcaaggttggcatcaactaccagcctcccactgcggtgcctgctggagacctggccaatgtacagagagctgtgtgcatgctgagcaacaccacagccattgctgaggcctgggctcgcctggaccacaagtttgacctgatgtatgccaaacgtgcctttgttcactggtacgttggtgaggggatggaggaaggtgatttttcaaaagcccgtgaggacatggctgcccttgagaaagattatgaggaggtctgcgtggattctgttgaatgagagggtga

SEQ ID NO: 156816 - DNA, 727 bp, Homo sapiens
cggggccctcaatgtggacctgacagagttccagaccaacctggtgccctaccctcgcatccacttccccctggccacctatgcaccagtcatctctgcagaaaaggcataccacgagcagctgtcggtggcagagatcaccaatgcctgctttgagcctgccaaccagatggtaaagtgtgatccccggcacggcaagtacatggcctgctgcctgctgtaccgtggagatgtggtgcccaaggatgtcaacgctgccattgccgccatcaagaccaagcgcagcattcagtttgtggactggtgccccacaggcttcaaggttggtatcaactaccagcctcccactgtggtgcctgggggtgacctggccaaggtgcagcgtgccgtgtgcatgctgagcaacacgaccgccatcgccgaggcctgggcccgcctggaccacaagttcgacctgatgtatgccaagagggcgtttgtgcactggtatgtgggtgaggggatggaggaaggcgagttttcagaggcccgtgaggacatggctgcccttaaaaaggattatgaggaggttggagcagatagtgctgacggagaggatgagggtgaagagtattaacctgtgtgctgtacttttacactcctttgtcttggaactgtcttatttttgttctgtaaatgtctattgccgtaaattgttaataaaattgatgttttgtcgacgcggccg

SEQ ID NO: 156817 - DNA, 1865 bp, Homo sapiens
acggtttcgctgatgctgaggggccactttctgtctcgcgttgttctctggggaccgggagaggaggaggcacccaaaaagagcgggggcgttgggcgagctcgggggacgtgggagggggaacgggaacaaagcgcagcctagggttagcgtgggaagaccctccgcggtctttggcgttttggaaagatacccacacattcccgggaaaacatgcgtgagtgcatctccatccacgttggccaggctggtgtccagattggcaatgcctgctgggagctctactgcctggaacacggcatccagcccgatggccagatgccaagtgacaagaccattgggggaggagatgattccttcaacaccttcttcagtgagacgggggctggcaagcatgtgccccgggcagtgtttgtagacttggaacccacagtcattgatgaagttcgcactggcacctaccgccagctcttccaccctgagcaactcatcacaggcaaagaagatgctgccaataactatgcccgagggcactacaccattggcaaggagatcattgacctcgtgttggaccgaattcgcaagctggccgaccagtgcacgcgtctccagggcttcttggttttccacagctttggtgggggaactggttctgggttcacctcgctgctcatggaacgtctctcagttgattatggcaagaagtccaagctggagttctctatttacccggcgccccaggtttccacagctgtagttgagccctacaactccatcctcaccacccacaccaccctggagcactctgattgtgccttcatggtagacaatgaggccatctatgacatctgtcgtagaaacctcgatattgagcgtccaacctatactaacctgaataggttaataggtcaaattgtgtcctccatcactgcttccctgagatttgatggagccctgaatgttgacctgacagaattccagaccaacctggtgccctatccccgcatccacttccctctggccacatatgccccctgtcatctctgctgagaaaagcctaccatgaccagctttctgtagcagagatcaccaatgcttgctttgagccagccaaccagatggtgaaatgtgaccctcgccatggtaaaaaacatggcttgctgcctgttgtaccgtggggacgtggttcccaaagaatgtcatatgcttgccattttgccaccatcaagaaaccaagcgtacctatccatgttttgtggattgggtgcgcccatctggctttcataggtgtggcatttcaactatccagccttcccactttgttggtgcctggtgcgagacactggcgcaaggtaccagagaagctgtgtgcattgctgagcaaacaccacagccatttgctgaggcctgtgctcgcctggaccacaagtttgacctgatgtatgccaagcgtgcctttgtttcactggtaccgttggggaggggatggaggaaggtgagttttcagaggcccgtgaggacatggctgcccttgagaaggattatgaggaggttggtgtggatttctgttgaaggagagggtgaggaagaaggagaggaatactaaagttaaaacgtcacaaaggtgctgcttttacagggaagcttattctgttttaaacattgaaaatgttgtggtctgatcagttaatttgtatgtagcagtgtatcgctctcatatacaattagctgacctatgctctaaaacatgaatgcctttgttacagacccaagctgtccatttctgtgatgggttttgaataaagtatttccctgtcttacatgaggcacgaataacaaaacatccttgtccttcaaaaaggggg

SEQ ID NO: 156818 - DNA, 641 bp, Homo sapiens
tgtttaaaggaaatttccttccttaatggtagtctcaccccaggtgcagcagtgaaatcttggctcactgcaacctctgcctgcagtttcaagggattctcctgcctcagcctctcaagtagctggaattacaggtgtgcgccaccacgcccgactaatttttgtatttttagtaaagacagggtttccctctttcttcttttgttttcactctttcttcctctgttggccaggctggtcttgaactactgacctcaagtgatccatctgccttggactcccaaagtgctgggattataggcgtgaaccactgcatctggccaattctggttaattttctgaattaaaaatttagggaaaaggacctagcaagataatgtaatagttaattagacttggagaattgatttttagtattttcatgatataaataaatcaaggggatcttctccttagaagttggtagttattaactatgtggtggtgcctaacatgaaagaacattttaaaaaacaaggactacagtttaatcaccatctctgcctcctttcaaaatctgtggttacctgctttcggaaccatagctttcttctttctttcttcatgggtctttctacatcctgttattgtcatggcaacgg

SEQ ID NO: 156819 - DNA, 445 bp, Homo sapiens
gtcgactttttttttttttttttgtatttttagttgagatgggattttgccatgttggccaggctggtctcaaactcgtgacctcatgtgatccgcccacctcggcctcccaaagtgctgggattgcaggcgtgagccaccgcgcctgacccaacacaagtttaaaatgaaagctgttatcagtagagaatcttcaccacgttggcaccagctcaagtgtagtgtcggcgcacttttagcttagagtcagaaaaatagacatgtatgaaaatgcgtggcaggagcccttccataaagcaaatctctctgttgcagtggttcttaacaaggtgtaaacgttataactacctatggaacttttaaacctgtatgccaggccccatccaaacttactgactcaaaatctccgggcatctgtttttttgtttgttttgagatagagtct

SEQ ID NO: 156820 - DNA, 406 bp, Homo sapiens
ctgtaaatttgcacatggaaatgccgaacttcatgaatgggaagaaagaagagatgccctagggatgaagctgaacaaagcacgaaaagatcacttaattggcccaaatgataatgactttggaaaatataggtttttgtttaaagatttaaactaatatgctggcttttatgtatgatacctaatcagagcattgaccagaaaaattgaaagtgttctgaggcgcatagcagaggagctgcaaatttcctgcttgtattggcgtatatcgttcctcctgagcagcaccccacagtaggtaagaaaatgggctgtttcacagggctggccacgctctcacggaacccactgcatcaaatggtgaagtgactgctacccgttgccatctgttgaacagacttttgga

SEQ ID NO: 156821 - DNA, 531 bp, Homo sapiens
ggcctagaaatggggagcatgtttcctgttcccaaccagcgaggtgtcagtaaatcaccaggagcgcggagcagcccctgcccgggaccatagctggtgatcccccatagtgggcaaccatgcccagcctgcttccttgattggccaagtttggggtgagggggtggttgtagggttttccttagggatggcagccctattggggtctgtgggtgctcagggctgcgggccgcatgcctgctcaccaggccctgcccacctatgctcgctcctttctctctgtcagcgttggggccttcgtgaagacctggctgcccttcatccttctcctgggcatcatcctcaccgtcagcctggtctttaacctccggtgatggctgctcggtggccccacacccaccagggtcccgaggaaacagccgccatcccttttggttccagatttttttctcctcaccccaaaaggcagggttgggcctgctgttgtggaccgggggtcggggctggcaggatggaaggactgaggaccag

SEQ ID NO: 156822 - DNA, 1457 bp, Homo sapiens
tttcgtgcgcgccgcatggcggaagcggaagggagttctctgctcttgttgccgccgccgccacccccgcccaggatggcggaagtggaggcgccgacggcggccgagacggacatgaagcaatatcaaggctccggcggcgtcgccatggatgtggaacggagtcgcttcccctactgcgtggtgtggacgcccatcccggtgctcacgtggtttttccccatcatcggccacataggcatctgcacatccacaggagtcattcgggacttcgcgggcccctactttgtctcagaggacaacatggcctttggaaagcctgccaagtactggaagttggaccctgctcaggtctatgctagcgggcccaacgcatgggacacggctgtgcacgacgcctctgaggagtacaagcaccgcatgcacaatctctgctgtgacaactgccactcgcacgtggcattggccctggaatcttgatgcgctacaacaacagcaccaactgggattatggtgacgctctgcttcttctgcctgctctacgggaagtacgtcagcgttggggccttcgtgaagacctggctgcccttcatccttctcctgggcatcatcctcaccgtcagcctggtctttaacctccggtgatggctgctcggtggccccacacccaccagggtcccgaggaaacagccgccatcccttttggttccagatttttttctcctcaccccaaaaggcagggttgggcctgctgttgtggaccgggggtcggggctggcaggatggaaggactgaggaccagcatgaagtgggggtttgttgtctccctgcctctcagaagcaccctgtcccctcctccccaggcctgtgactccggccctggaagcccctttgttcttctgttgaaaggctttggcttcccgctgtagagctgctcccgccaccacctgctggggtcctgcctcagcccagtgcccagtatggggagaggaggacatttgggctcacctgtcaagggggccctgggaccagagctggtcccagcatggggtgcaccgggtacacttaacgtgtctctataagccaagttgcttcaggaccctttcaccactggcctctataatggtccagaggggctggctgggtccctttgtcagactcctgccggcagctgccctgggggacatgtgtgcccatctggcatcctccagacagagcagtgtagacagcactcagccccagccccaggtgtggacctcatgctggtgatggctcccctgggtggcctgccagcacagccagtgccatcagggagctgaaggggctgtcccccacctaactccagctcccccttcacgttgtcaccaaggccctgtgccgcccgcctcgcccccctgctctgtggattcctttgggaagggctccctgggcaggacaataaagagttttgactccaa

SEQ ID NO: 156823 - DNA, 707 bp, Homo sapiens
ttgaaaggctttggcttccctctgtagagctgctcccgccaccacctgctggggtcctgcctcagcccagtgcccagtatggggagaggaggacatttgggctcacctgtcaaggtggccctgggaccagagctggtcccagcatggggtgcaccgggtacacttaacgtgtctctataagccaagttgcttcaggaccttcaccactggcctctagaatggtccagaggggctggctgggtccctttgtcagactcctgccggcagctgccctgggggacatgtgtgcccatctggcatcctccagcccgtgcagtccgctcttaactgttccaagggcctcccaagtgcctcccaaagaattggacccaatctccccctgcagtttgaggccaagaaaggtaagtggaccttgacaaagtgccagagtaaccgtgtgagacaggagcagtgtagacagcactcagccccagtccccaggtgtggacctaatggtgggtaatggctcccctggggtggcctgccagcacagccagtgccatcagggagctgaaggggctgtcccccacctaactccagctcccccttcacgttgtcaccaaggccctgtgccgcccgccttgccccccttgctttgtggattcctttgggaagggctccctgggcaggacaataaagagttttgactccaaaaaaaaaaaaaaaaa

SEQ ID NO: 156824 - DNA, 1172 bp, Homo sapiens
tagtcagcgtggtggaattcctttgctccaagcgttttgctcagtggagccacctggcccagcaccagctgctgcacacgggggagaagcctttcccctgcctcgagtgtggccggtgcttccgccagaggtggtctctggctgtccacaagtgtagccccaaggccccaaactgtagccctagatctgctatcgggggctccagtcagaggggcaacgcccattaaaaggggaaggactgcctacgttcatttcattttatggagggtcccagaaaagggaaggaggagccccaggtcatacagggcagagtcagaactaaacccgggtctcctgctgcacagagctgaactttgtatcttgcaatgcgctggctgcctccctgtgcgtgtctggaacagtcccattaggagaggtgacgtcatttgcttaaagttttccaagctaccctatcctaaaataagttggggggaattcaagggctaaaagttctccccatctattttaggggctgtctgcttttctagtctgtccacacagggattacctgtcatcttgcatgcaatcaggagaatctcataggggcaggaccttcccctactctcgcctcttcctccatactaggttagaaaaatctggtttagcccactttttgcaacactcctgccaagtggtcttctacccattgcttgaaaatctctcttgacagggagctcactacctcacaaggcaggtcatttcatttgtgggatctatagaaggttaaagtaccacattctcctctaaacctttgcctacggacatggtttaaataccttcatctacatagcaggcccttcaggataatcacaaccacttttgcccccaagttttcaggttaagtagcgatgaatttggtcattccttaaagacagggtttcaatttccacacatgatctctgcaaacaggcactgggttttcagtgtcctttttgaagggtcatataaaaataaggtaacatccacagtgccactacaccttctggggctggacttgtttcagcagctttggttgcactgaatttgggggagctgccatggtaccagggggttattgcgttgcagatatataaaagccctatacttaagcaagaaaaaaaaaggggggcccatataaaggaccccccctcacc

SEQ ID NO: 156825 - DNA, 444 bp, Homo sapiens
agaaggggctgccccctcctctggagggcccttaagggacttttggggcttcccgagaaacaccaacaagccctgcagtggcactgggtaatctctgcagcgaatctgctggatggcctcactggcccctcctggacctgctccaagaggccaagccccacacacacaccggcccctaggaaggcctagccgaggggctcaagtccagccagcagctcaggctggccaggccacttccaagcagagtcctggaccagggttctggtcccagctcccacaggacctgactactgcctcagtttccccatctgtcaatggagccagcaaggcctgtctggagtgcaaatcttgaccaagtcaccccggaagtcccttcaaaagcaagaccaggggttgtgggccggtcccagaggagaagccagagctgctagtcctcctcctgct

SEQ ID NO: 156826 - DNA, 474 bp, Homo sapiens
agggggtgaggaccccccagccctctgcaggaagcccacagcccagacccagacagggaagaaacattcagggacagcggccgtaagaagcagagagagacataaggaagtgagagctgggcactcactttccgctctggactctccgcccagcctcctccctggcatcttatctcctgtccatcagtgtgatgtcactagagttgaccctatcccttccctgctcacagctcttctctggctccccagtgctcccaagtgaaggtctgagccccacaagcctggcgttggagaccctgtgtggtctgcccctcccacctctggagaagacctcattcttctagcaacctcggcccactgaatttctttcagtcactctccattactggctgatccaatccaatcattctctcccagctctgggccgctctacatagaactataatctgtctgcgtgctgaactcctcctgttc

SEQ ID NO: 156827 - DNA, 1767 bp, Homo sapiens
  misc_feature (1)...(1767): n = a,t,c or g
tcgcacctgaggctcttggagcggcctcggggcgcgcccacctggaggttggaattacacagggtcgaaaaagctgagtcctggaggcgaggcgctgtagatgaaaagaagcaaagaattgataactaaaaatcatagtcaagaggaaacaagtattcttcgttgttggaaatgtagaaaatgtatagcaagctctggttgttttatggagtatcttgagaatcaagtgattaaggataaagatgattcagttgatgctcaaaatatttgtcatgtgtggcacatgaatgtagaagcccttccagaatggataagctgcctaatccaaaaagcccagtggacagttggaaaactgaattgtcctttctgtggggcccgtttagggggctttaattttgtcagcactccaaaatgttcctgtggccagcttgcagctgtacatctctccaagagccggactgattatcagccaacacaggcaggcagactaatgagaccatcagtgaaatacttgtcacatcctatagttcagtcaggttgtgacaaggaagctctgctgacaggtggtggctctgaaaacagaaatcacaggcttttaaacatggcccgaaataataatgaccctggaagattaacagaagcactctgcctggaggtgcgaccaacatattttgagatgaagaacgaaaaactgctgtccaaagcatcagaaccaaaataccagctttttgttccccagcttgtgactggcagatgcgctacaagagcttttcatagaaaatcacatagtttggatctgaacatcagtgagaaactgactttattacccactttatatgaaatacatagtaagactactgcctattccagactaaatgaaacacagcctattgacctttcaggcttgcctttacaatctagtaaaaatagctattcctttcagaatccatccagttttggatcctagtatgctgctgcaaagattttcagtgggccccccatgagacccagacacaaagaggagggaggaatttcagtgtgggtctaggaggctgcttcagtgtattctggaccatactaatcactaacaatctgactttcctgatgggacctgccctcagctggcaggagcatgccggaggcctcagaccaggaagagcacctctcccctctggacttcctgcactcagccaatttttcattgggcagcattaatcagaggcttaataagagagaaaggagcaagttgaagaatctaagaaggaaacaacgaaggcgtgaaagatggctacagaagcannnnnnnnnnnnnnnnnnnnnnnnnnnnnnnnnnnnnaattgaacaatgccacaaaaactttcctttacctaaagaaatatttgaaaaataaaaacaaaagctttccagaaaatcccaactcctgcaaaatggcccccctacccaagcctgccagaaaagcatttccatcctttttggaggtttcccgcagacatgcagactcccagttacaagaaggcagttccccacacggtgcacacaggatggattacctgcactttgaggatgatagcccgtggatggtggtttgacatggatatggtgatcatatatatttattcagtgaactgggtcattggattcattgttttctgctttttttgctattttttctttccgttttaggaatttcataccttactacaattgaccaatcataaatgatgtaaataacaattgcttaaacatttttaaaaaaaaaaaaaaaa

SEQ ID NO: 156828 - DNA, 1504 bp, Homo sapiens
agttaaattgtgttgcctaattttgttttgttttgttttgttttgtttttgaagacaaggtcttgcctctgtcaaccccaggcctaagaagtgcagtggcatgatcaagggcttactgcagcctcaccctcgatttccctgggctcaagcaatcctcccacctcagcccccaagtagctgggcctacaggtgcgtgctaccacgcctggccaattttttaaattttagcacagatgaggtctcactatgttgcccgggctggtctcgaactcctgagctcaagggatcctcccgcctcagcctcccaaagtgctggtgttacaggcataagccaccacgcctggcctgtgttgctattatatttggcaggaacccagagtccagaacatttcatctatgatgggttagataatgtgtctagttgtttgcatgccaatttcagtagcctcagttattcaacctaggagatttttctacctctttactaccctgctgaagttgctcttcagcagaaaatctttgtggaacacattccacactttgaaatcttcgtggaacaaaagatatttgtggaaccaatctttgtggaacatattccagctttttgaatgagtgcatatccagtagtacctttaaagtaacactttgtacataacaaatactcagcaaatgtgaaactttatttggctcttacttcaaaattagtccaaaatgttggaaataaaatataagacattgatctagatatgaggtttttctccttcattctcagctgtcgaagaaatcaaagtagcatatgcacaaggttaaaaaccacatatacaaatactatagaacagcttataatgaaaaccttgcctgcctttataaaaaatgtgattatcttcttctgttaatgtcaataaaagatggtttgtcctagaaggtctataaatggtattatgttctggaggaaacctagcaaaaactttgctagtttagtacttgtctctaaattgatgttcacccatttcaatattgcacttattaatggtctttaatttttctaggcatagataacaattgattctttaggattcatatatggaggtaattcttgctttctaaagaaaggaatatggcacattggaaccattttattcaccagtggatttacccttagagtatttttagatctgagctgatgacttgtgagagaaaaatgggaacagacgtaaagccatggaagccatgaacagtaagagactgccgcctggcatggtttcttcttctgcagaagatgaaactgaggagaaacaagacaacatcctttcataccaggaatggtcaagataatgcaagaagaaaaaagctttcaaacaaatcagaaggcagtcaacaaacagaaagggggacattccttccctggcagttactcaaaactgaaattgcttattgtgtacaccggggcttgtacttggggaatttaataaaaatgctcattaccaagctccaaaaaaaaaaa

SEQ ID NO: 156829 - DNA, 462 bp, Homo sapiens
cacaaatcagacggcagcactgtctctgtgcccatgatggctcagaccaacaagttcaactatactgagttcaccacgcccgatggccattactacgacatcctggaactgccctaccacggggacaccctcagcatgttcattgctgccccttatgaaaaagaggtgcctctctctgccctcaccaacattctgagtgcccagctcatcagccactggaaaggcaacatgaccaggctgccccgcctcctggttctgcccaagttctccctggagactgaagtcgacctcaggaagcccctagagaacctgggaatgaccgacatgttcagacagtttcaggctgacttcacgagtctttcagaccaagagcctctccacgtcgcgcaggcgctgcagaaagtgaagatcgaggtgaacgagagtggcacggtggscctcctcatccacagctgtcatagt

SEQ ID NO: 156830 - DNA, 627 bp, Homo sapiens
cgaaccaggcctccctctccttccttcacctccgtccctattctggccacttgattcgggggacacctggtaggggatggggaaaggtgggagctgccagccagaggggaccccggcttgagcagcctcttgctgctatctgcaggttctccctggagactgaagtcgacctcaggaagcccctagagaacctgggaatgaccgacatgttcagacagtttcaggctgacttcacgagtctttcagaccaagagcctcttcacggcccgcaagcgctgtaaaaagtgaagatcgaggtgaacgagagtggcacggtggcttcctcatccacaggtgagtctggctcaggtgaggctccacgggtgtcgcctccatcgcccttcaggataactggtccccagacccggaaaggaccccgcagccctctcggcacagagcagctctgtctgtgctcagccatcacccactccccacctgtttctcagcctggaaaacgggcttgggaccatggaaccctgtttcctcgcctgatggctcctaagttccctgactgtgaaaaggcctcctaaagaaaaacccaagttgttcccacagtgggaagtaaacttaagaaacatgcttatcagg

SEQ ID NO: 156831 - DNA, 846 bp, Homo sapiens
ttttttttttttttacttgtacacaaatgttcataacagctttatttataacagccccaaactggaaacaacccaggtgtccatcgataggtcaatgaacaaatctattcaatgaagcagtactcagcagggaagagagcataaaaacaaaaactcgggacagatgctaccacatggatcgaatctcaaaataactatactgagtaaaatatgcctgaccaaaaaagggatacatattggtatgattcaatttacatagaattctaggacatggcaaactaataacaggggcacaaggggcacttggggaatggatggggtccgttcctcacttcagttggtgggtggataggttttacgcaggggtatacatacgcccaacaccattggtacacttttggatacgtggcaggtttattgggggtggtcaaggtacacctcctaaaattaaaattattgatggggctctacattctgggagacacggggcagtagaactattattttccagcttgaaatattagctacactttggtaaaaatacttttgaactttatcttcacagtcgcggcaaggaaaacaaaaggtataaacattcattggttgaaaaacaatgtcataaagttgtccccgtatctgtggggggttggttccaggactcctgaggatactaaaatcctcagatgctcaagcccctgataaaaaatggtgcagtatttgcatataacctacccacatcctcctgcacagtttaaatcatcactagattacttatattacccaatacaatgtaaatgctgtggaaatagttgtcatactgtattatttagagaataataacaagaa

SEQ ID NO: 156832 - DNA, 690 bp, Homo sapiens
ggagatggagtcttgctccatcacccaggctggagtgcagtggtgagatctcagctcactgcaacctccgcctcctgggttccagcgagtctcctgcctcagcttccccagtagctgggattacaggtacctgccaccacgcctggctaatttttgtatttttagtagagatggggtttcaccatgttagccaggctggtctcgaactcctgacctcaggtgatccacctgccttggactcccaaagtgctgggattacatgcatgagccaccacgcctggccaacactggggcttccctttttcctggccaccaaaatcttgccagtgcttcccctcccactggctgaacccatgcagaagtcagctgacaaggtagactgggaaattcccagggtcactttcctgcaacatagggcagaggatgagagaagactttcagacaaggagggtctggaaagatacagagggcaaggactttctgtttcaaagtgtgaatttttaatacttgactgaactagaacagcaattaagacttttctactccaagaatataaaagtaaaattagttaacctactgtgattgtactcaacacaaagcatgatactgattttcttaaacaattcattttgatcacgctagagatcagaatatttcgagagaaatgaggaagcaaagaaaagaacccaa

SEQ ID NO: 156833 - DNA, 1024 bp, Homo sapiens
tcgacttttttttttttttttttttttgagatggagtcccactctgtcacccaggctgtagtacagtggcgtgatcttggctcactgcgacctcctcctcctgggttcaagcagttctcctgcctcagcctcctaagtagctgggactacaggcatacacctccacacccagctaatttctgtatttttagtagagacggtgtttcaccgtgttggccaggctagtctcgaactcctgacctcaggtgatccacttaggtattattatatttcagaagctgtcaaaccataggaacatctaaaaccttaccttaagcccaagctaacaaagccaaactgttactaattccttccagtgaaggaatgatacttcttcaaatgtgagccagaagtaaagttatttacaccaatacatttaagaactatcagtttcatgaatgaacatctatcagtgaagaaggataaagaaaagttatagccggggaaaaaaaggtaccaatatccaaaattagcaagccaaagggctgttgaggaaaaacagcaagtagcctttttttttcaaacacctgtcctcctcttattattaaatctaggaatccagagcattaaaaagttaccaaagcactgatatacaactgagtatctgtttctatttaaacatactgaaagaagataaaccgctaaaataatctgcattctctacagagttcactgtttacaagttaaataacaaaacattaacttctttatgccttgttttgtagatttgactttggaactacacttcataattataaaatgattaacttttttttatatatcccccccaaaactccaaaataagatgaaacaaaagcacctcactgtgtaaccagttggtgacaaaaaccacagagaggaattattctgagtgactttaaagcatagtaaaggcacattcataacaaaatatacactaagaacaaagaaaatctctaggtatacgaatacagtcatatgccgccatgatgacgtttcagtcaac

SEQ ID NO: 156834 - DNA, 405 bp, Homo sapiens
ccaggttctcaggcccaccctcagagccctggcttgagagtcatcagttctactgatacaaaggatgtcccctaattggagatggggtccaccatgcctggccacccctcaaggtgtaactccctctgacactcagccctgccaggccctaggcctagggccccaccctaggaatgttcaacccccaatcatcatcagcggcactggctagagagcaagtctaagggaagctggcctcagtgtttctggaaactcaggaattaacctggagcttgcggctccaccccagagttggatggggcagggctctggtttaaggagaagggagagaaacagcagaagcacttcctggaagccagaggttctgggctctaacttgaactagaactagtcctgcaaaattgg

SEQ ID NO: 156835 - DNA, 556 bp, Homo sapiens
  misc_feature (1)...(556): n = a,t,c or g
ggaggtcgaggctgcaatcagtcatgatcgcgtcactgcactccagcctgggtgacaaagcaaggccccatatcagatatagatatacttatcagaccccccctgaccatttagattggcagtgctttgagaaatgcactatgacctttctgtgtcaatgggaatatacagaaggaacattcgggaccccgctgtcccccacagcctcattgttgtctccaggacactgctgggtcacacgaatgctccaggacagacagggacctggagtgcatcaggatctgaccagataggagtttttgcctcgtatctgggtgctacggattttttgccgttctctgaggtccaccacctgcccttcctggcatggtttccttcgtgaccatccctgctgcccctgggggtggaccccactggcccttctgcagacagctccctgccttctgccctccagggggttctggccagagtccatgcttggagacaggatcatctgccttcagccctcacagtgctntaaattatagcaagtttgcccataggacaaaagagcatt

SEQ ID NO: 156836 - DNA, 380 bp, Homo sapiens
cctgcgcgccttctccagtccgcggtgccatggcctccgcccgtctgttcgcgctgctgctgttcttcgtaggcggagtcgccgagtcgatgacttggaagactccatgatcggccctgaagttgtccatcccttggtgcctctagataaccatatccctgagagggcagggtctgggagccaagtccccaccgaacccaagaaactagaggagaatgaggttatccccaagagaatctcacccgttgaagagagtgaggatgtgtccaacaaggtgtcaatgtccagcactgtgcagggcagcaacatctttgagagaacggaggtcctggcagctctgattgtgggtggcatcgtgggcatcctctttgccgtcttcg

SEQ ID NO: 156837 - DNA, 313 bp, Homo sapiens
  misc_feature (1)...(313): n = a,t,c or g
aagtatgggctttgagggcggacctaagattcttaactggaagtttaagaaagtganccaatcccantcttgccttcanaaaggccaagntgaatccatttttctgaacacttnaaaggtaatcagagctggagatactnacaagtcagtattaggttgacctcaccctaccctaatgtccaccctttaaaatcccctggnttccctccccgctaaagtccaagccagtgcccacaagcaagcttnacgcgtagaactcattggtgggggctttcttgtagatgggtttcttgcccaggtcatagctgccttc

SEQ ID NO: 156838 - DNA, 310 bp, Homo sapiens; identical to SEQ ID NO: 145955

SEQ ID NO: 156839 - DNA, 422 bp, Homo sapiens
  misc_feature (1)...(422): n = a,t,c or g
nnggaggcaagtcaaccggctcgaggttacgtgacanacactacgggaatctctgtggtatatacctggggccattctatgtctctttcaagtgacttttggaaatcaaccttttttatttgggggggaggatggggaaaagagctgagagtttatgctgaaatggatttatagaatatttgtaaatctatttttagtgtttgttcgtttttttaactgttcattcctttgtgcagagtgtatatctctgcctgggcaagagtgtggaggtgccgaggtgtcttcattctctcgcacatttccacagcacctgctaagtttgtatttaatggnnnnnnnnnnnnnnnnnnnnngctttcttcaggctctagggctgtgctatccaatacagtaaccacatgcggctgtttaaagttaagccn

SEQ ID NO: 156840 - DNA, 2718 bp, Homo sapiens
ctttttttttttttttttttagaaagtaccaggttttattatctttttatcaaaaaaaaatcagtaactagacaacaggtgtgagaggtgccttacagagggagggtggctcacttcccacacagccccaaggggaaagggcacttgggggcagaagaaggaaccagccagctggggaccctggggttgtcagtggtgacggggagcttaatggcccactgggtgcaagcaagggaggggtggttccccttcaccgcagccactggggtcaggaggaagacacgaacctggccaggctaaagccaccaaggcctccccctctcagggagagggagacaagggtcgtcccagacaacagggccccagctggcgttccaaatcaagccctcgccccatttctgacccccctaccccagggggagacaagggtccgtccccaagcacaagcttgaggctgtgaactcggttagagccagatctagtgtctctaggaataagtgctggtccaaccagatggacattgctctccgctgtccagttacagtagcccatgaactcacatacagtgacgccctctagaaaacgtggttaagtgcaactggaggagggaatgtgtaatcttaatgtgattttaattggcttaactttaaaccagccgcatgtggttacttgtattggatagcacagccctagagccctgaagatagcaaaccaaagaacacccagctgggtcccaaaccagcaggcagaaaggggtaaatccatcaagcttcaactatccaggccccatcggaagccaccaggaacagggcaagggaataagggcaaaaccccacccagcccacatgaaaattcactcactcaaccacccagcaacatcaaactggaaacaccacacttatttcctgaaaaaaatatatttatctatttttctagaaccaaggaagaataataatatattataagaagcacagacacaaatatcccaccatccccttcattatattttgggatctgctaaaaaaaaactatgtttcggcaaaagctattttataagaggaagcagcttcagaaagggccaaggccatgaggagcggggtttaaagtataaaaaaaaaaaactggggaaggggtttaatgaaagagaacaaagaaagaagaggggaagggaggccctatctaaagctataaatagtaaaaaaaaaaaaaaaaaaaaaaaattaataaaaatcatctctccggctcttctctcattttcaagaaacaaacaaaaacaaaaacaaaaaccattaaatacaaacttagcaggtgctgtggaaatgtgcgagagaatgaagacacctcggcacctccacactcttgcccaggcagagatatacactctgcacaaaggaatgaacagttaaaaaaacgaacaaacactaaaaatagatttacaaaatttctattaatcccattccagcatagtctctaagctcttttcaccatcctcccccccaaataaaaaaggttggtttccaaaggtcacttgacagagcctagaatggccccaggtatataccacagagattcccgtagtgtgctcacaagtccccatttacagaatcatctcaaggtgcaggtggttttagttccttcccccatttcctggcagagagaccggctgtgaaaggaagggagcaaggcctctgggggaggaccttcagccaggactccacacaacatccgttagccccctggcttcagaggagctctggatgaggcatggtcagtatgggcttgagggcggacctagattcttaactggaagtttaagaagtgatccaatcccagtcttgccttcagaaaggccaagttgaaatcatttttactgacaggggaactgagggccaaagctcaagaagaacctggcagaacagtagaagacaatgtctcttctgaacacttcaaaggtaatcagagctggagatactgacaagtcagtattaggttgacctcaccctaccctaatgtccacccttcaaaatcccctggcttccctccccgctaaagtccaagccagtgcccacaagcaagcttcacgcgtagaactcattggtgggggctttcttgtagatgggtttcttgcccaggtcatagctgccttcatccttcttcttcatacggtacatgagcagtaggatcaggaagacggcaaagaggatgcccacgatgccacccacaatcagagctgccaggacctccgttctctcaaagatgttgctgccctgcacagtgctggacattgacaccttgttggacacatcctcactctcttcaacgggtgagattctcttggggataacctcattctcctctagtttcttgggttcggtggggacttggctcccagaccctgccctctcagggatatggttatctagaggcaccaagggatggacaacttcagggccgatcatggagtcttccaagtcatccagatctccagagccagacagctcaaagtcatcagattcctgcccgggccccactacatcctcatcgtctggtagggctccggagaagtatcggccttctaggaggtcctgggggtcgatgacctcagtctctcggatcgactcggcgactccgcctacgaagaacagcagcagcgcgaacagacgggcgggggccatggcaccgcggactggagaaggcgcgcaggctgcggcgagtggc

SEQ ID NO: 156841 - DNA, 722 bp, Homo sapiens
tcttttttaaaaaaatttttatttatttttttgagatggagtttcgctcgttgcccaggctgtgcaatggcgcgatctcggctcaccacaacctccgcctcctgggctcaagctactctcctgcctcagcctcccgagtagctgggattacgggcatgtgcccaccatgcctggctaattttgtacttttagtagagacggggtttctccatgttggtcaagctggtctcgaaactctcgaatctcagatgcatccgcctgcctcggcctcccaaagtgttgggaattcacaaggcgtgacaactctgcaccacggtcgtaggggcctcaaataaattccttctcccttcttgcccttgacagagataggcacgagatatcactaccattcccaactttcaacacgtgggagggaaatccaaacgcgagaacgctcggatttcccccttctttacttgcaacaactccgtaacccgcaaatcggctacggacaactgcgatgtccactatgttagttctcgtagcgtggattctctctcctcaagatgccatctggggggctagaggccactaataattgccctcacgatcgaagaaactcgatcctaatcctcgacggcacttcaggaacaaagctgctctcccatcgtccctaacctcactaccgtaaaggtcgcagcagagccccggctccaacccgtagcgccatcttgggtcgacgc

SEQ ID NO: 156842 - DNA, 365 bp, Homo sapiens
aagagatgagacttagtatgttgcccaggccggcctcaaccttctggcctcaagccaatcctcctgcctcagcctcccaaagcactgggattatgagtgtgaaccactgtgcctagcctttttttttttccttttgtagaggcagggtcttgctatgttgcccaggattctaccacctattaaaagcattagcatcaggtggaggaatggccaaaaaaaaatgcatcaggtactttagtatgaaaatccacctccaagctcaatgagcaagcaacccacatcacaggcctgtgacatccagagctcttgacttccagtcagaatgacacctgggagagtcactcactgcagagtcgacgccggcc

SEQ ID NO: 156843 - DNA, 1680 bp, Homo sapiens
gccattacagaggtcctttcaccacctgtgagaggtttgattttgggggagctccgggactctcaaggctacagtgtggactgctggcccaaggagaagagcactgctgcggccgccgccattttagcgttttgtcagaagcgtccgcgccgcgaggaggaggccctgctggtttctgtgcgggctcttgtcaggatggtgaagctgttcatcggaaacctgccccgggaggctacagagcaggagattcgctcactcttcgagcagtatgggaaggtgctggaatgtgacatcattaagaattacggctttgtgcacatagaagacaagacggcagctgaggatgccatacgcaacctgcaccattacaagcttcatggggtgaacatcaacgtggaagccagcaagaataagagcaaaacctcaacaaagttgcatgtgggcaacatcagtcccacctgcaccaataaggagcttcgagccaagtttgaggagtatggtccggtcatcgaatgtgacatcgtgaaagattatgccttcgtacacatggagcgggcagaggatgcagtggaggccatcaggggccttgataacacagagtttcaaggcaaacgaatgcacgtgcagttgtccaccagccggcttaggactgcgcccgggatgggagaccagagcggctgctatcggtgcgggaaagaggggcactggtccaaagagtgtccgatagatcgttcaggccgcgtggcagacttgaccgagcaatataatgagcaatacggagcagtgcgtacgccttacaccatgagctatggggattcattgtattacaacaacgcgtacggagcgctcgatgcctactacaagcgctgccgtgctgcccggtcctatgaggcagtggcagctgcagctgcctccgtgtataattacgcagagcagaccctgtcccagctgccacaagtccagaatacagccatggccagtcacctcacctccacctctctcgatccctacgatagacacctgttgccgacctcaggagctgctgccacagctgctgctgcagcagcagccgctgctgctgttactgcagcttccacttcatattacgggcgggatcggagccccctgcgtcgcgctacagccccagtccccactgttggagagggctacggttacgggcatgagagtgagttgtcccaagcttcagcagccgcgcggaattctctgtacgacatggcccggtatgagcgggagcagtatgccgatcgggcgcgttactgctaccaatgccaaagccaggtgccgccacgcagcggacactgctctgcctgccgcgtctgcatcctgcgtcgggaccaccactgccgcctgctgggccgctgcgtgggcttcggcaactaccggcccttcctgtgcctgctgcttcatgccgccggcgtcctgctccacgtctctgtgctgctgggccctgcactgtcggccctgctgcgagcccacacgcccctccacatggctgccctcctcctgcttccctggctcatgttgctcacagccgcactgccctaccaccttgtggtcaacactcactcccctcagtcacggaagactctggctccagtcacagactctctcttcgccctgggccctgtggaaatcaagggtgtctggaagtttgcatga

SEQ ID NO: 156844 - DNA, 555 bp, Homo sapiens
ttgacgaccttagtcactgtggtggaattcctccatcagcggcagacagtcatcaccaccatgaccaccttgaagaagaacctggctgacgatgatgctgtgtcttgcctggtgctgggcaccgagaacaaggagctcctggtgcttgaccccgaggccttcaccattttagccaagatgagccttcccagcgtccccgtcttcctagaggtttctggccagtttgatgttgagttccggcttgccgcggcctgccgcaatggaaacatctatattctgagaagagactccaagcaccccaagtactgcatcgagctgagcgcccagcctgtgggacttatccgggtacacaaggtcctagtggtgggcagcacccaagacagcctgcatggcttcacccacaaggggaagaagctgtggacagtgcaaatgcccgcagccatcctgaccatgaacctcctggagcagcattcccggggcctgcaggccgtcatggctgggctggccaatggagaggtccgcatttatcgtgacaaggccctgctcaatgtcatc

SEQ ID NO: 156845 - DNA, 865 bp, Homo sapiens
cctagtcctccggctccgacagctgggtgtccaggccatggggcagccctgggcggctgggagcacggacggggcgcccgcgcagctgcctctcgtgctcaccgcgctgtgggccgcggccgtgggcctggagctggcttacgtgctggtgctcggtcccgggccgccgccgctgggacccctggcccgggccttgcagctggcgctggccgccttccagctgctcaacctgctgggcaacgtggggctcttcctgcgctcggatcccagcatccgtggcgtgatgctggccggccgcggatgggctctggggcagccctgtgcacaatatggggcatctgagctgctgggggaactgacgctgtggttccttcctgcagttactgctaccaatgccaaagccagcggacactgctctgcctgccgcgtctgcatcctgcgtcgggaccaccactgccgcctgctgggccgctgcgtgggcttcggcaactaccggcccttcctgtgcctgctgcttcatgccgccggcgtcctgctccacgtctctgtgctgctgggccctgcactgtcggccctgctgcgagcccacacgcccctccacatggctgccctcctcctgcttccctggctcatgttgctcacaggcagagtgtctctggcacagtttgccttggccttcgtgacggacacgtgcgtggcgggtgcgctgctgtgcggggctgggctgctcttccatgggatgctgctgctgcggggccagaccacatgggagtgggctcggggccagcactcctatgacctgggtccctgccacaacctgcaggcagccctgggcgcccgctcgtcggcttgggccgtgacttag

SEQ ID NO: 156846 - DNA, 943 bp, Homo sapiens
  misc_feature (1)...(943): n = a,t,c or g
taatcctcgcgacgggcccaccactgccgcctgctgggccgctgcgtgggcttcggcaactaccggcccttcctgtgcctgctgcttcatgccgccggcgtcctgctccacgtctctgtgctgctgggccctgcactgtcggccctgctgcgagcccacacgcccctccacatggctgccctcctcctgcttccctggctcatgttgctcacagccttaaagcccactctcatcttgcaagcctctgaagccaccagttttctgagatgttcctcccggccccggagaccacggatgtggctaccttctcagaatatagatgtttccattgcggcaggccgcggcaagccggaactcaacatcaaactggccagaaacctctaggaagacggggacgctgggaaggctcatctgcaaacaagaagcgcaaacactccaatttctctggagcccccgtccctccctgccctgtcagtaactcctctgagtgagtgcctggtctaaagtcccaatctcctcacttacacccagtttaaactcatacagtttttcaggagggaaacttggggcaacatttagcaaaagccttttagtctgtgccttttgactaaacgatgccacttctaggactgcgatcctaaggatgtacttaaacaaccgtgcagctgggtgtggtggcccacacctgtaatcccagcactttgagaggctgaggcgggtggatncttgagctcaggagttcnagaccagcctgtccaacatggcaaaatttgtctctaccaaaagtacaaacttagctggggtggtggtccacagatgagaagatgaggtgagaggctgtttagcccagtngcataggttnagtantgagattgtcantgaatntacctggnaagagacagattgtttaaacaacaaaaaacatnaaggttttcggaaagct

SEQ ID NO: 156847 - DNA, 383 bp, Homo sapiens
ggcacgagaacgggtaaaatgaaccaagggcttctacgctgacatcatcaaaggctggacaacgtcaagcaccctgtaccttgttcccgaactcatacccattgtgagaatacccacctgccaaccccttccaggggggcccccacgactgcagggcacagaccaaagacatgggtgcccaggccccgagggtgccggaagcggggccttgagtgggccaggccactcccccgagctccagctgccttaggaggagtcacagcatacactggaacaggagctgggtcagcctctgcagctgcctcagtttccccaaggaccccacccccctttgggggtcaggaacactacactgcacaggaagccttcacactggaaggggg

SEQ ID NO: 156848 - DNA, 548 bp, Homo sapiens
caatggatttcgtggggcccactctcagtgcccgccagcctgtgtcctgcctggccaggcaatgagtaccggcggcaggcagctgcctcacccctgcatgaacccccccagcccaggggactcaatggacgctgtcatcaaaggggcagctgtagatctaggagggacgtggaagggggctaagcccctgggcctctggcattgtggaggctgacctatagagaacagagctggagctggggagacatgaagtctgcacatctagaccccagtgaggagcccaggctttttaggcacaagccccatgggctccccgggcccagcccttaagaaccacggcagctgcgccaggccactcctgtctccacttccataccctccaaaggagaggcccctcccccccccatggcatctccaatctgaggacctgccacctcccagaggaccggaggccctgatgccccaagaattgggcttggaaagatgttaatatcccctgccccaagtgccaaggttcagaggcactggtgcaggcctcgtgcaagcgt

SEQ ID NO: 156849 - DNA, 793 bp, Homo sapiens
ttaaaattatagcaaaggtagaatgcacttgtttaatatactctcatgattcttttgcagggtgttcatttagaagaaagcaacactaatgattcaaacagcttcctgaattttaattttgtgttgtctcacagaaagccttatcataaattccataattctaattaatttaccaagataatgtaattacatttggttttgtaaggtatacagcagtaatctcctattttggtgtcagtttttcaataaagttttgattatgggcaaatcccctctttttctttttttaaaatatatttgagtatgccatacatttatatatatggtgtatatgaatttggtttaaacattttaaaatttattctgattagtttgtgtcttttttttttttttttgagagagagagtcctgctctgtcactcaagctggagtgcagtggtgcgatctcggctcactgcaacctccgcctcccaggtccaagcaattctcttgccttgtcctcccaagtagctgggattataggcacacaccaccatgcctggctaatttgtgtctcattttcaagagtagaaaccctaaatattttattttcattccttttccaaattgctatgaatgggattaaaggattacagatgtaaagtctattatttgtggaattctaaaatgttagttctgctgttgttacctgtggaaacatcttaaagaagtacatattttgcacgtcctgcacgtgtaccctcagaacttaaactataattaaaaagaatagtttcaaaaaaatacatattga

SEQ ID NO: 156850 - DNA, 495 bp, Homo sapiens
  misc_feature (1)...(495): n = a,t,c or g
ntctttaaaacggccgccccnnnnnnnnnnnnnnnnnnncttgttatgcctttaatttttgtatttatgagcttgttcatttgaaaatcaaagatacatattgccatattttcaaattgaatttatacagaggcaagcctccagtgaaagaaaaacagtatttttcagataaaaattaattcaaatgaatgtaacttaaatgaaaaaataaaactataaaatcttaggaaaaaaataaaagaaaatcttcaggatccaggggtcagcaaagagttcttagtcatgacaccgaaagtnnnnnnnnnnnnnnnnnnnnnnnnnnnnnnnnnnnnnnnnnnnnnnnnnnnnnnnnnnnnnnnnnnnnnnnnnnnnnnnnnnnnnnnnnnnnnnnnnnnnnnnnnnnnnnnnnnnnnnnnnnnnnnnnnattttgtagaccccttgggtttggatttcagtagaatctgcatcttgggaggactctgagtcagtctgct

SEQ ID NO: 156851 - DNA, 437 bp, Homo sapiens
  misc_feature (1)...(437): n = a,t,c or g
agcagactgactcagagtcctcccaagatgcagattctactgaaatccaaacccaaggggtctacaaaatnnnnnnnnnnnnnnnnnnnnnnnnnnnnnnnnnnnnnnnnnnnnnnnnnnnnnnnnnnnnnnnnnnnnnnnnnnnnnnnnnnnnnnnnnnnnnnnnnnnnnnnnnnnnnnnnnnnnnnnnnnnnnnnnnactttcggtgtcatgactaaaaactctttgctgacccctggatcctgaagattttcttttatttttttcctaagattttatagttttattttttcatttaagttacattcatttgaattaatttttatctgaaaaatactgtttttctttcactggaggcttggctctgtataaattcaatttgaaaatatggcaatatggatctttgaatttcaaatgacaagcctcataatacaaa

SEQ ID NO: 156852 - DNA, 403 bp, Homo sapiens
aaaaaacctccactgaatggagtcttactctgttgcccaggctggagttcagtggcacgatctcggctcagtgcaacctctgccacctgggttcaagcgattctcctgcttcagcctcctgagtagctgggattccagattgtactttcggtgtcatgactaagaactctttgctgacccctggatcctgaagattttcttttatttttttcctaagattttatagttttattttttcatttaagttacattcatttgaattaatttttatctgaaaaatactgtttttctttcactgtaggcttgtctctgtataaattcaatttgaaaatatggcaatatgtatctttgattttcaaatgaacaagctcataaatacaaaaattaaaggcataacaagaaa

SEQ ID NO: 156853 - DNA, 791 bp, Homo sapiens
  misc_feature (1)...(791): n = a,t,c or g
agttcctctgtcacatcattccacagacgttggtcctcaggtccanaatgcctcatgatactggatcggttggcaaaaagcccgatatcggcgacttcgaagtttcttctcctctttttccttcaggcctttaaaggggttcagggagttgcggtactcacgcctcttagtaaggaagtaggccacacaggctccttttagctccttatcagtgtaattgtggggactggtcaccagctcttgcttgagcttttccagaagaacattcacttctgaaattttcaaagaggacttgatgctttcagacccattcaatctcttgtcattggtgatgtggttatgcacattgtggctcagtttagagagagcaagatcccgcttgcgcctggagttcttctgcccaaattcctcctggtccctgcatggggaagcggtcagccatagagagtgtctcagctccccagtgctcccagggcctgactcttccaaggcactgtccagcgcagcagcggcattgagcatgtcctcagggcggggtggtggcagcttggttccattttctggtcctgtctctggggttgcccgctggattgccagttgtgtggctggtgagagttgcttggcataagcagggaccagaactcgctgtactgcaccctcagaggccacgtaatcatccaccagaggattgagcaggggggccgcctcgctggcagccagcgtgcaccatgggagccgcatgtccctatgagttgctgggaattccaccacgctggactagggtctcagaa

SEQ ID NO: 156854 - DNA, 1929 bp, Homo sapiens
atgtcaagaaggcctcatgtttcttggacccatcctcctcattttctcatcccaggcttctccgagatactgtttatgctgaggaataagcatattctggcttactgttcacagtggagggagtttctccccttctagataagtttttaatccccaccagtgttctgcttcccccagtagagactgtgttaagaaaagaggcaaatttgctttctcagactgcacagagcatctcattatttttgtgaagccccatggccacctatttctgagacatggggcatgggcgaaagccagagttattcttggctgtagattttattcatccttttccaccttgatttcaatgaatgagttcaagtcaggacagcaggttttgtggggttggtcaaaaagatggggagccaggtgcattctcatcccctccctcatcttcctcttcttggaaattaggattgtaaagttctggtggaaggagctgggcttcagcaggaaggcagtctgtctgagggaggcccatacacacggttgggctttggtgccatgcttaggagttagcatccagggtgggtagcagagcttctgtgagggcgctgggcccggaaacggggagggcgggccacccacacacctgggctcgttaagacttgtcctcttcatctgacatcagttcctctgtcacattcattccacagacgttgggtcctcaggttccaaaatggcctcatggatactggatcggttgggaaaaagccgatatcggcgacttcgaagtttcttctcctctttttccttcaggcctttaaaggggttcagggagttgcggtactcacgcctcttagtaaggaagtaggccacacaggctccttttagctccttatcagtgtaattgtggggactggtcaccagctcttgcttgagcttttccagaagaaacttcactactgaaatattccaagaggacttgatgctttcagacccattgaatctcttgtcattggtgatgtggttatgcacattgtggaccagtttagcggcattgagcatgtcctcagggcggggtggtggcagcttggttccattttctggtcctgtctctggggttgcccgctggattgccagttgtgtggctggtgagagttgcttggcataagcagggaccagaactcgctgtactgcaccctcagaggccacgtaatcatccaccagaggattgagcaggggggccgcctcgctggcagccagcgtgcaccctgggagccgcatgtccctctgagttgctgggaagcccaaaggcccaggccccactgaggctgctcccagctgccgcagctcctcaatcaccacctgcacgccgctgcccacgctgtcacactcctcttccacggcagacagagccttaaaggcttccccgggactttccttgagaggcccaggctcctcaggtggggaactatgtgcccggctttccccatcttcatcagggatggacactttcccttgcctcaggtcacccacttcctcctggagacgttttaacaactcattgttggccctggcaagacccagagcagcttcagccaaacccactgccttatcgacccgctggtagataacatgcaggagctgctctgagctctgaacagccaagccatgtccagtcactgtgatgggggtgctgggaggaggattcccaccctgggagcctgtgttgcctccattagtctcactcttacaggcgcagcagcagcatctggcctcgctgccatttcctttctcaatgaggatggtcagaggagcccaggccccaagctgtagggtccggctaccgcgcgcacgcggggagacaccgccccgtttgccttctggctcccggtgattggcggttagacgatggctggggagcagggtcacggacactattggcat

SEQ ID NO: 156855 - DNA, 926 bp, Homo sapiens
ggcttaagcagaagtgcagtggcgcaatctcagctcactgcaacctccgcctcctgggttcaagtgattcttgtgcctcagcctcccacgtagctgagattacaggcttgcaccaccatgttcagctaatttttgtatggtaaagacggagtttcaccatgttggccaggttggtctcgaactcctggcctcaagtgatcctccccctgcgctcgcttcagcctcccaaagtgctgggattacaggtgtgagccaccacgcctggccaagagcctcactcctgtctttagtgattgcactgaagcaggcctcatttttttgcagtcatgctaaaccacaagttagtcaacatttcactaattgacatttcattaggaataggtctccaaggtgaggcataacgtttggggtgttaatctgggattttcgcagttcatctttttgggggaaactgaaagtaccatctcatttgcatgaagtgactcccacactggccctgtatatggactctggtaaaatgtgagtgtggtacagaggaaataggtaagaccccccttatctagcccctctcggcagcagcgggggggtgttacaaaggactagctgttcaaatatcttttgtattgtattgattcccctaatgaataataaatatttaaagtataataactatactgtaggtgggcttatgagtgttctaaatatctaatagctaaattgaaataagtagaaatataaacaatttagcagctttctgtaatacatttacactcaaattataagcagctaattctaaaaaaagatgtcactgtaaactattgagaactatagtattttatatataattatatgttcatgaatttgaacccaaaataattttaactgaaatgctttgaataaagtatcctgtaaatataaaaaaaaaa

SEQ ID NO: 156856 - DNA, 375 bp, Homo sapiens
  misc_feature (1)...(375): n = a,t,c or g
nnnnnnnnnnnnnnnnnnnnnnnnnnnnnnnnnnnnnnnnaaggatatcagaacatattctctgcatatttaggagcaattcccgtatgatatttttttctttctgtgtaaacacatggtgtcatagtccattttgtgctactgtaacagaatatcacagcctaataacnnnnnnnnnnnnnnnnnnnnnnnnnnnnnnnnnnnnnnnnnnnnnnnnnnnnnnnnnnnnnnnnntctgggaagggcttttttgttgcatcatcacacagaggaaggtggaagggtgacagagagagcaagaaggggctgaacttacccttttataacatcaccaatcccaccctaatcacctcttaaatattccacctattaata

SEQ ID NO: 156857 - DNA, 416 bp, Homo sapiens
  misc_feature (1)...(416): n = a,t,c or g
aaactttaacatgcatatgtatgggaannnnnnnnnnnnnnnnnnnnnnnnnnnnnnnnnnnnnnnnnnnnnnnnnnnnnnaaggatatcagaacatattctctgcatatttaggagcaattaccgtatgatatttttttctttctgtgtaaacacatggtgtcatagtccattttgtgctactgtaacagaatatcccagactaataacnnnnnnnnnnnnnnnnnnnnnnnnnnnnnnnnnnnnnnnnnnnnnnnnnnnnnnnnnnnnnnnnntctgggaagggcttttttgttgcatcatcacacagaggaaggtggaagggtgacagagagagcaagaaggggctgaacttacccttttataacatcaccaatcccaccctaatcaccttttaaatattccacctattaata

SEQ ID NO: 156858 - DNA, 429 bp, Homo sapiens
  misc_feature (1)...(429): n = a,t,c or g
nnnnnnnnnnnnnnnnnnnnnnnnnnnnnaaggatatcagaacatattctctgcatatttaggagcaattcccgtatgatatttttttctttctgtgtaaacacatggtgtcatagtccattttgtgctactgtaacagaatatcacagactaataacnnnnnnnnnnnnnnnnnnnnnnnnnnnnnnnnnnnnnnnnnnnnnnnnnnnnnnnnnnnnnnnnntctgggaagggcttttttgttgcatcatcactcagaggaaggtggaagggtgacagagagagcaagaaggggctgaacttacccttttatatcatcatccatcccaccataatctcctcatagaatgtcctcctaaaattcgtacgcgatgataacgccaggcgtgggtcgacgcgggaattacggcctcaacgcaaggtatcagn

SEQ ID NO: 156859 - DNA, 412 bp, Homo sapiens
  misc_feature (1)...(412): n = a,t,c or g
cttaacatgcatatgtatgggaannnnnnnnnnnnnnnnnnnnnnnnnnnnnnnnnnnnnnnnnnnnnnnnnnnnnnaaggatatcagaacatattctctgcatatttaggagcaattaccgtatgatatttttttctttctgtgtaaacacatggtgtcatagtccattttgtgctcctgtaacagaatatcacagactaataacnnnnnnnnnnnnnnnnnnnnnnnnnnnnnnnnnnnnnnnnnnnnnnnnnnnnnnnnnnnnnnnnntctgggaagggcttttttgttgcatcatcacacagaggaaggtggaagggtgacagagagagcaagaaggggctgaacttacccttttataacatcaccaatcccaccctaatcacctcttaaatattccacctattaata

SEQ ID NO: 156860 - DNA, 2967 bp, Homo sapiens
  misc_feature (1)...(2967): n = a,t,c or g
ttttttttttttttttttagacagagtctctctgtcgctcaggctggagtgcagtggtgtgatctctgctcactgtaatctccacctcccaccttgagcactcctctcgcctcagcctcccaggtagccgggaccacaggcgcacaccactgaacagggataattttttttgtttttgtagagacagtgttttgccatgttgcccaggctggtctcgaactcctgggctcaagtgatccacctgcttcagcctcacaaagtgctgggattacagccactgtgcccagcctattatagctctttataaaacaaaaacaacaaaaaaaccgaacatattgattcatgactccctacctttgcattcacatgattcctttgcctggaatgtcccccttcttctacctgcttgggaattcctagctatatctactaaaattctattcagatgtctttttccaggaagcttttcttaacctaactcacgccattaagttattcgctttatttttctaggttatcttctatttgtttctactgttgtactcatcattctgtaaggtattggggctctgtagaatttctgttacaaaattactttttggtttgataatatttacctacattgagcaatcccataagaaacaggcctgtgaaactctctattgggtttcctaaaacaatattgttgagagattatttaattacctagctttctttttatagggacttgccagagaaatatatttctggtcttatcatattagttactcttcagatttgttttagaaaatagtcaccattaacaccttttagaattggttggtggaaagtttccaatcaaaattgtggtccacctctagcaagctgtaaaattttatgatctccaattagcctcagtttaaactctagtcaggcatttagcttcacaaaaactgaagtcagggatagtcagttttcccatattagtagagagctgggaagtgctgatgtgcacaacctgcagcctgaaatagttgctttttctaaataacagtaaaactgttgctctctgaggatggataggtggatgctatttgttgtttgcaaagcttagggaaccctgtggttgagattttttccaatacatgcattttttttccctttgcaaagggactttggataattgttaattttcccaagaatataattataattcttttattgtttaaatagagttaatagtttatctacagtttcactttctgcagtttcagttatccatggcttgaaaatattaagatattttgaaagaaagaggaagaaaaagaggcgtcagtcacataacttttattacagcacatcgttacgtttctatttcattattagttattgttcatatcttactctgcctaacttataaactttaacatgcatatgtatgggaaaaaaaacatagtatatataaggtttggtactatctgcagtttcaggcatccactaaggatatcagaacatattctctgcatatttaggagcaattaccgtatgatatttttttctttctgtgtaaacacatggtgtcataagtccattttgtgctactgtaaacagaatatcacagactaataacaaataacagaaatttattggcttatagttctgtaggctgagaagtccaaaatcaagatgctggcatctggggaagggctttttggtgccatcatcaccaccnggggaaggtggaagggtgaccagagagagcaagaaggggctgaacttaccccttttataaccatcacccaatccccaccctaatcacctcttaaatattccacctattaatactgttatcatggcaattacatttcaacatggagttttgcaggggagaaacattcaaatcatagcacatgggttaggtgagaaatgaagagtgaggtatacaagagcatccagaaccatactatatacattccagctgttttggtgtagaagcagcacaaatgtagaagctgcattgtttcttgataaaagggccctggaaagatgaccagctatacagtttccactagaggaaatgcagattggcttgtatgactttagagtatgaaatataaagatctggagtctgttccatgttttttccaggcctggtgtgcttattttatggaataccaaaggaaaggagcctccctttgaaagaagcatctaaattagggatgggctcctcatttggaggatgttagaaactacgaatcaatgtctctcatgttcaatggagctcccatttttatcggtttcatgagactattattaatttatttgaatccaagatgagtctcaaatatacccagaagaaaaaaaattaagaaatgaaaccaagactcctaatgctttgaatgttcgtaacattcgagaaaaatttgagcctgggctatataatcaaagtctaggatttgtgaacctaacagggttccactgtcacctgttttcaagagagtgctgagaaaaattccaatctataccttaaacaattaggttaaatgatttaaagaaattagccttcagaggactgaatttttaatgatttttctacttggaaaatgtgacttctaaataaaaaaagtgcttgcttattataaaaccttggttcaaaggtaaatactatgttctgacaagtgtaaaataagtacaagcacatgtgaaaataactgttaacaggcaaatgcttaagaagtgttcttgttttctaaaataaacatttcctgttcctaaagtttttggatcagaaaatggaaaaatataactctagttaatggggatatgcaatttgactgtagaccaataattaattgtcataaagactttaaaaatccttctagattaataatgtgtagaggagtcttagaggattactcagtaaaataaattcaaggtaacaatattaatctaagtttctttaatattcttgatctgggtaaacatttt

SEQ ID NO: 156861 - DNA, 1106 bp, Homo sapiens
ttgataaagactgctcacgagcctttttattatatggctcatattctagagctcctgccctaggaggaactgcaagaacattgttgggattgctaaatgaggcaaaactagaatttcattctgttgtacttctggaacctggaaataagcatgcagtaactgaactctccaaaattaaaaaggaattaattgagaaaggacactgggatgatgtctttcttgattccacacaaagaccaaatgggggaaaacccattgataatccaccgcatcctggatcatctaatccactcaggaaggttattattgaagaaactggtaatttgatacagactattgatgtgccagatagcactactgctgctgctccagagaataatcctattaatctagcagatgtaatagcagccacaggcaccacaagtaagaagaattcaagccaagatgacctttttcccacaagtgatactccaagagcaaaagtattgaaaatagaagaagtcagtgatacttcatccctgcagaaagaaaagccattactcatctttgaaatcttacaaagactttctgaactaaaaaggtttgatatggcagtgatgtttatgtcagaaacagagaaaaagaatcgctatggctcagagcaagagtttgtcgatgacttgaagaacatgtggtttgggctctattcaagaggcaatgaagagggggactcgagtggctttgaacatgtcttctcaggtgaggtaaaaaaaggcaaggttactggcttccataactggatccgcttctacctggaggagaaggagggtctggttgactattacagtcacatctacgatgggccttgggattcttaccccgatgtgctggcaatgcagttcaactgggacggctactataaggaagtgggctctgctttcatcggcagcagccctgagtttgagtttgcactctactccctgtgcttcatcgccaggccaggcaaagtgtgccagttaagcctgggaggatatcccttagctgtccggacatatacctgggacaagtccacctatgggaatggcaagaagtacatcgccacagcctacatagtgtcttccacctaa

SEQ ID NO: 156862 - DNA, 936 bp, Homo sapiens
cgatggatagcagcagatgccgctaatgcccttcttccagctaacagagctatggcctatctgaagattcagaaatatgaagaagctgaaaaagactgcacacaagccattttattagatggctcatattctaaagcttttgccagaagaggaactgcaagaacatttttgggaaagctaaatgaggcaaaacaagattttgaaactgttttacttctggaacctggaaataagcaagcagtaactgaactctccaaaattaaaaaggaattaattgagaaaggacactgggatgatgtctttcttgattccacacaaagacaaaatgtggtaaaacccattgataatccaccgcatcctggatcaactaaaccactcaagaaggttattattgaagaaactggtaatttgatacagactaatgatgtgccagatagcactactgctgctgctccagagaataatcctattaatctagcaaatgtaatagcagccacaggcaccacaagtaagaagaattcaagccaagatgacctttttcccacaagtgatactccaagagcaaaagtattgaaaatagaagaagtcagtgatacttcatccctgcaacctcaagccagtttgaagcaggatgtatgtcagtcttacagcgagaaaatgcccatagagatagaacaaaaacctgctcagtttgccacaactgttcttcctccaattcctgcaaactcgttccagctcgaatctgatttcagacaattgaaaagttctccagatatgttgtatcagtatttaaagtggttgctgagccactgtcaggataacacaagagcacagcggctggagaaggcaggctggcagctggcatttcttcggtattactaccacctactggatgttcagaaaataacagtatgcatgtggcagaaagcattctga

SEQ ID NO: 156863 - DNA, 615 bp, Homo sapiens
cttcctccaattcctgcagactcgttccagctcgaatctgatttcagacaattgaaaagatctccagatatgttgtatcacgattgaaagcagattgaaccatctttgtatcctaagttgtttcagaaaaatctggatccagatgtattcaaccagatcgttaaaattctgcatgacttttaccattgaggaaagaaaagcccattactcatctttgaaatcttacaaagactttctgaactaaaaaggtttgatatggcagtgatgtttatgtcagaaacagagaaaaagattgcacgtggcattatttaatcacatagacaagtcaggattgaaggatagttctgtcgaagaactcaagaaaagatacgggggttgatttccatttttgctggaaataattgttttttgactttcatatgtaaatttttttctactggaaagtgttttgctttttaaggaaaatgaaattatatagccagggaaaggactatctttggaacataagttaattaactataaggtgaattgtgatttaactagtgagaattgaattccacgtgaactctgtttttctgaaaataaaaatataaacaatgagaaaaaaaaaaaaaa

SEQ ID NO: 156864 - DNA, 939 bp, Homo sapiens; identical to SEQ ID NO: 126917

SEQ ID NO: 156865 - DNA, 1026 bp, Homo sapiens; identical to SEQ ID NO: 126918

SEQ ID NO: 156866 - DNA, 744 bp, Homo sapiens; identical to SEQ ID NO: 153574

SEQ ID NO: 156867 - DNA, 2986 bp, Homo sapiens
agctgtagtgggagtgttccaggattcgccttgtatatttaaagttggagttcgttgctaaagatggcagacccagatgtcctcactgaagttccagcagcattgaagcggttagccaagtatgtgatccggggattttatggcattgagcatgccttggccttggacatcttgatcaggaactcctgtgtgaaagaggaggatatgctggagctgctcaagtttgatcggaagcaacttcgatcagttttgaataatttaaagggagacaagtttatcaaatgcagaatgagggtagagactgctgcagacgggaaaaccactcgccataactactacttcatcaattatcgtactcttgttaatgtggtaaaatataaactggaccacatgagaagaagaattgagaccgatgagagagattcgaccaaccgggcttccttcaaatgtcctgtctgtagtagtactttcacagacttagaagctaatcagctctttgatcctatgacaggaactttccgctgtactttttgccatacagaggtagaagaggatgaatcagcaatgcccaaaaaagatgcacgcacacttttggcaaggtttaatgaacaaattgagcccatttatgcattgcttcgggagacagaggatgtgaacttggcctatgaaatacttgagccagaacccacagaaatcccagccctgaaacagagcaaggaccatgcagcaactactgctggagctgctagcctagcaggtgggcaccaccgggaagcatgggccaccaaaggtccttcctatgaagacttatacactcagaatgttgtcattaacatggatgaccaagaagatcttcatcgagcctcactggaagggaaatctgccaaagagaggcctatttggttgagagaaagcactgtccaaggggcatatggttctgaagatatgaaagaagggggcatagatatggacgcatttcaggagcgtgaggaaggccatgctgggcctgatgacaacgaagaggtcatgcgagcactgctcattcacgagaaaaagacttcctctgccatggctggttcagtgggggcagctgctccagtgaccgctgccaatggcagtgactcagaaagcgagaccagtgagtcagatgatgattctccaccccgtccggcagctgtggctgtgcataaacgagaagaggatgaagaggaagatgacgagtttgaagaagtagcagatgaccccattgtcatggtggctggccgtccgttctcctacagtgaagtgagccaacggccagagctagtggcccagatgacaccagaagaaaaggaagcatatatagcaatgggacaacgcatgtttgaggacctctttgagtgagctttccctaattctttctcctttctctaatgctcagttcaaaaaggaatgtctcatctttgaagaaaagtatttaagtggctttctgcccctcttgatgtaagcaactgtccatccttgtgcaaagattgatggtagagagtttgacgttttatgccagaaactttcccagcaaggtagggtgctgagaatcctacccttccttgctgtcactacagtattaatattttactgtattttcttttctttttttttttttttttggagatgaagtctcactcttgtaccccaggctggagtgcaatggcgtgatctcggctcactgcaacctctgcctcctgggttcaagcgattctcctgcctcagcctcccgagtagctgggattacaggtgcctgccaccatgcctggctaattttttgtatttttagtagagacagggtttcaccgtgttagccaggatggtctcgatctcctgacctcatgatctgcccgcctcggcctcccaaagtgctgtattttcttatctgatttttttcttgccttattaagacataattttctcccttctgaaatgagtgagggaagttcataaggtaaatccttcccatccatctgtttactacaataggttacaataattcactgatcacatccattttatctgttctagccaggcattccaaacaatttcttatactgctgcccaccaaagcagcttgccaacagtcaaatcactgattgggggaaaaaatcctgaaattttgcttagaatttgagcatttcctcaaaattgagatggatcaatatgtaaggggaggtgggagcgtgtgtggaagggggagagatatacttgagtcttatgattaatgtctaaaccagaatttgtgtctttagaactgaccagactggtagattttattgtattgcttaatgtcttttggtttggatttaggatgatagaaaacagaagtataattggtaaacccttaggaagaaattagaaaaacatggacgtaagacaaaaagtctcaaaaaagggtatgaagagtgacaagcattggaaacagagccttagaactgtgtcagttagactgatttggaaatcctttatgtaaagctgagactggtcctggtttagttccctttgggtacagacctcttgtcagtgctataaattgtttaatgaggccattccagcagaaatcaacagaataattgattactcttctctctctctgtcactctccctctttctaaacatcattgaaggctgtctctcttttaatttttgtcagacacagtattttagggtgcatccagatataccattgaacattgtaacctcaggaaaaagtttattttgggttctgatatgtagcatggtattttccctaaggcagaactttaaaaataaagaactttcacacaagggtctgtaacaattgtatatcttacaatatttttccttgcattgtaatttttaagtatttatcattttatagtacacatgtaaagaatatatgagccttgtatggagtgatgtttcatttacctgggttgtgttaatgactgaatgttgacaataaatctgttttatactg

SEQ ID NO: 156868 - DNA, 392 bp, Homo sapiens
ttttggaggccagttcgacgacaatctgagtacaaacaggtgaacaagggacaagactccacatttccaatctaatgcctccagaccaacacagactacaggttccgcgtatgtgcgtgacggcgctgtctagacacctctcaggagctaagcggagcctttagcccctctgcgggttttgtattacaacgaagtgaggtcatgcttacaggggacatggggagcttacatgattccaaaatgaacagcatgatgcctactgatgaacagattgcagccatcattgcgcttggctttgcaactttagccattttatttggctttatataacagacttgctgtatgagggaacccaccaaccttcagggatgatttaaggctcacatcttaaa

SEQ ID NO: 156869 - DNA, 773 bp, Homo sapiens
tttttttttcatttttttctttttacttgaaaacttgttttaaccatcaaattttggcagttacaaacctgtacactgttgtgtttttttttgttgttgttgtttcttttttttggctgtctttttttttgtttgcttttgtttttttttttccttttcttttctttttttttagaaaaagaacacaagactgaatactgccaccagcaatatatgcaggaacaatccatttccttaagggacaaaatccactctaagtgttagctttcccctttgcataaggtttggtgtgtgatgtgtgtgcaagttgaggtgaatgtgcatgtatatgaagaaatggcatacctcattgtgattctgaaattgcataaaaataaaatacttaataactgggcaaaacacattcttttttacaaatgtcaataaagacaatttttcttgaaaacagagaaagttaaatgaaaacagtaagaaccaaagaaaggttacagtacattttgaaatgagtaaaaaacatcattttcaaatctaaaatccttgtgtgtgtgtgtgtgtgtgtgtgtgtgtgtgtgtgtgtagttacctcaaaagtttgcagaccaacagcgtggatgacttacaattatattcgaccccccaaattaaagcatcctgataggcatcaaatatagtatctacaaaagcctggaaaattgaaaccatttatatacaattttataaacatttcaaacaccaaaacatacatcttttacaaaccagcctgtttgcaacag

SEQ ID NO: 156870 - DNA, 448 bp, Homo sapiens
  misc_feature (1)...(448): n = a,t,c or g
cccccaaggttttttccggaatttttttattccggcccccccaaacccccttttttcaaaaccccggtatttttgggggtaaaacccggggtcnnnnnnnnnnctccctaccaaaaaaaaccaaccaattttgggccaaaaatgggggccctttaaagaatccccctttttgaaaccccaatttgggttttcccaataaagggtttccataaaaaaaaaccccccgttttaaattagcccccaacccgaaaaccccctccggataaaattttnnnnnnnnnnnnnnnngatgattgtatttctagattagcaagaaattagttacttctggctgatttctatttctagctaattaaaacaatctttgccatagcttactctattcaaataaaccggacgcgtgggtcgacccggcacttcnnnccngttcgcatgggagtctatcaan

SEQ ID NO: 156871 - DNA, 438 bp, Homo sapiens
  misc_feature (1)...(438): n = a,t,c or g
ctttttttaacaaaaaacctcccccttttggccgggggtggccatttttggttcccgcaaccttgcgcttctaaggttaaaaaatttttccccccccaccccccccggaagttagattcccgggggnnnnnnnnnnnnnnggggtaatttttttaattttttaattttggaagggcgggggttttttattttgggccgggtgggttttaacccccaacccccaatgtttnnnnnnnnnnnacccccccaaagggttgggtttcagggcttagcccccccgccccactaaaaaagggggannnnnnnnnnnnnnnnnnnnnnnnnnnnnnnnnnnnnnnnnnnnnnnnnnnnnnnnnnnnnnnnnnnnnnnnnnnnnnnnnnnnnnnnnnnnnnnnnnnnnnnnnnnnnnnnnnnnnnnnnnnnnnnnnnnnnnnnnnn

SEQ ID NO: 156872 - DNA, 254 bp, Homo sapiens; identical to SEQ ID NO: 148751

SEQ ID NO: 156873 - DNA, 2302 bp, Homo sapiens
ttttttttttgagtcagggtctcgctctgtcacccaggctggagtgcagtgacacagtctcggctcactgcaacctctgcctcccaggttcaagtgattctcctgcctcagcctcccgagtagctgggattacacgcatgtgccaacacgcccagctaatttttgtatttttagtggagacggggtttcatcatgttggccaggctggtctcgaactcccaacctcaggtgatctgcccaccttgggatttgcctcccaaagtgttgggattataggcgtgagccagtacgcccagcctaacaaattctaaaagagctgtaacactgacagtctcttcatggtcccagttatttccaaaagggcacgttctgctctggttccttctggtggggttagcaacaggggcagatcccactagaatacagctctcaaaatctactgcacatgggacttaacccaaagtgcttttacaaaaatccctgatcccgggccacattccagatccacttaacatttggaacctcaggttccaaactcagggcatcagcattttaaaaacattcctcaggtgactcccaacatgcagctgatttgccagccagccctctgcagtctgggatcaaaggttcttcaacatgaggtccctggaaccaggcgggtgcttttgcttaaggaactggggaacttgtgggaaaggcagcgtctcagaccccaccccagatctactgaatcagaaactctgggggtggggccagcactttgtttcaacaagccctccaggagattcttaaggcactagtctggtccagtgggtctcaaacttgacttgcaacaaatggcccagagatctttttgaagtgtagagtctgactcagcaggtgtgggtggagctgagaggccagcaagatcccaggtggggccgaggctgctcatcctcctaccacattttgagtagcaaggagctaccaagagcagccgacggggtttcattctcgtctactggaagcaaccttaatagacaactgaaaaacaaaacaaaacaactgagatacctgtttctgccagaaaacccaggccattcactggtcagctgttccaaaaccagagttaagctactgcagctgttcccgcgtgcctgcctgcattccagtaaataatcccacgtggcaagtcagctcacctggttactgccaaagcatgttcccagctggtgtgactcagaggcacaccagaatttctttattataatttggcgatagggtcttgctttgccacgcaggctggagtgccgtggtccgatcacagttcactacagccttgaactcctgggctcaagtgatcttcctgccttagactcccaagtagctgagattattaggcacacgccaccacaacccagcttaatttaaaaatattttttgtagggaccaggtctcactatgttgcctggtttggtatcaaactcctggccttaagggatcctcctgcctcggcctcccaaagtgccgggattataggtgtgagccatcatgcccagccagagcaccagaaatagctcccaactgtagaagggagcctcccttgtaagcgctgttggctcccaaccatcctgtggagtctccaacagcagtccctcccccaaccatgaggcccagagaggcttaacagctttgctgtcacccaacagaaatgctttaagtactgaccactgctggagggaaaggctaccgctaacacttgggatgttttctgacagcctctgaaacttctacgaactgctgaggcataggatcctctcctaaaatttctcccagatcttaacgtcagggctgtctggccctttcatgagtatgtgggttatagtctctggcaggcacttgtgaagagtgtgactgattgacacttttttgcccttgggttggctgggaaagctcagatctccccctctgcatgtccccttgccttaggacctccccatggtgtacttggagttgggacctcaccctggctctcccttatctttccggctgccattttttcccctttctaactttctttccccatacaacttatttgaaatattatctcacggtaacgaaataaagtgtctgtcacctcctgctgtgttgtcatcttgcatgagctatctaaggtctctgttcttcagtttctgcatctgtaaaacgatgacaatgacagagccaacctcgctttgaggatcacatgagttaataaaggcctggcacacagttagcactcaataaatgttagttatgatttttaaaaaaaaaaaaaaaaaaa

SEQ ID NO: 156874 - DNA, 1177 bp, Homo sapiens
atggttttttaccctagatgttcccaccttcagtgctccacgccctccatagaccttcagagaaggtgaaaccaggttatctgggaatctttccagcccgcaggtcgccacggccatccctttgctcccagcctggctccatcagcctccagcttcctttcttcattctgtccttcagggaaggcagaagaaacattggaaagcatctagtccagtgggaagccaggggttggagaaggtgctacatccctcttcccatcaatatcctaaatgttttgggagggcccagagaatggcacccaagagcctgcggggatgcccatcccacacaccccacccagctgttctaaccctgctatccacagccctggaggaactggggctcctggaaggagggaggaggctctccactgtccaccctaacacataccctcccacccaccttccagacccccttggttggcacccctctccctccggttccctttcacccccatggctgtgaatgaccaggacaggtcacacgtgtgttttccattgggtttaatttaatggacgtgcaattttcatttgtaaaattgtggcattagccacctccttcagtggccaggatgtgagtggctacctggctcaactggaggggaccccttgggccctctggggcttcccctcccccacctggttggggtagagcaaaaggatggtcactcttccgyggtctccctgaaatgaatgtatttctcccccccaaaaggggctgatatttaatgttttaataaaggatttttggagaaacaaataaccttaatttataatctgggtgatcccaatcattttttactcccttttgatgccatacatagaggaaagtctagcttttttggcgtgagacttttgcaatgtgcagtgggataaaatgcatttccgttttctggttcgtttttcttgttaacacgcgcacacagacacacacacacaccgttccactcaccacctggacaggcgtcccccagcacggacacgactggcacacaggtgcccacatctcttcctctcagcccctccacctgcctaatgttatgcaacctccttctgatgtatccaccaaaccagtactgaatgtggccgagacgttttcagtaaatcttattacctaccgtaaaaaaaaaaaaaaaaa

SEQ ID NO: 156875 - DNA, 520 bp, Homo sapiens
gaaatttgtttttttcaaatatgtttcctttttgaacttacagaattgttgaaattttctactaacagccagctaaaatttggtatatgttagctctatctgtttcacttggacgtttcattttgaaagaaagaaattttatgtttcacatatagttttatacaaagtagccagtcccataatgaaatgcttgtattgccatagtggtcacacccaagtggtccagtatctcaatggtgaggcagccagactgggtcaagggctgctttgttgaaatgtaataattttcatatgccttctttctctttctctctctctttttttttccttttttggcccaatgttgaagatgtagaactttgtttttaaataatgtttttataatttcattcgtaaacctaagtttgtattttttgtgactttggacttcaacagtttgtatattgggacttctaatgtgattactgtactaaataaattccactaataaacatcttacattaaccccttaaaaaaaaaa

SEQ ID NO: 156876 - DNA, 806 bp, Homo sapiens
aaaaagtcgaagaccctagtccagtgtggaggaactcgattttttggaagtttgtaattacattcaaagtatactttttttgtttgtttgttttccttgagacagagtctctctctgtcgtccaggctggagtgcagtggcacagtctcggctcgctgcaacctctgcctcctgggttcaagcaattctcctgcctcagcctactgagtagctgagattacaggtgcacaccaccacgtccggctgacttttgtatttttggtagggacggggtttcaccatattggtcagggtagtcttgaactcctgacctcatgctctgcccagcttggcttcccaaagtgctgtgattacaggcttaagccacagcgcccgacccaaagtgttcttttttccttgaaaagaagtacagattttttaaaaagctaatattgctgtgattcaactctcaagttacttgatgctatttcttcatttctattgtattcacatgtgaaagcatgtgatcagttgtcacggcatcaaagataggagagtttctttttttttaggtgggcattatttatgaccttttctttggaagagtaaggacattaaaatgtaacatgcatgatgaaaatctaagtggagatgatatttgtggttaattatgatattgagtggtgcatgaggtaggtgtttagagtaatattcttttgcattatagtaagaacatttaagttttgttaaaattaaaaaattagtagtacgttattttactatttgtacttttatgtaataaaatgcagtacatttttaaattttca

SEQ ID NO: 156877 - DNA, 1443 bp, Homo sapiens
ttttttttttaaatagggcctcactctgttgctcaggctggagtgcggtggtgtgatctcggctcatgtagcctcaacctccccggctcaagtgatcctcctgcctcagcctcccaagtagctgggactacaggcgttcactactacacccagctaatttttaagttttttatagagatgagggctccctaaggtggcccagggttggtctcgaactcctggactcaaagtatcctcccgcctcggcctcccaaagtgttgggattataggagtgagccaccacaccggccaagatgcttttcaaactgatacagatgacaatgggagcctcataaagatggcttttgtttcttcccttcaaggtcatttacttgtacgagacagaaaaagatagcattggggacatgggatgggggagggagggcaatagtggaacgaactttccatgggaaactttcccttttgtaagttgagggccaggggtagggatattttttagtttgtgattttacatttatctgtacatactttttccaagattgatccatttttataaccatggttttcctgaaatcctcaattcatcaatatgaaggaaatgaacccacataggactttatgccaataaataacagtgcaagtgaggtataactcctaactgatgttccacaaaacatttttgatttcaggtttgtatgatgtagtttttaatcgtacattttccatatgcttcaaactaacacattttttaaagctttcccccacttttctctctatttgtattgttaggccatcttggaggtgatggttggttttaacataaaattgtaccggttggaattggggcttacgggtgtaaacactgatgggtatatcagtatctgagaccccaaactcttccaaatactgatggtgcattttaattcttgaagtgaaatctgtgcaataaaattaccagactgtctgcaaaactggccttgcaatcttctgttgtatccagaggtatcattattgatttaaaaaaaatctcattaatctctactggtaatttatagggaatctgatcagtgattcaagaacatagtaattctgcattgccttgaataattaaaaagttatattttattcacggtattgcagtggtaatttgtggtcatgaaagcataacctcagtgctctctaggtttcttaagtggggtgactttatggcatctttaatcatcgatcaatgggcagcaatcagaaacaaagttctcagcattatgcagttaatgtccttcatctacttctaacacttagtaaaggaattgattggctaggtataaaaagagaattaacgaaacctattttattggatctttaagtaataatatctaaatacatttcgttcaaacatacatatgtagctgtttggacattttggacaaagacacattgagttg

SEQ ID NO: 156878 - DNA, 378 bp, Homo sapiens
cttggacaccccattgggggctgctcctgccgcttttttcctgccaagcctgaatcaatgtttgatctacaaccctatgccagttcgtcccctcaaagcttggcggctaaagactggtatcctgactgagccacgggtgaagggagaagctcttggagcaggcatgatgcccaccggtgtttcaactgcctcctcgcccagctaccctttggccccattggggcctcgattgcctcttcaggattgtatgcatcaagccttgtcctgagcccctttgtctgacgctctgtgtatcgctctttgaatcgagtttggaagaaaagttgaattaaatgagtggcggcatgatggtagggccggacttactggttcaagttt

SEQ ID NO: 156879 - DNA, 447 bp, Homo sapiens
  misc_feature (1)...(447): n = a,t,c or g
agcctcctccagccttctntagcctcctccagccttctccggctttctttagcccagccttctgtggccttctctaaccttctgtagtccagccttctccagccttctccagccttctatagccttctccagctttctctagccttctctagcccagccttctctggccttccttctctggccttctctaaccttctctaaccttctctaaccttctgtagtccagccttctcccatcaacagaagaaacgcctgcaggacagagacaggaactgcagctcttccctgtagggggcgctgctgatgcttactttccctttaaatgtttcaaaattctctccagtgaatgtttgaaatgaaactttgttttcatacaattaaagagatgaatttaaaaagacaaaaaaggaatgtacacaccnctgttcagttcctgactgtgccacc

SEQ ID NO: 156880 - DNA, 430 bp, Homo sapiens
cctcagtcttctgagtagctaggactacagatgagcaccatcacaactggctaatttttcaatttttttgtagagatggggtcttgctgtgttgcccaggctggtctcggactcctggcctcaaatgatcctcctacctccagttcccgacgtgctagaattaaaggcataaggcaccacttctaggcaaaaatattatttattaaatattatttaaaactcttcatgcacgggtaaaaagatccattcaaagtgcaaggtaaacaaacaggttttaatgtaaccaaaatatgaaaggttcactgatgtgctttcagatttcacactgcaactaacttgagaaagtatcctgtgtcaaattttactgtagtatcaaagaagaatatccacagttgcctggaaggtcctttaaaatgcatcgtccttcttt

SEQ ID NO: 156881 - DNA, 251 bp, Homo sapiens
  misc_feature (1)...(251): n = a,t,c or g
ttgagaagaagatggctgacttccacaaggaggagatggatgatcaagataaggacaaagctaagggaagaaaggaaactttgattcttgaaagagaaaacaaaagcatgtgaataaactttgaagtgttcacctcagtttgggaccaaactgcttggttctttgtaaaaaccggttttgtatgtcaaggagattttcccacaggaaagtnttccttttccattactcgagaggcacaggtcaatgtccgg

SEQ ID NO: 156882 - DNA, 4480 bp, Homo sapiens
ggcacgagcgaggttcgggctggttgttccgttgcgagctgcagctgcgatctctgtggtaggcccagaagtgtatgctgacttgtaaagtgaagaagccagtggtgctgcgggtgttcttttggggtagtgtctgggatccagtacgagttgaatcattgttcaaataaggtgtaattgaaaagtgatcctctcttcagagatgtcaaaaacaaacaaatccaagtctggatctcgctcttctcgctcaagatctgcatcaagatctcgttctcgttcattttcgaagtctcggtcccgaagccgatctctctctcgttcaaggaagcgcaggctgagttctaggtctcgttccagatcatattctccagctcataacagagaaagaaaccacccaagagtatatcagaatcgggatttccgaggtcacaacagaggctatagaaggccctattatttccgtgggcgtaacagaggcttttatccatggggccaatataaccgaggaggctatggaaactaccgctcaaattggcagaattaccggcaagcatacagtcctcgtcgaggccgttcaagatcccggtccccaaagagaaggtccccttcaccaaggtccaggagccattctagaaactctgataagtcgtcttctgaccggtcaaggcgctcctcatcctcccgttcttcctccaaccatagccgagttgaatcttctaagcgcaagtctgcaaaggagaaaaagtcctcttctaaggatagccggccatctcaggctgccggggataaccagggagatgaggtcaaggagcagacattctctggaggcacctctcaagatacaaaagcatctgagagctcgaagccatggccagatgccacctacggcactggttctgcatcacgggcctcagcagtttctgagctgagtcctcgggagcgaagcccagctctcaaaagccccctccagtctgtggtggtgaggcggcggtcaccccgtcctagccccgtgccaaaacctagtcctccactttccagcacatcccagatgggctcaactctgccgagtggtgccgggtatcagtctgggacacaccaaggtcagttcgaccatggttctgggtccctgagtccatccaaaaagagccctgtgggtaagagtccaccatccactggctccacatatggctcatctcagaaggaggagagtgctgcttcaggaggagcagcctatacaaagaggtatctagaagagcagaagacagagaatggaaaagataaggaacagaaacaaacaaataccgataaagaaaaaataaaagagaaagggagcttctctgacacaggcttgggtgatggaaaaatgaaatctgattcttttgctcccaaaactgattctgagaagccttttcggggcagtcagtctcccaaaaggtataagctccgagatgactttgagaagaagatggctgacttccacaaggaggagatggatgatcaagataaggacaaagctaagggaagaaaggaatctgagtttgatgatgaacccaaatttatgtctaaagtcataggtgcaaacaaaaaccaggaggaggagaagtcaggcaaatgggagggcctggtatatgcacctccagggaaggaaaagcagagaaaaacagaggagctggaggaggagtctttcccagagagatccaaaaaggaagatcggggcaagagaagcgaaggtgggcacaggggctttgtgcctgagaagaatttccgagtgactgcttataaagcagtccaggagaaaagctcatcacctcccccaagaaagacctctgagagccgagacaagctgggagcgaaaggagattttcccacaggaaagtcttccttttccattactcgagaggcacaggtcaatgtccggatggactcttttgatgaggacctcgcacgacccagtggcttattggctcaggaacgcaagctttgccgagatctagtccatagcaacaaaaaggaacaggagtttcgttccattttccagcacatacaatcagctcagtctcagcgtagcccctcagaactgtttgcccaacatatagtgaccattgttcaccatgttaaagagcatcactttgggtcctcaggaatgacattacatgaacgctttactaaatacctaaagagaggaactgagcaggaggcagccaaaaacaagaaaagcccagagatacacaggagaatagacatttcccccagtacattcagaaaacatggtttggctcatgatgaaatgaaaagtccccgggaacctggctacaaggctgagggaaaatacaaagatgatcctgttgatctccgccttgatattgaacgtcgtaaaaaacataaggagagagatcttaaacgaggtaaatcgagagaatcagtggattcccgagactccagtcactcaagggaaaggtcagctgaaaaaacagagaaaactcataaaggatcaaagaaacagaagaagcatcggagagcaagagacaggtccagatcctcctcctcttcctcccagtcatctcactcctacaaagcagaagagtacactgaagagacagaggaaagagaggagagcaccacgggctttgacaaatcaagactggggaccaaagactttgtgggtccaagtgaaagaggaggtggcagagctcgaggaacctttcagtttcgagccagaggaagaggctggggcagaggcaactactctgggaacaataacaacaacagcaacaacgattttcaaaaaagaaaccgggaagaggagtgggacccagagtacacacccaaaagcaagaagtattacttgcatgatgaccgtgaaggcgaaggcagtgacaagtgggtgagccggggccggggccgaggagcctttcctcggggtcggggccggttcatgttccggaaatcaagtaccagccccaagtgggcccatgacaagttcagtggggaggaaggggagattgaagacgacgagagtgggacagagaaccgagaagagaaggacaatatacagcccacaaccgagtaggggccacccttgacgggattcctgcccaggggagagaggcgctgggaagatggctggtgaggagcttaacagaggaacctcaagaagattctgaaaatcctacccccaccccccaccagccgcacagattgtactaccgcgagaggcatccctggcgctgtctcccactggacagaggaggctggccatggggcccaggggtcaggcccagcttttgagcagaatacaacgcattgggctttagctgtttttctcatttgttggtgtgtggggtgggggcaggggtagggcgggagagcgatgcttggatttttgtttcctattagaaaccaacagttttgttctaatttcatttcatttggagctaagatgactaatttgatgattttcgatctcttttcccctgtcctgattttaaaagccccctccttttttttttttttttttctttttttaggcatatgtagtaatattagaaacatttaatttggggaaactttgattcttgaaagagaaaacaaaagcatgtgaataaactttgaagtgttcacctcagtttgggaccaaactgcttggatctttgtaaaaacccggttttcgtatgtcaaggaggagtttaaggcctttccgaccaccttgtgttaccattctgatgttgccgccatgtatcacgtggatgttgctccttaccacacctcacgtgcccatgagcacatatttcctgatttcttctggggctggacttccccgtttctccaccagcagctccagtatcccaaacttttctagtcctgctgatcctcccaggcaacggggtgggaaaactgggaggggcagtgtctgggtttgtttttcttaaggaaacttatggaattttatttatcttttaacaaatatggagaaaaattttttcaatattttttattaatctttttataaaatgaaaaggaaactcctatgaatcgattaaggaagggtggttatggcttgggtggttcaggggttttttttgggtttctttttttttttctttgtctttttaaccttaagctgtttaaagttgaagcattcctcagatgtttggggggaaacatccctcttaaaatgggtccttgtgcttgccttctggggaggcggtccctaaccagttgaatcataagggcatttatgcagatgttataggcggactgcacccacctctccccgcccagcgctttgcccacttgggttgttgtgcctggctttccccttactttgctacatttctatagttaagttgggttttacttgaatggattcatggtttagggggggaaaatgaaaatctcccttaaaaatttgttttcaactcctcctgcaaataaaataaatgaagtggcagatgtaaaaaaaaaaaaaaaaaaaaaaatt

SEQ ID NO: 156883 - DNA, 370 bp, Homo sapiens
  misc_feature (1)...(370): n = a,t,c or g
ttccccctccccccaagtaaattttataaagggccccaaacccccccctcccnnnnnnnnnnttttccaatccacccacttgggggccaggtccccaaccacccccctcgaaattttcaaagtttgccaggttcccttttctccctccccccttcccgtttaagaaggaaccccccnnnnnnnnnnttttttttccaacaaaagaggggactgttatttaaaaaaacccccctttttccggttttcaatccccagatagtattaaataaggccgggttgaaccccctgggggaaccaaacggggaannnnnnnnnnnnnnnnnnnngagttggagnnnnnnnnnnnnnnnnnnnnnnnnnnnnnnnnnnn

SEQ ID NO: 156884 - DNA, 1344 bp, Homo sapiens
caggacttccgcacgagagaagagagatttaaataggcttaaaaagttaggtgacagcagcaaaaattcagactgttaatctgtcagctctaacactgatgcagatgcgactcaggaaaaaaacaatgcaacttctaaccgaaaatcttcagttggcgtaaaaaagaatagcaagagcagaacgttaacgaggcaatctatgtcaagaattccagcttcttccaactctacctcatctaagctaactcatataaataattccagggtaccaaagaaactgaagaagcctgcaaagcctttactttcaaagataaaattgagaaatcattgcaagcggctggagcacaagaatgcttcaagaaaactcgaaatgggaaacttagtactgaaagagcctaaagtagttctgtataacaaattgccccataaaaaaagataaggagccagagggaccagcccaagccgcagttgccagcgggtgcttgactagacacgcggcgagagaacacagacagaatcctgtgagaggtgctcattcgcagggggagagctcgccctgcacctacataactcggcggtcagtgaggacaagaacaaatctgaaggaggcctctgacatcaagcttgaaccaaatacgttgaatggctataaaagcagtgtgacggaaccttgccccgacagtggtgaacagctgcagccagctcctgtgctgcaggaggaagaactggctcatgagactgcacaaaaaggggaggcaaagtgtcataagagtgactcaggcatcgtccaaacgaagtcacgacaaggaaaacttgcgaaacagtttgcaaaacgtacaggaacctaactccagggccggagtttcctggaaaagacgacgcggtaccagatttgatgggtccccattctgaccagggtgagcacagtggcactgtgggcgtgcctgtgagctacacagactgtgctccttcaccccgtcggttgttcagttgtgacatcagatagctttcaaaacaaaagacagctttagaactgcaaaaagtaaaaagaagaggcgaatcacaaggtatgatgcacagttaatcctagaaaataactctgggattcccaaattgactcttcgtaggcgtcatgatagcagcagcaaaacaaatggaccaagagaatgattggaatgaactcttcccaaataagcatcaagtttaagccaaagaccatgacaacgataacaatctctatgtagcaaagcttaataatggatttaactcaggatcaggcagtagttctacaaaattaaaaatccagctaaaacggggatgaggaaaatagggggtcttatacag

SEQ ID NO: 156885 - DNA, 413 bp, Homo sapiens
  misc_feature (1)...(413): n = a,t,c or g
ctaggagaatgggtaggcctttgtaaaattgacagagaggggaaaccccgtaaagtggttggttgcagttgtgtagtagttaaggactatggcaaggagtctcaggccaaggatgtcattgaagagtatttcaaatgcaagaaatgaagaaataaatctttggctcacnnnnnnnnnnnnnnnnnnnnggggggcccgtttaaaagaacccttggggggcccaaattttacccggcattgcaaggcataacttttttccttatggggggccattttaaaccttacttgggaattttggaaaagaacctttttttttggggggggacaaattgggacaacctccctccaaaatttaaaggttctagggaaaataaaaaattttaaggggaaaagggggtaaacctaccgccttt

SEQ ID NO: 156886 - DNA, 485 bp, Homo sapiens
cgccgagtcgcgcggaggcggaggcttgggtgcgttcaagattcagcttcacccgtaacccaccgccatggccgaggaaggcattgctgctggaggtgtaatggacgttaatactgctttacaagaggttctgaagactgccctcatccacgatggcctagcacgtggaattcgcgaagctgccaaagccttagacaagtacgtgtatcagtctcaatactgtgggttcttgcaaccggaacaaaactgccacccaagggaagaaggcatggagttcatggtgttagcgcaaaagttctgaatggcatccgtcctaccggaaacctaggaaaaggcgccaagcccatctttgtgtgcttgcatccaactgtgatgagcctatgtatgtcaagttggtggaggccctttgtgctgaacaccaaatcaacctaattaaggttgatgacaacaagaaactaggagaatgggtaggccttttgtaaatt

SEQ ID NO: 156887 - DNA, 532 bp, Homo sapiens
gttttggccagaagttttaaaaatgacttacaccaattcagtgtgtcagggacagaggttttactgaagaccagttgtaggttaattgaagatgtatatgctccctagcaggttcttcagactcaagcaattttgtacgcatttatgtgttcagtggattggctgcttatgtttcgcaagtgttagtgcaaagataaccctcctaaaatgcaagaatgatggatttggatctgagttttagctccattttcattgtaatttgaatttcaggcgccaagcccatctttgtgtgcttgcatccaactgtgatgagcctatgtatgtcaagttggtggaggccctttgtgctgaacaccaaatcaacctaattaaggtaaggctgctaaggattgtgttgggactaatgttcagtgatgcttgtatatgggggtaaattctgtgaagtctcaagctgttcattttgtgcaggtgtaaacattacgtgcacctgatactgtcggccattttaaagatgattgtaggtagaagcatt

SEQ ID NO: 156888 - DNA, 552 bp, Homo sapiens
  misc_feature (1)...(552): n = a,t,c or g
cggacgcgtggggtcgcgcggaggcggaggcttggttgcgttcaatattcagcttcacccgtaacccaccgccatggtcgaggaaggcattgctgctggaggtgtaatggacgttaatactgctttacaagaggtgtctgaagactgccctcatccacgatggcctagcacgtggaattcgcgaagctgccaaagccttagacaagcgccaagcccatctttgtgtgcttgcattcaactgtgatgagcctatgtatgtcaagttggtggaggccctttgtgctgaacaccaaatcaacctaattaaggttgatgacaacaagaaactaggagaatgggtaggcctttgtaaaattgacagagaggggaaaccccgtaaagtggttggttgcagttgtgtagtagttaaggactatggcaaggagtctcaggccaaggatgtcattgaagagtatttcaaatgcaagaaatgaagaaataaatctttggttcacnnnnnnnnnnnnnnnnnnnnngggggggctctttaaaggaacccaattatactaccct

SEQ ID NO: 156889 - DNA, 688 bp, Homo sapiens
gggtgaagctgtggccagctcagccacgtgacaccttgtacttgcttccctccttgcctgcctcgcttccattttccttccctctgttggccttgggcagtgtgacctcgtagggtctcagaaaacaataccccgaaatgaaggcctccctcggaagcaaacatttctctctgaccttctcctgccctcctgtctctggttcccttattctcccccaaggctagctataaaaactacaatccctcttcaccaaaagcctgccctaaaacctaaaaatattactctaactttcctctttctttctgtgtaaaattgggccatagggaaattatttggacctttgtctggattgtagggtcaggaaggacccccattccagagagagtcctgcgccatatgaggaaggaaggaatgctgcgcaaagaggccgaaaagaatcttgacagacaggcctcgctgggttccccactcagtctatcagcattagatcaggctcttttgtccacccgtatttttacccggccatccatactttgttgaactgaagcctaaaaatggccagtttttcctgtatctttgggtgttcattttgaaggttcttgtatctcataaaaccatggtcaaataaatttgtgtatttgtttgccttttttcctaaaaaaaaaaaaaaaaaaaaaaaaaaaaaaaa

SEQ ID NO: 156890 - DNA, 541 bp, Homo sapiens
  misc_feature (1)...(541): n = a,t,c or g
ttttttttttttttgacatagggtcttgctttttcgcctaggctggagtgcagtggcatgatcatggctcactgcagccccaacctccagggctcaagtgacatgatattcccaccacagcgtcctgagtagctgggactacaggtgcgcaccaccatgcctagctaattttttgactttctgtaaagatggggtcctcccctttggttgccccaggctggtccatgaagtcctggactcaagcgaatccttccctgcttcagcctccccaaagtgcctgggattacaggtgtgagccaccatgccttgtgagaaatacttttgagtatgtttgaaacaacttggggcatggtgatcctactttttccaaacataagttttataaaatcaagcatacccttgctttattgggactttgactttattatgccctcacagatattgcagggttttttttttttaaaggaattaaagggttttgggccacctctgagtngggagccaagtgtttcagcaccattttttccaaccagcatgtgct

SEQ ID NO: 156891 - DNA, 918 bp, Homo sapiens
ggttctaggtatttggagagtccctggcgggtcagggaaaatggagaagagggagagtgagaaacaaatcttgccaagacccattggatgcatctgggaaagaggcaagagcccaggcgaggctccctctgcactgcccatgccttggagtaacccacctccaggaacttgcacaccctcctgccccacatacaggtgcacacctctcccccgatgaactgatgccccttctagacacacccatttagctcctaggaatggtgagactatatttgcatgatgtggccactacacacatcaccagagactgtggtccaggttcgaagagtgaagcctgggtaactggcagggagacacgcgcacatctcccacctagagcagccagaatgggacatcaccccacaggctttagggcgctgggaagagaagggtgatctgggaggaggcacgaggagaccagaaggcagaaggagggttaggatgatggagtcagcaacataggctggccatcccctcagcccctcattgttcttgatagcagtgcatccaggagctcgaggtggggttggggcttgggccgctctgcaggaagtgtggatggatgcatctctgctttccatctcagtgtaaggaggacagctggcttcctcggtgccctcagcccctgttctgtgtgggtctgaggacttgggccctctgaggtccttctgtgtctggggtgggctctgtggctcacctgattctctccacaccccgctgtgaaatgagtgctgttctcttctgccctacatccccaagagtccctggagcgatctactgcccatcttctccaaaaacacacaaggagagccctgccccagtccaagctgcaattctgcaagagctttccggggcctggggcacctcgacccgggagat

SEQ ID NO: 156892 - DNA, 534 bp, Homo sapiens
  misc_feature (1)...(534): n = a,t,c or g
atgtggggttggaaagaaaagattaaaataaacacatttgtatactgttggtgggaatttaaattggtgcaaaatttttggagtacaacttggcaacatattttaaaattttaaatgtcctttgatgcactactaggaatttatcctaaatatatacttacaaatgtaacctaagatggacagtattgtaaaaattgaaaataacctgagtattcatcaattttatcattaaataaagttatttattgctaccgnnnnnnnnnnnnnnnnnnnnnnnnnnnnnntnnnnnnnnnnnnnnnnnnnnnnnnncaataaaatataaaaaactacaaaaaagaaggataaaacaaaaaaatccctcccctttgggacgccccaggcggggggattacaacgccccaaaatnnnnnnnnnnnnnnnnnnnnnnnnnnnnnnnnnnnnnnnnnnnnnngcgcctctttttttccaagaagagggggcgttcccctttaaagcgagctaattgtgaagctgggcgtgcgggctgtaaaaac

SEQ ID NO: 156893 - DNA, 402 bp, Homo sapiens
cccttcagtcgccatcatgattatctaccgggacctcatcagccatggtcagtaggacagaaggtaacattgatgactcgctcattggtggaaatgcctccgctgaaggccccgagggcgaaggtaccgaaagcacagtaatcactggtgtcgatattgtcatgaaccatcacctgcaggaaacaagtttcacaaaagaagcctacaagaagtacatcaaagattacatgaaatcaatcaaagggaaacttgaagaacagagaccagaaagagtaaaaccttttatgacaggggctgcagaacaaatcaagcacatccttgctaatttcaaaaactaccagttctttattggtgaaaacatgaatccagatggcatggttgctctattggactaccgtgagg

SEQ ID NO: 156894 - DNA, 411 bp, Homo sapiens; identical to SEQ ID NO: 156726

SEQ ID NO: 156895 - DNA, 748 bp, Homo sapiens
ccgagcgccgctccggctgcaccgcgctcgctccgagtttcaggctcgtgctaagctagcgccgtcgtcgtctcccttcagtcgccatcatgattatctaccgggacctcatcagccacgatgagatgttctccgacatctacaagatccgggagatcgcggacgggttgtgcctggaggtggaggggaagatggtcagtaggacagaaggtaacattgatgactcgctcattggtggaaatgcctccgctgaaggccccgagggcgaaggtaccgaaagcacagtaatcactggtgtcgatattgtcatgaacacatgacctgcaggaaacatgtttcacaaaagaagcctacaagaagtacatcaaagattacatgaaatcaatcaaagggaaacttgaagaacagagaccagaaagagttaagcctttttatgacaggggctgcagaacaaatcaagcacatccttgctaatttcaaaaactaccagttctttattggtgaaaacatgaatccagatggcatggttgctctattggactaccgtgaggatggtgtgaccccatatatgattttctttaaggatggtttagaaatggaaaaatgtgtaagtacaaggaagtgggttaaaataaataatgtaaaaaagacattttagatgtgatttgcaattgttttgtgacactgagaatgagttttacagcgttctgaaacatggttttagttttctctttggggatcaagagaa

SEQ ID NO: 156896 - DNA, 552 bp, Homo sapiens; identical to SEQ ID NO: 125911

SEQ ID NO: 156897 - DNA, 507 bp, Homo sapiens
ctagttaagctggcggatgagctgattgatgcgttcaccccgatagccaggtgtgcccatctccttgaggaagcccactctagttttggtagcatgacgggccactgagaagtggaaagggcgcaagaaccatgagctctcctggaaatgcttcccactaaaaattttctttaggcgaagtcttgcaatggttctctgcaccagtaaactcaggccatcggtcctttcgatgcgtacaacaaaggccagggaatgtttgtctggcagttccaatgcatgaggtttcacttctagtcgtctgagacacagcttgtcacgtttctgccgccaggaatcatgtaggaatgattccagtcgcttaaacctgagcccttttcctttcctctgctccttctttgccaaaaatgcctgctttgcctgggtggctttgcgggcttgataagccttcctctttttcaggagattttctggaaccaaagggatttttctttgctcttgctccaccat

SEQ ID NO: 156898 - DNA, 654 bp, Homo sapiens; identical to SEQ ID NO: 141921

SEQ ID NO: 156899 - DNA, 906 bp, Homo sapiens; identical to SEQ ID NO: 122328

SEQ ID NO: 156900 - DNA, 1642 bp, Homo sapiens
tttccgagatggagtctcgctctgtcgcccagctggagtgcactggtgaatcttggctcactgcaatctctgcctcctgggtgacaaagcaagactctggctcaggaagaaaaaacaacaacaacaaaacttcaagtgctttttttgtaaggtgttctgcactgaagattacatttaaaaaaccttattagtggttacatatgccctaacaatatctataaatctgtatatttaatagtcttttagcttcccatataaaataatgttttacgtgtgccacatttctattattaaaagtgatatctaaatatataggcacacagttgacatctgccttgtattttctaaattcttggagatctagagcatacctgaattataatactaatcattagattgattgattgatttgagatttatttatttatttatttacttgcgatgaggtcttcgtcttgtcccctaggctggagtgcactggtgcaatcttggctcactgcaatctctgcctcctgggttcaagcgattttcctgccttagcctctcgagtagctgggactacaggcacgcgccaccacacccagctcatttttgtatttttagtagagatgcagtttctccgtgctggtcaggctgatctcaaactcccgacctcaggtgatccacccgcctcggcctccccaaagtgctgggattacagccgtgagccaccgcgccccggccagcaatacagtttttcagttactcgaacatctttaagccctataactcttaggctatgcatagccccatgtcctaatcaggcattcactgatcccagcaggtctccatctatttgtaccagcctcctctattcctcccaatctcaaggttactcttaaatactagtaaatgcaaaaagaacttgtaaagtggcaaggcatggcctatcaaaagtcagcccaaggggcagttttcagccctgcctcacctgggtctagttcagctgacggatgagctgattgatgcgttcaccccgatagccaggtgtgcccatctccttgaggaagcccactcttatttttggtagcatgatgggccagccatcaatcctttcgatgcgtacaacaaaggccaaggaatgtttatctggcaattccaaggcatgaggtttcacttctagtcgtctgagacgcaccttgtcacgtttctgccgccaggaatcatgtaggaatgattccagtcgcttaaacctgagcccttttcctttcttctgtcttgctctgccatctttatggcaactcaagagtccacactccatccctgagtcactgggagaggcaacacaggcttcatcacgataggagagtaatcccatttcctgctttggggcgactttgctcttaacatgcagaggagccagaggcgggagccggtagcgatttgaggaatcatttaacctgtctgcctccactttctgcatccataaaatggggatataacttaaagaaacctgggtgcaggtctcacgtacacggaatactaccttcccaacagtatcctggcatgccgtagacatggtaactgcttgctgaactcgcatgaacccaggccgatcaccagcaaacatgctttctccaggttgttctccttgttgcaccat

SEQ ID NO: 156901 - DNA, 2800 bp, Homo sapiens
atgtttggccgctcgcggagctgggtgggcgggggccatggcaagacttcccgcaacatccactccttggaccacctcaagtatctgtaccacgttttgaccaaaaacaccacagtcacagaacagaaccggaacctgctagtggagaccatccgttccatcactgagatcctgatctggggagatcaaaatgacagctctgtatttgacttcttcctggagaagaatatgtttgttttcttcttgaacatcttgcggcaaaagtcgggccgttacgtgtgcgttcagctgctgcagaccttgaacatcctctttgagaacatcagtcacgagacctcactttattatttgctctcaaataactacgtaaattctatcatcgttcataaatttgacttttctgatgaggagattatggcctattatatatcgttcctgaaaacactttcgttaaaactcaacaaccacactgtccatttcttttataatgagcacaccaatgactttgccctgtacacagaagccatcaagtttttcaaccaccctgaaagcatggttagaattgctgtaagaaccataactttgaatgtctataaagtggataaccaggccatgctgcactacatccgagataaaactgctgttccttacttctccaatttggtctggttcattgggagccatgtgatcgaactcgatgactgcgtgcagactgatgaggagcatcggaatcggggtaaactgagtgatctggtggcagagcacctagaccacctgcactatctcaatgacatcctgatcatcaactgtgagttcctcaacgatgtgctcactgaccacctgctcaacaggctcttcctgcccctctacgtgtactcactggagaaccaggacaaggtcttcttaattatacatcatgcaccgctggtgaactcgttagctgaagtcattctgaatggtgatctgtctgagatgtacgctaagactgaacaggatattcagagaagttctgtcttacccactctaagctccttatggcagggatctcacctgtcactgaatcagctgcagtctgggctgcacaaatgctcatctcacttatgcggagcccaggctgcagctgattcagtgacaggtgagatccctgccataaggagcttagagtggctaatcagtgctggttccaaggcgcgcacattcttcttcctgaaaatgctaataggcttctgggagaaggttgattgtgaatatcaaaggcgtcaagtgctgagcacgcggctgcaagaggccttgccgtcaaatcgcctcactgatgttgcagctgtgcattcttcatgcatgttgggctttggttccacagctccacgcggctcctggattggcgatccagcggctgtgcatctgcccctacctggggagctggccgagcaccttgggtccaagggtaccaccactgtcaccaagcaccagccccaggccaagcccagcattcggtgcttcattaaacccaccgagacactcgagcggtcccttgagatgaacaagcacaagggcaagaggcgggtgcaaaagagacccaactacaaaaacgttggggaagaagaagatgaggagaaagggcccaccgaggatgcccaagaagacgccgagaaggctaaaggtacagagggtggttcaaaaggcatcaagacgagtggggagagtgaagagatcgagatggtgatcatggagcgtagcaagctctcagagctggccgccagcacctccgtgcaggagcagaacaccacggacgaggagaaaagcgccgccgccacctgctctgagagcacgcaatggagcagacccttcctggatatggtgtaccacgcgctggacagcccggatgatgattaccatgccctgttcgtgctctgcctcctctatgccatgtctcataataaagaaaatctcctgaaaaagaggaaggcttatcaggcactcaaagccacccaggcaaagcaggaacttttggcaaagaaggagcagaagaaaggaaaagggctcaggtttaagctactggaatcattcctacatgattactggcagcagaaacctgacaaggtgcatctcagacgactagaagtgaaacctcatgccgtggaattgccagataaacattccttggcctttgttgtacgcatcgaaaggattgatggcgtgagtttactggtgcagagaaccattgcaagactttgcctaaagaaaatttttagtggtgtctttgtaaaagtcaccccccagaatctacaaatgctgcgtatagtggaaacttatgtgacctggggatttccaaatctgaagtctgtccgagaactcattttgaaacgtggacaagccaaggtcaagagtaagaccatccctctgacagacaacacagtgattgaggagcacctggggaagtttggcatcatttgcttggaagacctcattcatgaaattgcattcccagggaagcatttccaggagatctcatggttcttgcgccctttccactttctcagtggcctgtcacgctaccaaaaatagagtgggcttcctcaaggagataggcacacctggctatcggggtgaacgcatcaatcagctcatccgccagctgaactagacccaggtgccaaactgcggtaaattttttatcagtgaagtggaagcatgtgttttgttgttttgggaatttttatcaagtgtcttcagagaagattatttcctgctctgtcttcaaaaactggaaaggaagggtcaaagaaaagacagtagctgg

SEQ ID NO: 156902 - DNA, 372 bp, Homo sapiens
  misc_feature (1)...(372): n = a,t,c or g
gcctgcagtagttgcttccacgcaggactagagcatgtcagggttcggggctcctgtcatagcggagtggctgcggcccgcaggtcagaggcacccgacctcttctgctaacccccttccctgcctgtcccgtccactcctttctctccatcacctgcccctgccatgaaccaggccaccagtgaccccacccacacctgtccgaccaggctccccacgtgccctaatgcagccccgtaggctgggcccacggctgacaccccttcctgagggatccccgacctgccagccgttgtccttaagacgccacagcatcttgacctccccgtctgcagcctctgtgggcctccactgggacccactgagacatgn

SEQ ID NO: 156903 - DNA, 884 bp, Homo sapiens
tggagacaaggtcttactctgtcacccaggctggagcagaatggcatgatcaccgctcactgtagccttgacctccagggctcaggtaatcatctcacttcagccttccaagtaattgggactacagatgtgtgccaccacactcggctaattttttggtaatttttgtagagatagtgtttcaccatgttgcccaggctggtctcgaactcctgggctcaagcgatctgcccacctaggcctcccaaagtactgggattacaggcgtgaaccactgcccggctgagaaggaggttcttccgcgagagaaggctatgcagaggggaggatctcaggcctgaagggtctagaagcccactggaaggtcttccagacacttgggacatctagctcctgaagagtagaaagaggagctgctgccgaagaggtaagacacgagagaggggcacaggatgtggacgtccgcccctctgtcctcaagggagtttctttggaagagagaagagaatgaaggctgggctcagaaggaagttcctcccactccgtggaagctcaaactagtccagtggtggcagctgccctggctggaataaagcatcgacccacagtggcctcacatctctgaggcctttgcaggttaaagagtctcctgccatgataacccaccacagtggaaacccgttgttgggccagcgtgttctcagggactgggacacgggccaaatactacagccaccaaggccatagcctgtgctctctctgagccgagggaagaacaccctctccggccctgtagttccatttttgtttctttgtttcatttcctctgctgtcttctccagagctctgcgctgcagctgagagactggatatctcctagaaat

SEQ ID NO: 156904 - DNA, 298 bp, Homo sapiens
cggtggaattccaataatgaggaatgaatgaaagagggaacatcactaaagaaataaaaaagataatatgggaatactatgaataactgggcaccagccagttagacaccctagactaaacaaattcccagaaagatacaaactaccagaaccaactcacaaagtatagaaaatatggattagaacctataacaagtgattatatcagtaactttaaacgtctcccaaagaaaagcccaggcctagatggtttcactggtgaattcatttaacaaactgaccctagccaggcagtgca

SEQ ID NO: 156905 - DNA, 4120 bp, Homo sapiens
gttcggggagcccacttccgagcagacggggacagctgctgggaaaactattgctcaaaccacagcccccgtgtcctggaagccccaggattcttcggaacagccacaggagaagctctgcaagaatccatgtgcgatgtttgctgctggagagatcaaaacgccgacaggggagggccttcttgactcacccagcaaaaccatgtctattaaagaaagattggcactgttgaagaaaagcggggaggaagattggagaaacagactcagcaggaggcaggagggcggcaaggcgccggccagcagcctgcacacccaggaagcagggcggtccctcatcaagaagcgggtcacagaaagtcgagagagccaaatgacgattgaggagaggaagcagctcatcactgtgagagaggaggcctggaagacgagaggcagaggagcggccaacgactcgacccagttcactgtggctggcaggatggtgaagaaaggtttggcgtcacctactgccataaccccagtagcctcagccatttgcggtaaaacaagaggcaccacacccgtttccaaacccctggaagatatcgaagccagaccagatatgcagttagaatcggacctgaagctggacaggctggaaacctttctaagaaggctgaataacaaagttggcgggatgcacgaaacggtgctcactgtcaccggcaaatctgtgaaggaggtgatgaagccagatgatgatgaaacctttgccaaattttaccgcagcgtggattataatatgccaagaagtcctgtggagatggatgaggacttcgatgtcattttcgatccttatgcacccaaattgacgtcttccgtggccgagcacaagcgggcagttaggcccaagcgccgggttcaggcctccaaaaaccccctgaaaatgctggcggcaagagaagatctccttcaggaatacactgagcagagattaaacgttgccttcatggagtcaaagcggatgaaagtagaaaagatgtcttccaactccaacttctcagaagtcaccctggcgggtttagccagtaaagaaaacttcagcaacgtcagcctgcggagcgtcaacctgacggaacagaactctaacaacagcgccgtgccctacaagaggctgatgctgttgcagattaaaggaagaagacatgtgcagaccaggctggtggaacctcgagcttcggcgctcaacagtggggactgcttcctcctgctctctccccactgctgcttcctgtgggtaggagagtttgcaaacgtcatagaaaaggcgaaggcctcagaacttgcaactttaattcagacaaagagggaacttggttgtagagctacttatatccaaaccattgaagaaggaattaatacacacactcatgcagccaaagacttctggaagcttctgggtggccaaaccagttaccaatctgctggagacccaaaagaagatgaactctatgaagcagccataatagaaactaactgcatttaccgtctcatggatgacaaacttgttcctgatgacgactactgggggaaaattccgaagtgctcccttctgcaacccaaagaggtactggtgtttgattttggtagtgaagtttacgtatggcatgggaaagaagtcacattagcacaacgaaaaatagcatttcagctggcaaagcacttatggaatggaacctttgactatgagaactgtgacatcaatcccctggatcctggagaatgcaatccgcttatccccagaaaaggacaggggcggcccgactgggcgatatttgggagacttactgaacacaatgagacgattttgttcaaagagaagtttctggattggacggaactgaagagatcgaatgagaagaaccccggggaacttgcccagcacaaggaagaccccaggactgatgtcaaggcatacgatgtgacacggatggtgtccatgccccagacgacagcaggcaccatcctggacggagtgaacgtcggccgtggctatggcctggtggaaggacacgacaggaggcagtttgagatcaccagcgtttccgtggatgtctggcacatcctggaattcgactatagcaggctccccaaacaaagcatcgggcagttccatgagggggatgcctatgtggtcaagtggaagttcatggtgagcacggctgtactgcgtgcgtggagaggtgcccgtggaagggaatttgctggaagtggcctgtcactgtagcagcctgaggtccagaacttccatggtggtgcttaacgtcaacaaggccctcatctacctgtggcacggatgcaaagcccaggcccacacgaaggaggtcggaaggaccgctgcgaacaagatcaaggaacaatgtcccctggaagcaggactgcatagtagcagcaaagtcacaatacacgagtgtgatgaaggctccgagccactcggattctgggatgccttaggaaggagagacaggaaagcctacgattgcatgcttcaagatcctggaagttttaacttcgcgccccgcctgttcgtcctcagcagctcctctggggattttgcagccacggagtttgtgtaccctgcccgagccccctctgtggtcagttccatgcccttcctgcaggaagatctgtacagcgcgccccagccagcacttttccttgttgacaatcaccacgaggtgtacctctggcaaggctggtggcccatcgagaacaagatcactggttccgcccgcatccgctgggcctccgaccggaagagtgcgatggagactgtgctccagtactgcaaaggaaaaaatctcaagaaaccagcccccaagtcttaccttatccacgctggtctggagcccctgacattcaccaatatgtttcccagctgggagcacagagaggacatcgctgagatcacagagatggacacggaagtttccaatcagatcaccctcgtggaagacgtcttagccaagctctgtaaaaccatttacccgctggccgacctcctggccaggccactcccagagggggtcgatcctctgaagcttgagatctatctcaccgacgaagacttcgagtttgcactagacatgacgagggatgaatacaacgccctgcccgcctggaagcaggtgaacctgaagaaagcaaaaggcctgttctgagtggggagacgccagaggagcctcacggtcacgtccaacaacaccactgcaccagggaaatggatatatatttttggactggtgtttttcacaaagtatttttcaatcagagttttcagaacctgacattgttaaagatactgcttgtcccggagttgtgtattttgtaaatgttcaagggaactgtttggaaacttctttccaccattcaggaggttatcagaattaataaaagtatctgttatgtgcacttaagccgcagctgctatagatagcactgccttcttgttccagctaggcaatgccttttttttttttttgaagcagttctctttataaagtgttattttgatagtttgtggattctaaaatatatatatatttatataaacaccatataagtcaaatatgtatttaacaaagcaatatgtattcattcactttcaagatttgttttggtgtcaaaataacatgaaaaggtagatggagttgcttctgttgaattagctctgccaccaatatgtatcttcatacacgtttggaaatgtttcctgcagcattaggtatgacttgttctgagtactgcttccggtgctaaaatgaacaaagaatttgtacttaatggcatggactctggagaatctatgcgaatcaacctttctaccttaatatctccccaaaaatgtatagtgccttgtttttatgtacagtttatatacagaaaagtttgctctgcatttttgatgatggtttggaacattatctacaattttactctcaaatagtcaaaataaaaacatctcaatttctaataccggttgtaaacaaacagtacacatgtcattttgtgatataggactcccaaataaaagtatcagaataaacacaacaattaactggtaaaaaaaaaaaaaaaa

SEQ ID NO: 156906 - DNA, 6719 bp, Homo sapiens
tcggcgggaagcggcgatcctgccaccgggaggtgtggaagagccgggtagattctggctacattggagattggttgctttctaaaactgaaggagaagcccatgaagagatggtggattctcactgagttttgactagcggaagaaaagagagagttcaagtggatggccttgaggacttgaaaagctgagatatgatgattttgaagtcatttcacatcgaagccatgatttaaatatcggcgttaagatttcaacaagaaaaacttaagcttccttggattcccacgtcaaaggaaagtttcaagctttcagaaggagttctcactcgaagataaagaacagctcgctaaccacgaaagaggaatcgatgctcagcttttagttgcacttcctaaagttgcagaattaagacaaatctttgaaccaaagaagaaagaattcttagaaatgaaaagaaaagaaagaattgccaggcgcctggaagggattgaaaatgacactcagcccatcctcttgcagagctgcacaggattggtgactcaccgcctgctggaggaagacacccctcgatacatgagagccagcgaccctgccagcccccacatcggccgatcaaatgaagaggaggaaacttctgattcttctctagaaaagcaaactcgatccaaatactgcacagaaacctccggtgtccacggtgactcaccctatggttcgggtaccatggacacccacagtctggagtccaaagccgaaagaattgcaaggtacaaagcagaaagaaggcgacagctggcagagaagtatgggctgactctggatcccgaggccgactccgagtatttatcccgctataccaagtccaggaaggagcctgatgctgtcgagaagcggggaggaaaaagtgacaaacaggaagagtcaagcagagatgcgagttctctgtaccccgggaccgagacgatggggctcaggacctgtgccggtgaatccaaggactatgccctccatgcgggtgacggctcttccgacccggaggtgctgctgaacatagaaaaccaaagacgaggtcaagagctgagtgccacccggcaggcccatgacctgtccccagcagccgagagttcctcgaccttctctttctctgggcgagactcctccttcactgaagtgccacggtcccccaagcacgcccacagctcctccctgcagcaggcagcctcccggagcccctcctttggtgacccacagctatcccctgaggcccgacccaggtgcacttcacattcagaaacgccaactgtcgatgatgaagaaaaggtggatgaacgagccaagctgagcgtcgccgccaagaggttgcttttcagggagatggaaaaatcttttgatgaacaaaatgttccaaagcgacgctcaagaaacacagctgtggagcagaggctacgccgtctgcaggacaggtccctcacccagcccatcaccactgaagaggtggtcatcgcagccacattgcaggcctctgctcaccaaaaggccttagccaaggaccagacaaatgagggcaaagagcttgctgagcaaggagaacctgattcctccactctaagcttggccgaaaagttggccttgtttaacaaattgtcccagccagtctcaaaagcgatttctacccggaacagaatagacacgagacagaggagaatgaacgctcgctatcaaactcagccagtcacactgggagaggtggagcaggtgcagagtggaaagctcattcctttctcacctgccgtgaacacatcagtgtctaccgtagcatccacggttgctccaatgtatgccggagatcttcgcacaaagccacctcttgaccacaatgcaagtgccactgactataagttttcttcttcaatagaaaattcggactctccagttagaagcattctgaaatcgcaagcttggcagcctttggtagagggtagcgagaacaagggaatgttgagagaatatggagagacagaaagcaagagagctttgacaggtcgagacagtgggatggagaagtatgggtcctttgaggaagcagaagcatcctaccccatcctgaacagagccagggaaggagacagccataaggaatctaaatatgctgttcccagaagaggaagcctggaacgggcgaaccctcccatcacccacctcggggatgaaccgaaggaattttccatggctaaaatgaatgcacaaggaaacttggacttgagggacaggctgccctttgaagagaaggtggaggtggagaatgttatgaaaaggaagttttcactaagagcggcagagttcggggagcccacttccgagcagacggggacagctgctgggaaaactattgctcaaaccacagcccccgtgtcctggaagccccaggattcttcggaacagccacaggagaagctctgcaagaatccatgtgcgatgtttgctgctggagagatcaaaacgccgacaggggagggccttcttgactcacccagcaaaaccatgtctattaaagaaagattggcactgttgaagaaaagcggggaggaagattggagaaacagactcagcaggaggcaggagggcggcaaggcgccggccagcagcctgcacacccaggaagcagggcggtccctcatcaagaagcgggtcacagaaagtcgagagagccaaatgacgattgaggagaggaagcagctcatcactgtgagagaggaggcctggaagacgagaggcagaggagcggccaacgactcgacccagttcactgtggctggcaggatggtgaagaaaggtttggcgtcacctactgccataaccccagtagcctcagccatttgcggtaaaacaagaggcaccacacccgtttccaaacccctggaagatatcgaagccagaccagatatgcagttagaatcggacctgaagttggacaggctggaaacctttctaagaaggctgaataacaaagttggcgggatgcacgaaacggtgctcactgtcaccggcaaatctgtgaaggaggtgatgaagccagatgatgatgaaacctttgccaaattttaccgcagcgtggattataatatgccaagaagtcctgtggagatggatgaggacttcgatgtcattttcgatccttatgcacccaaattgacgtcttccgtggccgagcacaagcgggcagttaggcccaagcgccgggttcaggcctccaaaaaccccctgaaaatgctggcggcaagagaagatctccttcaggaatacactgagcagagattaaacgttgccttcatggagtcaaagcggatgaaagtagaaaagatgtcttccaactccaacttctcagaagtcaccctggcgggtttagccagtaaagaaaacttcagcaacgtcagcctgcggagcgtcaacctgacggaacagaactctaacaacagcgccgtgccctacaagaggctgatgctgttgcagattaaaggaagaagacatgtgcagaccaggctggtggaacctcgagcttcggcgctcaacagtggggactgcttcctcctgctctctccccactgctgcttcctgtgggtaggagagtttgcaaacgtcatagaaaaggcgaaggcctcagaacttgcaactttaattcagacaaagagggaacttggttgtagagctacttatatccaaaccattgaagaaggaattaatacacacactcatgcagccaaagacttctggaagcttctgggtggccaaaccagttaccaatctgctggagacccaaaagaagatgaactctatgaagcagccataatagaaactaactgcatttaccgtctcatggatgacaaacttgttcctgatgacgactactgggggaaaattccgaagtgctcccttctgcaacccaaagaggtactggtgtttgattttggtagtgaagtttacgtatggcatgggaaagaagtcacattagcacaacgaaaaatagcatttcagctggcaaagcacttatggaatggaacctttgactatgagaactgtgacatcaatcccctggatcctggagaatgcaatccgcttatccccagaaaaggacaggggcggcccgactgggcgatatttgggagacttactgaacacaatgagacgattttgttcaaagagaagtttctggattggacggaactgaagagatcgaatgagaagaaccccggggaacttgcccagcacaaggaagaccccaggactgatgtcaaggcatacgatgtgacacggatggtgtccatgccccagacgacagcaggcaccatcctggacggagtgaacgtcggccgtggctatggcctggtggaaggacacgacaggaggcagtttgagatcaccagcgtttccgtggatgtctggcacatcctggaattcgactatagcaggctccccaaacaaagcatcgggcagttccatgagggggatgcctatgtggtcaagtggaagttcatggtgagcacggcagtgggaagtcgccagaagggagagcactcggtgagggcagccggcaaagagaagtgcgtctacttcttctggcaaggccggcactccaccgtgagtgagaagggcacgtcggcgctgatgacggtggagctggacgaggaaaggggggcccaggtccaggttctccagggaaaggagcccccctgtttcctgcagtgtttccagggggggatggtggtgcactcggggaggcgggaagaggaagaagaaaatgtgcaaagtgagtggcggctgtactgcgtgcgtggagaggtgcccgtggaagggaatttgctggaagtggcctgtcactgtagcagcctgaggtccagaacttccatggtggtgcttaacgtcaacaaggccctcatctacctgtggcacggatgcaaagcccaggcccacacgaaggaggtcggaaggaccgctgcgaacaagatcaaggaacaatgtcccctggaagcaggactgcatagtagcagcaaagtcacaatacacgagtgtgatgaaggctccgagccactcggattctgggatgccttaggaaggagagacaggaaagcctacgattgcatgcttcaagatcctggaagttttaacttcgcgccccgcctgttcatcctcagcagctcctctggggattttgcagccacagagtttgtgtaccctgcccgagccccctctgtggtcagttccatgcccttcctgcaggaagatctgtacagcgcgccccagccagcacttttccttgttgacaatcaccacgaggtgtacctctggcaaggctggtggcccatcgagaacaagatcactggttccgcccgcatccgctgggcctccgaccggaagagtgcgatggagactgtgctccagtactgcaaaggaaaaaatctcaagaaaccagcccccaagtcttaccttatccacgctggtctggagcccctgacattcaccaatatgtttcccagctgggagcacagagaggacatcgctgagatcacagagatggacacggaagtttccaatcagatcaccctcgtggaagacgtcttagccaagctctgtaaaaccatttacccgctggccgacctcctggccaggccactcccggagggggtcgatcctctgaagcttgagatctatctcaccgacgaagacttcgagtttgcactagacatgacgagggatgaatacaacgccctgcccgcctggaagcaggtgaacctgaagaaagcaaaaggcctgttctgagtggggagacgccagaggagcctcacggtcacgtccaacaacaccactgcaccagggaaatggatatatatttttggactggtgtttttcacaaagtatttttcaatcagagttttcagaacctgacattgttaaagatactgcttgtcccggagttgtgtattttgtaaatgttcaagggaactgtttggaaacttctttccaccattcaggaggttatcagaattaataaaagtatctgttatgtgcacttaagccgcagctgctatagatagcactgccttcttgttccagctaggcaatgcctttttttttttttttgaagcagttctctttataaagtgttattttgatagtttgtggattctaaaatatatatatatttatataaacaccatataagtcaaatatgtatttaacaaagcaatatgtattcattcactttcaagatttgttttggtgtcaaaataacatgaaaaggtagatggagttgcttctgttgaattagctctgccaccaatatgtatcttcatacacgtttggaaatgtttcctgcagcattaggtatgacttgttctgagtactgcttccggtgctaaaatgaacaaagaatttgtacttaatggcatggactctggagaatctatgcgaatcaacctttctaccttaatatctccccaaaaatgtatagtgccttgtttttatgtacagtttatatacagaaaagtttgctctgcatttttgatgatggtttggaacattatctacaattttactctcaaatagtcaaaataaaaacatctcaatttctaataccggttgtaaacaaacagtacacatgtcattttgtgatataggactcccaaataaaagtatcagaataaacacaacaattaactggt

SEQ ID NO: 156907 - DNA, 7587 bp, Homo sapiens
cactgctctgactgcgtcctccccaggctgaagtgtcctcaggtttcatgtggatttgcccagtaatggatggctccaccgaggccaggttggggaagttcagcctcgaggacactaggggacgaaaaacttcaaaaagaagactctttttattaatattttggcgttctttttggagaggaacttttgggatgtagcctttacctgtttcctgaatttgacatccaaaaagccttttggaaaacaccattctaaatttatcctgttctgaatcatcatcgcttctgatagatgcagttgcttgctgacatcgtgatctttgattttgtacaacgctatttgggctaacttttgggattttactttgtgcttagaatttgaaagtagtattcattggaaagagactccaagaaaatactcgaagacatcaaaagctggattcgagggtataacgtgttttgttttgttttttaaattagaaaaataaggaattgcagtgtgattttctttccccctttaacttagaggaacgaggattatacagaaatttgaaatttcaacaagaaaaacttaagcttccttggattcccacgtcaaaggaaagtttcaagctttcagaaggagttctcactcgaagataaagaacagctcgctaaccacgaaagaggaatcgatgctcagcttttagttgcacttcctaaagttgcagaattaagacaaatctttgaaccaaagaagaaagaattcttagaaatgaaaagaaaagaaagaattgccaggcgcctggaaggaattgaaaatgacactcagcccatcctcttgcagagctgcacaggattggtgactcaccgcctgctggaggaagacacccctcgatacatgagagccagcgaccctgccagcccccacatcggccgatcaaatgaagaggaggaaacttccgattcttctctagaaaagcaaactcgatccaaatactgcacagaaacctccggtgtccacggtgactcaccctatggttcgggtaccatggacacccacagtctggagtccaaagccgaaagaattgcaaggtacaaagcagaaagaaggcgacagctggcagagaagtatgggctgactctggatcccgaggccgactccgagtatttatcccgctataccaagtccaggaaggagcctgatgctgtcgagaagcggggaggaaaaagtgacaaacaggaagagtcaagcagagatgcgagttctctgtaccccgggaccgagacgatggggctcaggacctgtgccggtgaatccaaggactatgccctccatgcgggtgacggctcttccgacccggaggtgctgctgaacatagaaaaccaaagacgaggtcaagagctgagtgccacccggcaggcccatgacctgtccccagcagccgagagttcctcgaccttctctttctctgggcgagactcctccttcactgaagtgccacggtcccccaagcacgcccacagctcctccctgcagcaggcagcctcccggagcccctcctttggtgacccacagctatcccctgaggcccgacccagtacagggaaacccaaacatgagtggtttctccagaaagattccgaaggggacacaccttcacttatcaactggccttccagagttaaagttagagaaaaattggtgaaagaggaaagtgctcgaaacagccctgaactcgcctcagagtccgtaactcagaggagacaccagccagcgccagtccattacgtgtcatttcagtctgagcactcagcctttgatagggtccccagcaaggcagcaggctctacacgacagccaatccgtggctatgtccaacccgcagataccggtcacaccgccaagctggtgacgccagaaaccccagaaaatgcatctgagtgtagctgggtagcatcagccacccagaatgtccccaaacctcccagcttgacggttctagaaggtgacggaagggatagcccagttctccatatctgcgagtcaaaagcagaagaagaagaaggggaaggagaaggagaagaaaaagaagaagatgtgtgcttcactgaagctctcgagcaaagcaagaaaaccctactggctttggagggtgatgggctagtgagaagcccagaagatccctctagaaatgaggactttggtaagcctgctgtgagcacagtcaccttagagcatcagaaggaactggaaaacgtggcacaaccccctcaagctccgcaccagcccactgagaggacaggcaggagcgagatggttctctacattcaaagtgagcctgtgtcccaagacgccaaaccaactggtcacaacagggaagcctcgaaaaagcgcaaggtccgtacccgctctctgtcagatttcacaggcccccctcagctccaggccttgaagtataaggacccagcttccaggagagagctggagctgcccagctccaagaccgaagggccttatggggagatcagcatgctggacacaaaggtctctgtcgcccagctccgaagtgcgttcctggcatctgccaacgcctgcaggagacctgaactcaaatcacgggtagagaggtcggctgaaggacctggcttgcccaccggtgtggaacgggagagagggtcccggaaaccaagacgctatttttctcctggtgaaagtagaaaaacttccgagagatttagaacccaacctataacttcagcagaacgaaaggaatcggataggtgcacttcacattcagaaacgccaactgtcgatgatgaagaaaaggtggatgaacgagccaagctgagcgtcgccgccaagaggttgcttttcagggagatggaaaaatcttttgatgaacaaaatgttccaaagcgacgctcaagaaacacagctgtggagcagaggctacgccgtctgcaggacaggtccctcacccagcccatcaccactgaagaggtggtcatcgcagccactgaacctatccccgcttcgtgttctgggggcacccaccctgtaatggcgagacttcctagccccactgtagctaggagcgctgtgcagcctgccagattgcaggcctctgctcaccaaaaggccttagccaaggaccagacaaatgagggcaaagagcttgctgagcaaggagaacctgattcctccactctaagcttggccgaaaagttggccttgtttaacaaattgtcccagccagtctcaaaagcgatttctacccggaacagaatagacacgagacagaggagaatgaacgctcgctatcaaactcagccagtcacactgggagaggtggagcaggtgcagagtggaaagctcattcctttctcacctgccgtgaacacatcagtgtctaccgtagcatccacggttgctccaatgtatgccggagatcttcgcacaaagccacctcttgaccacaatgcaagtgccactgactataagttttcttcttcaatagaaaattcggactctccagttagaagcattctgaaatcgcaagcttggcagcctttggtagagggtagcgagaacaagggaatgttgagagaatatggagagacagaaagcaagagagctttgacaggtcgagacagtgggatggagaagtatgggtcctttgaggaagcagaagcatcctaccccatcctgaaccgagccagggaaggagacagccataaggaatctaaatatgctgttcccagaagaggaagcctggaacgggcgaaccctcccatcacccacctcggggatgaaccgaaggaattttccatggctaaaatgaatgcacaaggaaacttggacttgagggacaggctgccctttgaagagaaggtggaggtggagaatgttatgaaaaggaagttttcactaagagcggcagagttcggggagcccacttccgagcagacggggacagctgctgggaaaactattgctcaaaccacagcccccgtgtcctggaagccccaggattcttcggaacagccacaggagaagctctgcaagaatccatgtgcgatgtttgctgctggagagatcaaaacgccgacaggggagggccttcttgactcacccagcaaaaccatgtctattaaagaaagattggcactgttgaagaaaagcggggaggaagattggagaaacagactcagcaggaggcaggagggcggcaaggcgccggccagcagcctgcacacccaggaagcagggcggtccctcatcaagaagcgggtcacagaaagtcgagagagccaaatgacgattgaggagaggaagcagctcatcactgtgagagaggaggcctggaagacgagaggcagaggagcggccaacgactcgacccagttcactgtggctggcaggatggtgaagaaaggtttggcgtcacctactgccataaccccagtagcctcagccatttgcggtaaaacaagaggcaccacacccgtttccaaacccctggaagatatcgaagccagaccagatatgcagttagaatcggacctgaagttggacaggctggaaacctttctaagaaggctgaataacaaagttggcgggatgcacgaaacggtgctcactgtcaccggcaaatctgtgaaggaggtgatgaagccagatgatgatgaaacctttgccaaattttaccgcagcgtggattataatatgccaagaagtcctgtggagatggatgaggacttcgatgtcattttcgatccttatgcacccaaattgacgtcttccgtggccgagcacaagcgggcagttaggcccaagcgccgggttcaggcctccaaaaaccccctgaaaatgctggcggcaagagaagatctccttcaggaatacactgagcagagattaaacgttgccttcatggagtcaaagcggatgaaagtagaaaagatgtcttccaactccaacttctcagaagtcaccctggcgggtttagccagtaaagaaaacttcagcaacgtcagcctgcggagcgtcaacctgacggaacagaactctaacaacagcgccgtgccctacaagaggctgatgctgttgcagattaaaggaagaagacatgtgcagaccaggctggtggaacctcgagcttcggcgctcaacagtggggactgcttcctcctgctctctccccactgctgcttcctgtgggtaggagagtttgcaaacgtcatagaaaaggcgaaggcctcagaacttgcaactttaattcagacaaagagggaacttggttgtagagctacttatatccaaaccattgaagaaggaattaatacacacactcatgcagccaaagacttctggaagcttctgggtggccaaaccagttaccaatctgctggagacccaaaagaagatgaactctatgaagcagccataatagaaactaactgcatttaccgtctcatggatgacaaacttgttcctgatgacgactactgggggaaaattccgaagtgctcccttctgcaacccaaagaggtactggtgtttgattttggtagtgaagtttacgtatggcatgggaaagaagtcacattagcacaacgaaaaatagcatttcagctggcaaagcacttatggaatggaacctttgactatgagaactgtgacatcaatcccctggatcctggagaatgcaatccgcttatccccagaaaaggacaggggcggcccgactgggcgatatttgggagacttactgaacacaatgagacgattttgttcaaagagaagtttctggattggacggaactgaagagatcgaatgagaagaaccccggggaacttgcccagcacaaggaagaccccaggactgatgtcaaggcatacgatgtgacacggatggtgtccatgccccagacgacagcaggcaccatcctggacggagtgaacgtcggccgtggctatggcctggtggaaggacacgacaggaggcagtttgagatcaccagcgtttccgtggatgtctggcacatcctggaattcgactatagcaggctccccaaacaaagcatcgggcagttccatgagggggatgcctatgtggtcaagtggaagttcatggtgagcacggcagtgggaagtcgccagaagggagagcactcggtgagggcagccggcaaagagaagtgcgtctacttcttctggcaaggccggcactccaccgtgagtgagaagggcacgtcggcgctgatgacggtggagctggacgaggaaaggggggcccaggtccaggttctccagggaaaggagcccccctgtttcctgcagtgtttccagggggggatggtggtgcactcggggaggcgggaagaggaagaagaaaatgtgcaaagtgagtggcggctgtactgcgtgcgtggagaggtgcccgtggaagggaatttgctggaagtggcctgtcactgtagcagcctgaggtccagaacttccatggtggtgcttaacgtcaacaaggccctcatctacctgtggcacggatgcaaagcccaggcccacacgaaggaggtcggaaggaccgctgcgaacaagatcaaggaacaatgtcccctggaagcaggactgcatagtagcagcaaagtcacaatacacgagtgtgatgaaggctccgagccactcggattctgggatgccttaggaaggagagacaggaaagcctacgattgcatgcttcaagatcctggaagttttaacttcgcgccccgcctgttcatcctcagcagctcctctggggattttgcagccacagagtttgtgtaccctgcccgagccccctctgtggtcagttccatgcccttcctgcaggaagatctgtacagcgcgccccagccagcacttttccttgttgacaatcaccacgaggtgtacctctggcaaggctggtggcccatcgagaacaagatcactggttccgcccgcatccgctgggcctccgaccggaagagtgcgatggagactgtgctccagtactgcaaaggaaaaaatctcaagaaaccagcccccaagtcttaccttatccacgctggtctggagcccctgacattcaccaatatgtttcccagctgggagcacagagaggacatcgctgagatcacagagatggacacggaagtttccaatcaggatcaccctcgtggaagacgtcttagccaagctctgtaaaaccatttacccgctggccgacctcctggccaggccactcccggagggggtcgatcctctgaagcttgagatctatctcaccgacgaagacttcgagtttgcactagacatgacgagggatgaatacaacgccctgcccgcctggaagcaggtgaacctgaagaaagcaaaaggcctgttctgagtggggagacgccagaggagcctcacggtcacgtccaacaacaccactgcaccagggaaatggatatatatttttggactggtgtttttcacaaagtatttttcaatcagagttttcagaacctgacattgttaaagatactgcttgtcccggagttgtgtattttgtaaatgttcaagggaactgtt

SEQ ID NO: 156908 - DNA, 1751 bp, Homo sapiens
tttttttttttttttttgtagagatagggtctcatcatgtggcccaggctggtcttcaacctccgggctcaagcagtccttcctcctcagcctcccaaagcactgggattacaggcatgagccaccactcccggtggcagttttgctttttaaggcccatttctctgtaagagagccatgagctcacctcactgctaagcaatcgcgtgcagggcaggaacgccactgtacctgtctgcagtgaggatgtgcgctccagtgttgattgtgctctttggagatatgcggtgctaacagccccttgagtgggcacatgcattatcccttccacttcttaggcacagccctgccagtatccagaaggggccaggggctttgagctggggcaaagggaggaggacctggaggacgaggaatgaaaaagaccaactccttgacaccacttctctctgcctacaggcttctccccgttgaactgtcaaagggctggggtatcctgggtttctctgtttgcccctttgcccctggtttgatggccaagggggtttccccctgtgacactgcagtcaagagggacaacatccactaggttgggggaggagtgagctagaagtgtccgtgaaggagctcctgatggtctggccctgtccctgccctcacagcacttttccttgttgacaatcaccacgaggtgtacctctggcaaggctggtggcccatcgagaacaagatcactggttccgcccgcatccgctgggcctccgaccggaagagtgcgatggagactgtgctccagtactgcaaaggtgaggctccctctaacatgcctgcagcacggaacagatggggaagcccctcaggcatgcgcagccaggagacccccttccccttctgtgcatgtcagccagcatccatccataaagcctggcaggtggtggatgaaaacccaattttttccccccttaaaccttttgaagatgtaattaagtttttagattaagcgcattcctcagctgcccagccatgaaagaaagaactagtttttcctctcctgatattaatgaaggcctaacttgttaacccctcaaggataaaggctgtattgtggaaatgcccccaggcagattaaaaaccccgctgtactcggggttgatcatgctgagagacaagttggcctctgccctgtacattatctgcaagcactaccacgctgttggagaatggaggtctcccccaaacagtgaacggccattgccaacctttttattattcattattatttttagtattatatccaaagagaaactccccatagtaagttcatggttctttactataaacaagaaatttgtagtcttttactataaaatgaaaatgccagtaattaatatcttatttaatttttatggtttcattgacacaactagtttaatgtcactgagtatgtgcaatggattctcttcctgaaaaactctttagcaataaataacatatgaacccttccactcaatgttatagtgaatgtggatgtataagatgctgtcgttcgccgtcagtcattatgggagttaatcctgtgctaggaaatgagacggatgcctctacaggtgaattcaggaggaagaaaatgctccacccagaagctgcagacagagcctctctctcccttccaggaatacacagcgttttgttaggttcaagaagtatagactcaggttgattataggtccctatggtagtcacaggccgcc

SEQ ID NO: 156909 - DNA, 361 bp, Homo sapiens
  misc_feature (1)...(361): n = a,t,c or g
ctgggactacagatgtgagcctccgtgctaggccgatttgcaaaagnnncnnnnnnnnnnnnnnnnnnnnnnnnnagaaaaaggggtcccctttttttcccaaggttggagggcaggggggaaatttgggtttattggaacctttgcctccaaaattaaaaaaatttttttgttttaaacccccaaagaggggggattacnnnnnnnnnnnnnnnnnnnnnnnaaannnnnnnnnnnnnaaaaaaaaaggggtttcccctttttggcccgggggggtttgaacccccgcccccggggggacccccccccttccccccccaaaggggggggatttcggggttggnnnnnnnnnnnnntctcc

SEQ ID NO: 156910 - DNA, 476 bp, Homo sapiens
acgggattgagccactccactccgggccatacgtcttttctaaatgctcccaaaccactgtttaacaacatcctaaagactttctaggccatgagaggtatcatgttctggaattcgcctttttgaaaatcagtgtcttcactgttctcacacgtctactataaataaaggggagtaatttaattcctattatatgtatgtgtatgtatatgtacatatatgtgtatttttatatgtgtgtatatgtatctataggtatatatatttatgtatagcagtaattacctgtttaatgaatgaatggtgatgatttaaatgtaaagggaatgatgccagaggttatgaaaaaaagctgccttcaaaatatgaaatagagaaagaatagagaaatgcatgccaagctctaaataatttattgtaatttacttggttcttggttttctaaaatggaaataaagagataatattgaaaaaaa

SEQ ID NO: 156911 - DNA, 268 bp, Homo sapiens
  misc_feature (1)...(268): n = a,t,c or g
cctgnnnnnnnnnnnnnnnnnnnnnnnnnnnnnnnnnnnnnnnnnnnnnnnnnnnnnnnntaaacaggtgaataaagaaaaaaacctgaacctgaaaagacttgctttgacaacatcactgggaacacttacccatgcttgagcacttatgagcatgattctgactgatattatgttaaccgaacctagttatgcgcagaaagataaatacttcatcttctcactcaaatgcagggacttataaaatgagctcatgtcgacgcggccg

SEQ ID NO: 156912 - DNA, 1076 bp, Homo sapiens
ccacagctacagccacagccacggccactgtggcagccctgcaggagacacagaacaaggatataaaccagtatggccggtctgttctctctttccagatgggtcccacccaggcgtataacagccaattcatgaaccagcccgggccgcgggggcctgcctccatggggggcagcatgaaccccgcgagcatggcggctggcatgacgccctcggggatgagcggccctcccatgggcatgaaccagccccggccgcccggcatcagcccctttggcacacacgggcagcggatgccccagcagacctacccgggcccccggccccagtcccttcctattcagaacataaagaggccataccctggagaggcatttgtgcccagcagagcagggaccaaccgtgggtgtgaccagaagtttccacttggcaccatctctgccacccttcccatcatcctgactctccccctctttgcctccacggaccactacttcctgcacgcgggccattctgaccccctcttcatgacagaaacttttgtatcctccttcaaggccttgttgtcctcctggtgcgaagagctcggccgcctgctgctgctccgacatcagaagagccgccagagcgatccccctgggaaactccccatgcagccccctctcagctccatgagctccatgaaacccactctgtcgcacagaaatcagacctgcttccagcaccagaagccatgtgacctgggtctgtgtcttcccgtttcctcctctattaatgggcatgctgataagagcgccagttgcctttcccacggcactgaaacagagggagaagctggggagaaaggattaacaaaagagttagatgacatcactgattccagaagcctaaattcagtaactcttggggtcatcgggcctggctgggactcctcgctactccttagacagcctcgaaacctcctgaaccagagctctctcgagaagcaggccctctcgggggtctgcagtcacccagtcgatactcctggcccccaccttctcctggaggtgggcaagaaggagggtctggactga

SEQ ID NO: 156913 - DNA, 1436 bp, Homo sapiens
cggccgccgccggccgggccccaagcccccgagggcgccagggcgggatcgcgaccggtgcaacttctagccttgttgtcctcctggtgcgaagagctcggccgcctgctgctgctccgacatcagaagagccgccagagcgatccccctgggaaactccccatgcagccccctctcagctccatgagctccatgaaacccactctgtcgcacagtgatgggtcgttcccctatgactctgtcccttggcagcagaacaccaaccagcctcccggctccctttccgtggtcaccacggtttggggagtaaccaacacatcccagagccaggtccttgggaaccctatggccaatgccaacaaccccatgaatccaggcggcaaccccatggcgtcgggcatgaccaccagcaacccaggcctcaactccccacagtttgcggggcagcagcagcagttctcagccaaggctggccccgctcagacctacatccagcagagcatgtatggccggcccaactaccccggcagcgggggctttggggccagttaccctgggggtcctaacgcccccgcaggcatgggcatccctccgcacaccaggccgcctgctgacttcactcagcccgcggcagccgctgcagcagcggcagtggcagcagcagcagccacagctacagccacagccacggccactgtggcagccctgcaggagacacagaacaaggatataaaccagtatggaccggccccagtgctgctccctgaccttctgaaggatgggttaggggatgaggagaggggagcccccataggaatgcagaacaggagagcagaacacacacctagtgttcagttctgggccatcgacaacctgccacctgtgcaggaggtgggagagccagccttccagaccagctggaggccacagtccaagccaggtgggctagggcggccactccagggagggagcctgccggtgcccctgcagcacatgctgaggggatcacagagtcctgcaagcatcggctgtttgacctcagcgaatccactctactctctgggctttggccttgatcaacggagcagcccaacagggaatggggagctgctggtaggtttaaaggccgctgagcgcctggtcacagatgctgctccagttgtccgggtctcagtgtctgtccttccttcccagtcgtctcagcatattgggttatttctagctgtgattcatcatgtgctaaacgccgtgctgggtgccagggttgtagaagtgaagcccccaaatccgatcgtggccccaggggctcatgctgtcgctacggagcaccatggcattcccctgggtagtgtggcccaagattcgtgtctgcatccatcaagcaactgccatctaccaggccctgtgcagcctctggggatacagattggaaagag

SEQ ID NO: 156914 - DNA, 340 bp, Homo sapiens
ctgcaccactgcgatccctacgcctgaggaaatgacacgattgagaagcatgaacagacaactccagataaatgttgactgtgcactgacagaagttgacctccttcaatctagaggaaactttgatccaaaagccatgaataatttttatgacaacatataacctgggccagatgtaccacccaagccatctaaaaaaggacctacagactctgaacctaagacctcttcaggaccttgcagtaacattggctgcctcctcagctgtaagttctttcatgcatgttctaggttccagaatcctcctatctgcattcatcagtccactcttgctgcctaa

SEQ ID NO: 156915 - DNA, 409 bp, Homo sapiens
  misc_feature (1)...(409): n = a,t,c or g
cccacgcgtccgcccacgcgttcgcggacgcgtgggcggcatgcgccgaggaggaagagcgagcccgggcggcgcctttctaacgagtgggggcgcgaggcaagatgacagccttggcctcggggcagctgggccccctcatgtgccagttcggtctgcctgcataggctgtggaggccgccaacaagggcgatgtggaagcgtttgccaaagccatgcagaacatctccaagcccgagcagatatagggcgacacgaaggacaagactgactaaaaggaggacttgagcctggactgagccacgcgccgtcctccgaggaactgggcgctagcagtgcgttgcacaccctcacctcccacccactgattattagaaaagtcgtttctttgacctgcaaaaataaaagn

SEQ ID NO: 156916 - DNA, 781 bp, Homo sapiens
ctgcttccctatttgccatctggggagttcttgccagaaccgcggatgagatccagaatacccttacctcgccccagttccagcaggtagagccgggcccaggttgtcctccactgtgtgctccgggagtgggcaggggggaggaggagccctgccccaccttcaccatggccagtgcttcatgtgcctgacccgcagagctggcagctgagcagtgtggctctggggtgcagcccgggttggagctcagccctcgcctggctcttcttgcaggccctgggcatgttcagcgcagccttggcctcggggcagctgggccccctcatgtgccagttcggtctgcctgcagaggctgtggaggccgccaacaagggcggtaaagtggctgcgcctggaactccaaggccagagccaggggcagggtccattcctgtccccctggatctgcagaagtggggctgagggggtaaaggtcacagcccttctgcccttgatcccatcgctttgatccccagttttggggcaagggttagacaccaccttgtgtctttaacgtgttctagatgtggaagcgtttgccaaagccatgcagaacaacgccaagcccgagcagaaagagggcgacacgaaggacaagaaggacgaagaggaggacatgagcctggactgagccacgcgccgtcctccgaggaactgggcgcttgcagtgcgttgcacaccctcacctcccacccactgattattaataaagtcttttcttttacctgccaaaaaaaaaaaa

SEQ ID NO: 156917 - DNA, 686 bp, Homo sapiens
  misc_feature (1)...(686): n = a,t,c or g
ttacagcccgggccagcaggcgcccagcaagtggacctggcccagttgtttgacccccggaaataatggctcccattccttgccaacgcggatgtccaggagcgcctgcttccctacttgccatctggggagttcgctgccgcagaccgcggatgagatcccagaataccctgaccctcgccccaagttcccagcaggccctgggcatgttcaagcgcagcctttggcttcggggcaagttggggcccccttcatgtgccagttcggtctgcctgcagaggcttgtggaggcccgccaacaagggcgatgtggaagcgtttgccaaagccatgcagaacaacgccaaagcccgagcagaaagagggcgacacgaaggacaagaaggacgaagaggaggacatgagcctggactgagccacgcgccgtcctccgaggaactgggcgcttgcagtgcgttgcacaccctcacctcccacccactgattattaataaagtcttttcttttacctgccnnnnnnnnnnnnnggggggggccgttttaaaggatcaaattttacgtccgggggcgggcaaagaaatagtttttttatggggccaccaaaattaaattccggggccggggtttaacaacgtggggaggggaaaaacccgggggtaaccaaattaaatggctttgaaaaacat

SEQ ID NO: 156918 - DNA, 1378 bp, Homo sapiens
atcctgccaaggccccgttgcctgggcccagccagtagcctgttgctgttggcgaaaagcctgggccttggagcctcctggccgtgaaggtccagcgcccaatgcagggaaggaaggaaggctccgccgcaaactaggagcagctcccagaatttccatggaaagctggaacaacgcccgctgacggcaactttctaacagtaactttcccgacccagacaccacaaagctagcacaacgggagctcagatgcagggtaggactcggtccatgcgtcaggagccagagaaagccatcctcacactccgtggatccagggaacccacgcccagggccccccagcttgttccctcagtgcccagctcttggctatttctttcacttcattccatcgctcagacaccattaccacatacacattccacccatacccccaggtctcagcctgccctaccttcccaggctccagtccctgttcctcagcatcccccaccacatcctgagtaagctttgtccccagataacctcttcagcatgatccttaaatctccctaagcctcagtttctcccctgtggaatgggggtaagaatctctttctctgaatgcccctgtgttaggaaaataatttagaatactttggaaactggaaaagctctgttcacacctaagcaatcagggcagtggcctcggctctgccaggaactttggctttttatctggatcctctctttccaggcctctcaattaattccccaggtccttaacctttgggaaattagaaattaggaagagtgtcccacttctgacactgtgttccctcttggaacctgaccgtcaatgctagaagaacccttggaaaacatgctggcccagccctctagttttacaaaataagggagtgcacagccctgagaggttacatggcctgcccaagatcacgcagtcaatggcagagtaaagagcatagcctaggcctccccactcctctagtaatgctctttcatcttctccaacctgggctctaagccttgtccatcctgagccccatatcttaggcccaacctagtccctggaaaaacaaggaagtgggcccttaggaaatctcttttccagttcccactattcagagggccaactgctgtcttccagtctccttcagcctgtgctcctctccctccctgactgacaggcagaaggtactgtgcctctggatatccccacagtgccctgagctgcatctcttgctgactgctttaatacatcacagtgacattgtgtgtgtctctgccaccagactattgctccttgatgctctgggtcacctgcatctagcatggcatatatctagtgctcaataaatgtgtattgtacagaaaa

SEQ ID NO: 156919 - DNA, 429 bp, Homo sapiens
aatcttttttctttgttttgagacggagtcttgctgtcgcccaagctgaagtgcagtagcgcaatctcggctcgctgcaacctccgcctcctgagttcaagcgattctcctgcttcagcctcccaagtggctgggattacaggcgcccgccaccgcgcccagctaattttttgtatttttagtagagaggggtttccaccatgtggggccagggctggtctcgaactcctgacctcaggggtgatcttgcccacctcgggtcccccaaagtgctgggcatgacagggcgtgagccaccatgcctggggcctcttaatgggctaactttcttacccgagatttcttagggggaaggataggcagagacctcttccaatcaggaatgcttccttcttttggggagagcctacccgcctgggggggggttca

SEQ ID NO: 156920 - DNA, 406 bp, Homo sapiens; identical to SEQ ID NO: 149384

SEQ ID NO: 156921 - DNA, 1787 bp, Homo sapiens; identical to SEQ ID NO: 144180

SEQ ID NO: 156922 - DNA, 1553 bp, Homo sapiens; identical to SEQ ID NO: 144181

SEQ ID NO: 156923 - DNA, 1862 bp, Homo sapiens; identical to SEQ ID NO: 147222

SEQ ID NO: 156924 - DNA, 1295 bp, Homo sapiens; identical to SEQ ID NO: 144182

SEQ ID NO: 156925 - DNA, 1149 bp, Homo sapiens; identical to SEQ ID NO: 148133

SEQ ID NO: 156926 - DNA, 744 bp, Homo sapiens; identical to SEQ ID NO: 153574

SEQ ID NO: 156927 - DNA, 1624 bp, Homo sapiens; identical to SEQ ID NO: 149718

SEQ ID NO: 156928 - DNA, 2372 bp, Homo sapiens; identical to SEQ ID NO: 148135

SEQ ID NO: 156929 - DNA, 368 bp, Homo sapiens
  misc_feature (1)...(368): n = a,t,c or g
tctggatttcactgattttcttgcttaataagttttttaaaaccacgatgctgcaattttttccctctcaagcttcttgaaaatgtgtgatttacccttttttatctattactctaggcaaagctaaatatgannnnnnnnnnnnnnnagaaaaggagttggctttttttccccagggtgaaatgcagggggggaatctcggttaattgaaacccccccctctaaggtaaagggatttttcttgcctggccctcccaaggggtgggaatggcaggggggcccccccctccccaactaattttggttttttggggggaaacggggtttaccccagtgggccaggggggtttgaaactccggacctaaaa

SEQ ID NO: 156930 - DNA, 372 bp, Homo sapiens
cggacgcgtgggcgctccccttgcgaagaactggggcctcccgggaggagagagggctttgccttgaaacccgggacgccaggggcgctcccgcaagtgggggtcctccgggacttggaacgccccggctgggtggtgtccgggcgtcctttccccgcttcttcccacgccagatggacgagaagaccaagaaagcagaggaaatggccctgagcctcacccgagcagtggcgggcggggatgaacaggtggcaatgaagtgtgccatctggctggcagagcaacgggtgcccctgagtgtgcaactgaagcctgaggtctccccaacgcaggacatcagattcctcatggtgcaaaatggccattccagct

SEQ ID NO: 156931 - DNA, 2543 bp, Homo sapiens
gaattccgggcgccgggaccgctgggaccccgcactcggcgtccggcccgccgggtagccggcagtggaggtcccggatgaggcgacaatttttccggccccccctcccagtcccgccccacttccggggccgccactttcactttctcttccgccgaagccgctccccttgcgaagaactggggcctcccgggaggagagagggctttgccttgaaacccgggacgccaggggcgctcccgcaagtgggggtcctccgggacttggaacgccccggctgggtggtgtccgggcgtcctttccccgcttcttcccacctcggctggtcccgtttcctcctgcgcccagtgcggacctgtctcggcgcccgctgccctctcaccgccccacgcaggatcccggcctggtcatcgggcagtgtgatgcttcccgactgccgcggggacagcgaggcacacacagggcttgggccgcgccggaggccacacggcctggctgagttgctcctggtctcccgcctctcccaggcgacccggaggtagcatttcccaggaggcacggtcccccccagggggatgggcacagccacgccagatggacgagaagaccaagaaaggctgtgggtgagcgtggaggatgctcagatgcacaccgtcaccatctggctcacagtgcgccctgatatgacagtggcgtctctcaaggacatggtttttctggactatggcttcccaccagtcttgcagcagtgggtgattgggcagcggctggcacgagaccaggagaccctgcactcccatggggtgcggcagaatggggacagtgcctacctctatctgctgtcagcccgcaacacctccctcaaccctcaggagctgcagcgggagcggcagctgcggatgctggaagatctgggcttcaaggacctcacgctgcagccgcggggccctctggagccaggccccccaaagcccggggtcccccaggaacccggacgggggcagccagatgcagtgcctgagcccccaccggtgggctggcagtgccccgggtgcaccttcatcaacaagcccacgcggcctggctgtgagatgtgctgccgggcgcgccccgaggcctaccaggtccccgcctcataccagcccgacgaggaggagcgagcgcgcctggcgggcgaggaggaggcgctgcgtcagtaccagcagcggaagcagcagcagcaggaggggaactacctgcagcacgtccagctggaccagaggagcctggtgctgaacacggagcccgccgagtgccccgtgtgctactcggtgctggcgcccggcgaggccgtggtgctgcgtgagtgtctgcacaccttctgcagggagtgcctgcagggcaccatccgcaacagccaggaggcggaggtctcctgccccttcattgacaacacctactcgtgctcgggcaagctgctggagagggagatcaaggcgctcctgacccctgaggattaccagcgatttctagacctgggcatctccattgctgaaaaccgcagtgccttcagctaccattgcaagaccccagattgcaagggatggtgcttctttgaggatgatgtcaatgagttcacctgccctgtgtgtttccacgtcaactgcctgctctgcaaggccatccatgagcagatgaactgcaaggagtatcaggaggacctggccctgcgggctcagaacgatgtggctgcccggcagacgacagagatgctgaaggtgatgctgcagcagggcgaggccatgcgctgcccccagtgccagatcgtggtacagaagaaggacggctgcgactggatccgctgcaccgtctgccacaccgagatctgctgggtcaccaagggcccacgctggggccctgggggcccaggagacaccagcgggggctgccgctgcagggtaaatgggattccttgccacccaagctgtcagaactgccactgagctaaagatggtggggccacatgctgacccagccccacatccacattctgttagaatgtagctcagggagcttcgtggacggccttgcttgctgtagcgttgtaggggccctgcctgcactgcggttgtccacggtcacatctgccccagtgcctttgtccttcccttggggcttgccggccagacttctctcccctgcggctcccacctctgcctgaccccagccttaaacatagcccctggccagaggccttgctgggtggagcctctgtgtgactccatactcctcccaccacaacactcatctgtcaaacaccaagcactctcagcctccccgccttcagctgtcagctttctggggctaacttctctgcctttgtggttggaggcctgaggcctcttggaactcttgctaacctgttcagagccaggaaggagactgcacagttttgaaagcacagcccgtcaggtccggctctgcgtctccctctctgcagcctgtgtaagctattataattaaaatggttttcggccacgaaggccggccttcgtggcctcgag

SEQ ID NO: 156932 - DNA, 1894 bp, Homo sapiens
gcgacccggaggtagcatttcccaggaggcacggtcccccccagggggatgggcacagccacgccagatggacgagaagaccaagaaagctcctgaaaataaaccctgtgctaactggctcctgctgtactggctttcagcagaggaaatggccctgagcctcacccgagcagtggcgggcggggatgaacaggtggcaatgaagtgtgccatctggctggcagagcaacgggtgcccctgagtgtgcaactgaagcctgaggtctccccaacgcaggacatcaggctgtgggtgagcgtggaggatgctcagatgcacaccgtcaccatctggctcacagtgcgccctgatatgacagtggcgtctctcaaggacatggtttttctggactatggcttcccaccagtcttgcagcagtgggtgattgggcagcggctggcacgagaccaggagaccctgcactcccatggggtgcggcagaatggggacagtgcctacctctatctgctgtcagcccgcaacacctccctcaaccctcaggagctgcagcgggagcggcagctgcggatgctggaagatctgggcttcaaggacctcacgctgcagccgcggggccctctggagccaggccccccaaagcccggggtcccccaggaacccggacgggggcagccagatgcagtgcctgagcccccaccggtgggctggcagtgccccgggtgcaccttcatcaacaagcccacgcggcctggctgtgagatgtgctgccgggcgcgccccgaggcctaccaggtccccgcctcataccagcccgacgaggaggagcgagcgcgcctggcgggcgaggaggaggcgctgcgtcagtaccagcagaatgttttgcttctggtctggcttctcaggcattcctgcaataacgtgccttttccttcaatagggaagaacctacggcagatgagcaaggactaccaacaagtgttgctggacgtccggcggtcattgcggcggttccctcctggcatgccagaggaacagagagaagggctccaggaagaactgattgacatcatcctcctcatcttggagcgcaaccctcagctgcactactaccagggctaccatgacattgtggtcacatttctgctggtggtaggcgagaggctggcaacatccctggtagaaaaattatctacccaccacctcagggattttatggatccaacaatggacaacaccaagcatatattaaactatctgatgcccatcattgaccaggtgaatccagagctccatgacttcatgcagagtgctgaggtagggaccatctttgccctcagctggctcatcacctggtttgggcatgtcctgtctgacttcaggcacgtcgtgcggttatatgacttcttcctggcctgccacccactgatgccgatttactttgcagccgtgattgtgttgtatcgcgagcaggaagtcctggactgtgactgtgacatggcctcggtccaccacctgttgtcccagatccctcaggacttgccctatgagacactgatcagcagagcaggagacctttttgttcagtttcccccatccgaacttgctcgggaggccgctgcccaacagcaagctgagaggacggcagcctctactttcaaagactttgagctggcatcagcccagcagaggcctgatatggtgctgcggcagcggtttcggggacttctgcggcctgaagatcgaacaaaagatgtcctgaccaagccaaggaccaaccgctttgtgaaattggcagtgatggggctgacagtggcacttggagcggctgcactggctgtggtgaaaagtgccctggaatgggcccctaagtttcagctgcagctgtttccctga

SEQ ID NO: 156933 - DNA, 1111 bp, Homo sapiens
  misc_feature (1)...(1111): n = a,t,c or g
tgggcgganatctgtacggtccgacngcnagacnannggtggaacacgcgaccgcggaccaggtttcactatcttttgcgccgaattcgatttccttgcgaagaactggggcctcccgggaggagattaggtctttgccttgaaacccggaacgccaggggcgctcccgcaagtgggggtcctccgggacttggaacgccccggctgggtggtgtccgggcgtcctttccccgcttcttcccacctcggcctggttccgtttcctcctgcgcccaagtgcggaaccctgtctcggcgcccgctgccctctcaccgccccacgcaggatcccggcctggtcaccgggcagttgtgatgcttcccgactgccgcggggacagcgacggcacacacagggcttgggccgcgccggaagccacaccggccttggctgagttgctcctggtctccccgcctcttcccaggcgacccggaggtaagcattttcccaaggaaggcacggtcccccccaggggaatggggcacagccacgccagatggacgagaagaccaagaaagcagaggaaatggcccttagccttcaaccgaagcagtggcgggcggggatgaaccaggtggcaatgaagtgtgccatctggctggcagagcaacggtgtgcccctgagtgtgcaactgaagcctgaggtctccccaaacgcaggacatcagattcctcatggtgcaaaattggccattccagctccatccaagccatcacatcacaaggaggaagggaagaaagacaccccctccacactcttctaaagaagcatagcttcaaaaatttgtatacactttcttccgttaaattccttgtggaccaagaacttgattcccacagctacagttcagcttgaggggagactgtataagccaagatattcagctagaattcaggggttcgcttggtaagggaagggaagagaaatggatactgtcggttctgtgctccaggggactttaaactcaatgctggaaacacttgtgcacaatagcctggcgctgttcatgcatctcaatatataaaccattaagtgtctatcgttaaaaaaaaaaaaaaaaaaaaatgtcg

SEQ ID NO: 156934 - DNA, 293 bp, Homo sapiens
  misc_feature (1)...(293): n = a,t,c or g
gcacgagccgcaattgaattctaacaacgttgccctgcacggagctgtcatcccaggcccgccatttttatttggggcatgtataaaccttatgaattttatggttgccttattcattcctgaatacaagatagccaggggagttcaaaaacacacctacaagcacaacgggagcctgaccaacaccccataacggggcagtgatgaggacattgagccactactgcgagacagcaccatatgggaactcttttcatttgaggaacctgggaatcaatgccctgagctgtaan

SEQ ID NO: 156935 - DNA, 312 bp, Homo sapiens
cccaggttcaagctattcccctgcctcagcctactgagtagctaggattatagataggtgcctgccatcacacctggctaatttttgtattttttttaagtaaagacagggtttcaccatgttggccagactggtctcgaactcctgacctcaggcgatccacccacctcagcctcccaaagtgctgggattacaggcatgagccactgcacctggcctatttcattcttatatttgtggcatacaggtggcaagaagaaagaatgttagaaagggtgaataggtgaaaaatatttaaaagttttataggtt

SEQ ID NO: 156936 - DNA, 375 bp, Homo sapiens
catgagtggatgggtacaagagtaggtgagtggatggatgaatggaaggagggatggaaaatggatggtaaggtggataagtagatgaatggatggatggaaggatgcttataccaatggttaaatactgaaattctctgtcaagaactcattccctatacgtgtctatgtctgttttctggctggatatatatttttaaacagtccatcctggattaggacaaatgaatgaactagctgcaaagcccactagctctttgactaagggtcaaatgcaggccactactgaactatcgccttcccaaggagaggcaaacaaatgctagcaactgtacactccataattgcccatttaacaaacacatggctcgtgcc

SEQ ID NO: 156937 - DNA, 356 bp, Homo sapiens
ggcacgaggactgacagaaacgtgaagccacagtggacgcctggatgagacacagatcaccttccaaatctgagtgtggccttgggaccaaccaggcagccagggagaaggcagagaccagagggaacccagtggctgcaggctccaggcgccactttccttgagtctatgttctttccaagcatcctgcagctccagaagctctggagccgccagcactgagagaagcgatggagctgcatgcagggaaactttgttgacagcggtgtctggatggaccaacagagggcactctcacccacggggaaaatcgtgcgcccggcctcgtccaccgccagaagacgccgctacacaat

SEQ ID NO: 156938 - DNA, 656 bp, Homo sapiens
gcggcacgaggtgaagccacagtggacgcctggatgagacacagatcaccttccaaatctgagtgtggccttgggaccaaccaggcagccagggagaaggcagagaccagagggaacccaggtgccctcaatcccagcctcctctatcccagcctcccaatcccagcctccccaatcccagcctcctaatcccagcctcctccatcccaggacccccactcccagcctcccgatcccagcttctctgatcccagcctcccctaaaacccagactctatgaatcccagcctctgaggtgggaactgttagtaaccccactccatggacaagaaagctggggcctggcgaggctaacagactatccttgatggtgtgagggagggatcgggcctctggagggctgcttccacccattcttcaccagtggctgcaggctccaggcgccactttccttgagtctatgttctttccaagcatcctgcagctccagaagctctggagccgccagcactgagagaagcgatggagctgcatgcagggtgagtgtaggaccgggcggagctgctctgtggctggcgggcacattctttgtcaacatgagcatctctcactgttcctagaccccctggctccccagcttccttggagccaggcgt

SEQ ID NO: 156939 - DNA, 359 bp, Homo sapiens
ggcacgagcggcgcgaggtgacagtgatccgccgggggggaaaacaccaacttagacttgttccaacacgctgtgcaggaaaaggactgctggggtaaagtatctgtttctggtcattctcactggggcatcattggagtgtttgttaaacatgaagctggaggggaaggctggggagacattggggaatattgggaattcccagtttgcatggaaactgcagaataatcctcgtggtaggaacgagactaccgctgtacaacccaagggagccccgcagtgtctactgggagcctctccacttcattcatgcactaagcatttgctttaaaagaatgaaagaacattgctgaaaaggt

SEQ ID NO: 156940 - DNA, 674 bp, Homo sapiens
tttttttttttcatgtttcatagttttattgagtctttttcagttttaactgtccatggtaagtacagttctagtgaccacaattatgaagctctgctcgtactaaaaatagcagatacaaagttggctgccatgccttacacacactaagacacacacacacacacacacacacacacacacacacaaggttttgcatactcttacatgcaaacagtactatgctattataggaaatgtactttccttttattaaaaatacaattacacacaattagtctgggttttgttaagctaccactgatttagataaacctgagaaagctcaaaatatcaagtaacactgtttccatactgctcattcaatggcactatcactcaaaaagaaatctagttcaatcatctatattaaaatcgcagataatataaaaataaacattttttgcaatagcactaaaacatgctataattcaaattcacaaattttgatatgtaacatatattcaccttcatattaatttgtgattatgtgtataatacaatgtacaacagaataaaaaactctaacagaattcagcagccaaataatatacaattatcgctatgaaacttggaattttagttgataacttaaattccaagttacatagtgataattgtatattaagttatca

SEQ ID NO: 156941 - DNA, 430 bp, Homo sapiens
actagttctagatcgcgatctagaacctagcccacgcgtccggggtcttttgatttttgttagcctcccaattttcagggctgctttcttagttgtttttaaaatactactttcagagcatcaggctctcatttcccacattgctttgagtaccagtgctatttctcccttgttggcttttattctaatcatagtcattagagatgacttcatgatgagtctggagatgataaaatggaaatctttcccttccatttaaagtattaggaattctttattttaacttttaaaaataacatctttatttacaggtacaacagaatatctcgggaatggactcagaagtatgccatgtgatgctaccttaaagtcagaataacctgcattatagctggaataaactttaaattactgttaaaaaaaaaaaaaa

SEQ ID NO: 156942 - DNA, 703 bp, Homo sapiens
cagaaagggcagcatttgtctcgatattctaagatcacagtggtcgcctgctttaacaatgtctaaagttcttttatccatttgttcactgctatgggatccaaacccagatgaccccctagtgccagagattgcacggatctataaatcagacagagataagtacaacagaatatgtcgggaatggactcaaaagtatgccatgtgatgctaccttaaagtcagaataacctgcattatagctggaataaactttaaatgactgttccttttttgattttgttatacggctgctcccctatcaaacctcatcttttttaattttattttttgtttacctccctccattcattcacatgctcatctgaggaagacttaaagttcttccagctttgggacaataactgcttttaggaaactgtaaagtaggttacaagaggaacagttgcccaaggactcaggaattttttaaaaaaaaaaatggggggcctgtggtattatgtgggccaatggtcttcactctaacttgggttatgaggactaaaacccattcctcactggctcttaacatggctggaaggaaattcatctgaggggggagggagatgggatgctcatgttgtcacatcaaagggatacagcattattctagcagcatccattctggtttaagccttccactgttagagatttgaggttacat

SEQ ID NO: 156943 - DNA, 623 bp, Homo sapiens
ttttttttttttttttttcctttatttaggcagtgtctcactctgtcacccaggctggagtacagtggcacgatctcagctcactgcagcctcagccagccgggctcaagtgatcctcccacctcagccctccgagtagctgagactacaggcacgcgccaccatgcctggctaatttttgtattttaagtagaaacggggcttcaccacgttgtcctggctggtcttgagctcatgggctcaagaaatcagcccacctcagcctcccaaagtgctgggattacaggtgtgaaccaccgtgcttggctgacatggtagtttttatcaagaaaaagagttactgactctccttgagataagaagctgagcaacacagtcaataaatatatgtgtatataatcatgaacattcccttcttggaagagtactggatgttctgaatatgaaagaacacttggatatataattctgttttccatgacactgaagttaagttagaataatcaaaggacttccctaaaattgtctcaggggcattgttgtaaaatttcaagctttatccagtgagtattttaaaaagatctaacaaacagatcacaatgaattaattagcttaaaaaaga

SEQ ID NO: 156944 - DNA, 887 bp, Homo sapiens; identical to SEQ ID NO: 148716
  misc_feature (1)...(887): n = a,t,c or g

SEQ ID NO: 156945 - DNA, 999 bp, Homo sapiens
tttttttttttttttttttcttccaaagataatatcctttattctgctcattttctaggcgttcacagattcccctcctattgtttgattacaaattctactagcaaatgacacctgccacagtggaactgcttagcatcctttactagtaggattatagctcacatttgtggagctctcgtatataccaggcaccatgctaagcagttcacattgataatcctatttcttctgctatgatataaatgggggttccactgtgtggcctaatacgggcagcaacaactctgatgacctggaagaactcagccctctcactcttgtctttaggtggcagcttggcaggccccagtgactttctctaaggaccctgaagcaagcttttctcctaaagtaattgtactcgttgatttttttatgtgctgcaaatattttcttccatatctgtcatttgtgttttaaccttgatgttttccatcacacagagactttcgatattttttggttgcgaaatctgcttatcttttcccttattatatcttttaagtctcatgttaaagtttagaaaagaccgtcccacaccagaggtataaaaatttttgagtaattttgtggtatatcttccctctggaactaatttgtatggacactgtgaggtagagatctaacttagtggttttttttttggctgtgtcacccaggctggagtgcagtggcatggtggcatgatctaagctcactgcaacctccgcctcccaggttgatgtgattctcctgcctcagcctcctaagtaactgggattacaggcgcgcgccaccattcctggctagttttgtatttttagtagacacagcgtttcgccatcttggccaggctggtctcgaactcctgacctcaagtgatccacccaccttggcctcccaaagtgccgggattacaggcgtgagccatcgcacccagctgagatctagctttgatagctagttgtctaaaagtgc

SEQ ID NO: 156946 - DNA, 336 bp, Homo sapiens; identical to SEQ ID NO: 147991

SEQ ID NO: 156947 - DNA, 951 bp, Homo sapiens
tgtgcctgggcctcttagtaatttttgtatgtaattttcaaagtatccgggattacaggcgcccgccactacactagctaattttttttgtatttttagtagagatggggttttactatgttggctaggctggtctcgagctcctgacctcgtgatccgcccgcctcttagcctccctgagagctgggattacaggcgtgagccaccgcgcccggcctaggtcatttgtttttgggtttggatggcaagatcatggataagacagcaggctttgattatagagctctgagttcaaatcctggctctaccacttgtcagtggtgtaaacttggagaagatgcttagcctgagcctgttttatgttttgaagattgggtaattgtccttccttcagtgttcctgggtgaggagtaagtgaagtcatgtctataagagatgtagcacagtctccggcatgtagaaatggtcagtaactcctagttgtgtagcttagcctctgatgagatggtaaacttcaggaggctggccaccacggctgtgcttactcacggttcatgctggaagggaatgcaagaaactaaatgaatcccacagcctacttaactccatcttgcctctggcagggttccaccttaaaattgttgctaccaagcttcctgtggtcaaagagcccttgaggaagcaagctccacggccaccatagataacccattcctgaaaagtttttcataaacccccacttggtgcttttaaaattttataagcagcttacacatgtagaaaatgatcctacagcccaccaccacatagtaatcactgacactgtgaggtgtctcagctggggttctgctgtgtgtgtgtgtattttacaaaatatgtatggtttctgttcagctcttttcagttaacagatgaacttttgtatcattaaatatttttgaaaacatgaaa

SEQ ID NO: 156948 - DNA, 479 bp, Homo sapiens
  misc_feature (1)...(479): n = a,t,c or g
tcctcaaaaatgaaagccaaaccccctcccccgaagtatgtcagaaataaaaaaaagaaattcctttaaccctcaagccaggaaggttgatacaaatttatacnnnnnnnnnnnnnnnnnnnnnnnnnnnnnnnnnnnnnnnnnnnnnnnnnnnnnnnnnnnnnnnnnnnnnnnnnnnnnnnnnnnnnnnnnnnnnnnnnnnnnnnnnnnnnnnnnnnnnnnnnnnnnnnnnnnnnnnnnnnnnnnnnnnnnnnnnnnnnnnnnnnnnnnnnnnnnnnnnnnnnnnnnnnnnnnnnnnnnnatttttaaagaatggacaatgatgcagatgatttgtgagcattttgatgagaaagtggtgattagaaggatacagcataaatttaattgtaaacatgcttatctcggacgcgtgggcggacgcgtgggtcgncgcgggtttgccatgacgctcaatcgggcgtcatttnggggggccg

SEQ ID NO: 156949 - DNA, 380 bp, Homo sapiens
  misc_feature (1)...(380): n = a,t,c or g
tgtattcttctaatcaccactttctcatcaaaatgcttacaaatcatctgcatcattggccattctttaaaaatnnnnnnnnnnnnnnnnnnnnnnnnnnnnnnnnnnnnnnnnnnnnnnnnnnnnnnnnnnnnnnnnnnnnnnnnnnnnnnnnnnnnnnnnnnnnnnnnnnnnnnnnnnnnnnnnnnnnnnnnnnnnnnnnnnnnnnnnnnnnnnnnnnnnnnnnnnnnnnnnnnnnnnnnnnnnnnnnnnnnnnnnnnnnnnnnnnnnnnntgacccgttgtcctcgtatcacgaccttttttttgaggggttaaaaaaaannnnnnnnnnattttttgaaaaactttgggggggagggagttgttttcatttattgt

SEQ ID NO: 156950 - DNA, 964 bp, Homo sapiens
cgtcgacttttttttttttttttgagatggagttttgctcttgttgcccaggctagagagcaatggtgcaatctcggctgactgcaacctccgtctccggggttcaagcaattcttctgcttcagcctcctgaacagctgggattacaggcgtgcgccatcatgcccagctaattttgtatttttagtagagatgggtttatacatttttaaagaatgggacaatgatggcaggatgatttgtgaggcattttgatgaggaaagtgggtgattaggaagggatacaggcataaatttaattggtaaacatggcttattctaggctaaccctaatctgtttcctgtaggaattactgggcatgggggaggattgggataggatggccctaaccctattctccaatttttaaggtaatgttgaggccaagtctttaaggtatacataatgataaaatggagaaacatgaccagatgatgatggtcatgtaggtaattagatggatttgtaggtggttgaaattgtatctaagcatagcaatctggcctctgtctaactctcccaacagaaatcaataaatcattcccacatccctctgctccaaccatactgaaattcatttgcagttctctaaaaacatcatattcttaaaccccagggcttttgcacatactattcctttgcctgaagcaatgttttcctgctcctttacctcattcttactcattctttggatatcagcttaaatttcgtaagttgaaaatgcacttaatacacctaccctactgaacattagagcttagtctaacctaccttcaacatgttcagaacacttacattagcctacagttagttgggcaaaattatataacacaaagcctataataaagaataagatattgaatatcttatattcaatatgtaatttcttgaatattatactgaaagtgaaaagcaatggttttg

SEQ ID NO: 156951 - DNA, 416 bp, Homo sapiens
gggcgtcctgcggttaagcagcgcgtgcccacaggcatgtccttcttcaacatctacaggaccctgagcggccttggccggctttacgactacaggcagcggtttgtgctgggcatggacacctccttcatcgagctttgtgagcgggagttccagagaggctccctcagggacagcaactacttcctggacacgcaatgtgacagcaacgtccgcaacaacggcaaacaggatggctatgtgcacttcgacgaggacagcaaggcttttgcttgctcctaccaccaattgcagtcctagatccaaaactctgaccccaatcgacccctgcagcgggggatgcagactcacgtgtaaggataacacaccgcggctggggacgggccagggaagacgtcaaggcacgttctgattgc

SEQ ID NO: 156952 - DNA, 608 bp, Homo sapiens
cacccacataggtctcccaaaatgctgagattacaagtgtgagccaccagtacaccggcaatttttgtaattttaagtagagacaaggtttcaccatattagtcaggctggtttcaaactcacgacctcaggtgatccgcctgccttggcatcacaaagtggtaggattacaggcgtgacgacgagaacccagcccttaaatggcttttataaggtaatgtagaaggaaaatttgcatttgacctagaagtcaactttatagtaagctgaaattatggaataactgatcatggaactattgcagatcacctttgagccaaaaatttggcctggattttggttatgcctactactatgtgcctctcatttgtatttatacctgggaattggcattattaactccttttcactcctgcctagaaaacttaaagtgtcaccagacccaagggcggagtgggtcctattaaaacaaactcgtaggcctgtctggaaggactaggctactaggctccttggctgttttggcatattcatcttgattatagctcttggtctttcatcatattagggatgtttatgatgttattaaagaaaatcttgtcaaatgc

SEQ ID NO: 156953 - DNA, 359 bp, Homo sapiens
tgttgttgttgtcagtcaatatgctgctgaaaggccaagtgtggtggctcatgcctgcaatcccagcactttgggaggccgaggtaggtggctcacttgaggccagcaggtcgagaccagcctggcctcaggttatctgcccaccttggcctccccaaagtgctgggattacaggcgtgagccactgcgcctggcctgttttaatttttttgtagagacaagaaatcttctcactgtgctgcccatatctgttcagcaataactatagatgatgcatttaattattagccaatggatatttatcttctcaaatttctggactcaagtaatcttcgtacccctcgtgccaagctaggcgt

SEQ ID NO: 156954 - DNA, 415 bp, Homo sapiens
gggggatcaggaggtgggaggtggatggttcttattctgtggagaagaagggcgggaagaacttcctttcaggaggaagctggaacttactgactgccctctagtgtgcaattgggtgttgcctcagtttcctcccagctcagttttattagatcaaagctgttgttgggcaccaggttggccacctcaatcaccagccaagatggttgctttgtccaccagaggtcaagttcacctctctggtgctgtagttcccagctccttcctgatttttctaatcgctccttctggggaacaggaagttgatattgccatggtggcgggatatgccgtcacctcagtagttttactgtaaaagggaaatttgaacaacaaaaaccaaaaaaaataaaaataaaaaacttcaaaagttgac

SEQ ID NO: 156955 - DNA, 1708 bp, Homo sapiens
aggtgtggggggcgtgggccgcgggatgctgccgcccgctccgcctcgagctccagctccgggttttccctccaccatcctctggccctccccgcctctcctttaactcccccctcctgggctcgggactggtttcctcccgtttggccatgggtgcccccctctgtctcagagtccctggatcctttttccttggggaggggcacaggctcagcctcctctctgaccatgacccaggcatccttgtccccctcacccacgccagagttatgggcggcaactgcccaccttttggttggcaccgccttctttctgcctctcactggttttctcttctctatctcttattctttccctctcttccgtctctaggtctgttcttcttccctagcatcctcctccccacatctcctttcaccctcttggcttcttatcctgagcctctcccatctccggggtggggggcatcaaagcatttcttccccttaggtttcagccccccttctgacctctcataccaaccactcccctcagtctgccaaaaatgggggccttatggggaaggctctgacactccaccccagctcaggccatgggcagcagggctccattctctggcctggcccaggcctctacatacttactccagccatttggggtggttgggtcatgacagctaccatgagaagaagtgtcccgttttgtccagcggccaatagcacgatatgaaccggtcgggacatgtatggacttggtctgatgctgaatgggccacttgggaccggaagagacttgctccaaacaagaggggaccaggctcggacagaaatggcctgggaagtatcagaagcagtgcagcacgaactggaagtgccttcatccaggacaggaagtatcacttctgaaacaggaaggggcctggctggaactccaagtggcttagtctgggggatcatgaggtgggaggtggatggctcttattctgtggagaacaagggcgggaagaacttcctttcaggaggaagctggaacttactgactgtaacaggttaaaggtggaccgagaaggactttttccagtcttcagtggcacttcccaagaactcccttcccttgtgctctgagctgattttaggacagctaatatgactgtcatgcgctgtggcaggcctaatttgtcttgttctttcctttccatatcccagtataatctctgttaatcaacaggactaccccaagaacccatgtgctctcccgagtaacccagatggctgtcttgttcattccatcctacatttctgactcctttcagactcaacacagttcccttcttagtgaccaaaatggtggcctactggctggtctagctgacagtggtacttagcaaaggccactgtttccatagtgaccagctgatacctcttcctgccctctagtgtgcaattgggtgttgcctcagtttcctcccagctcagttttattagatcaaagctgttgttgggcaccaggttggccacctcaatcaccagccaagatggttgctttgtccaccagaggtcaagttcacctctctggtgctgtagttcccagctccttcctgatttttctaatcgctccttctggggaacaggaagttgatattgccatggtggcggggtatgccgtcacctcagtagttttactgtaaaagggaaatttgaaggaattc

SEQ ID NO: 156956 - DNA, 514 bp, Homo sapiens
ctgctgggaaatttccgttaagatcgggccacttcccctgcttcctaacggttgagtctgtttgctctgggccttttaagcccagcgtgatccctctgagtccctgcggtgcatctgcgccatctccacgcttcctgttgagccccagcccgggcttggtgcgggcagtgctgcactgcaccctcctggttgcctcctgagcacctccacccgcttccccaccaggcgtggctgtgttttcacccccagtgtccatctggcacccttctcgattgccaggtagttacggtctgtgtgggcaacacctgagggacccaaccaaaccaaggtccaggacacacttccgggcaggggtaccgcctctggttagctgctcactccccagcccaaatcttccgctgatgacttctggggtgcagaggccacctaagggtctagaaaacagtctcctccagttggctgatttaaacaaatagcctacctgcctacgttggggttacggccgaattccacc

SEQ ID NO: 156957 - DNA, 414 bp, Homo sapiens
gtcaaggccgcctggggtaaggtcggcgcgcaggctggggagtatggagcggaggccctggagaggatgttcctgtccttccccaccaccaagacctacttcccgcacttcgacctgagccacggctctgcccaggttaagggccacggcaagaaggtggccgacgcgctgaccaacgccgaggcgcacgtggacgacatgcccaacgcgctgaccgccctgagcgacctgcacgcgcacaagcttcgggtggacccggtcaacttcaagctcctaagccactgcctgctggtgatcctggccgaccacctccccgccgagttcacccctgcggagcacgcctccatggacaagttcatggcttctgtgagcactggtgcttgacttctaatacctgttggcttgagcctttgt

SEQ ID NO: 156958 - DNA, 4944 bp, Homo sapiens
atgtcattcttttctacgttaaaaacagctttgtctttgaaggagaaacttgctgctactggtgttcttgttctgatttgcgcacttgttggtgctgggtttgcatgggaacgtcatcagctaaagcaagccatagagaaaattggcagtcttgatcaggctgttaaggaacgtgataagtcaataatggatcttaaccagaccattgagacgatgaacaaagcagagcaacattttcacagccaggaagtgaaaaatgaatcagaacaagccaagtatgctgacaggcaaatggaacgaaaagctgaagttcagaaacaactggttgcggcgggtaatgttcgccagcgtattcctgctgacactcagcggttgctccgggagtcgatcagcgaatttaacgccgacgccgacaaagggatttttatgtctgataaagtaacagtaaagcaaactatcaacaaagcgacttcaatctacaaaattgagcaaatcactgttggcaagccaggatctgaacaataccgtcgtgctttcgagcttgccgatcagcttggtttaaaacacccggattgcattgagcatgtatttccgacctatgctgatgagcaatgtactcatgttcttaccgaagaggattttttcagcactgaagaacgagaaggcgttgatcgctgcattggtgtgatttgttcttcggtaagtgatgagttattccctaatgtgcctgaatatggtggtattggataccaattcctgtacgagggcgatgagcttaaatgctatgaacatgacattgaaagtaaggcaaaagaactaacagttaattcaaacaacactgtgcagcctgtagcgttgatgcgcttgggggtattcgtgccgaagccatcaaagagcaaaggagaaagtaaagagattgatgccaccaaagcgttttcccagctggagatagctaaagccgagggttacgatgatattaaaatcaccggtcctcgactcgatatggatactgatttcaaaacgtggatcggtgtcatctacgcgttcagcaaatacggcttgtcctcaaacaccatccagttatcgtttcaggaattcgctaaagcctgtggtttcccctcaaaacgtctggatgcgaaactgcgtttaaccattcatgaatcacttggacgcttgcgtaacaagggtatcgcttttaagcgcggaaaagatgctaaaggcggctatcagactggtctgctgaagagctggagggctgattcgaagttgtgggagctgttccagcttgattatcgcgttctgttgcaacaccacgccttgcgtgcccttccgaagaaagaagctgcacaagccatttacactttcatcgaaagccttccgcagaacccgttgccgctatcgttcgcgcgaatccgtgagcgcctggctttgcagtcagctgttggcgagcaaaaccgtatcattaagaaagcgatagaacagcttaaaacaatcggctatctcgactgttctattgagaagaaaggccgggaaagttttgtaatccacacatatttgataccagcgatccctccacagcacataattcaatgcgacttccctctatcgcacatcttagacttttattctccctccagcacacatcgaagctgccgggcaagccgttctcaccagttgatagagagtgaagcttggctgcccattgaagcaggaaatcaccaaaatgattcaggctacaacctgaacgtagaagaaatccgcgtcctttatgcgtggaggatgccaaagcatgttgtgacacacttggcaaaggaccagcttcacaaggttgctcaaagagcaaacagaatgctcaatgttctgactgaacaagtacagttgcaaaaggatgagctacacgcgaacgagttttaccaggtctatgcgaaagcggcactggcaaaattgcctctactgactcgagcgaacgttgactatgccaacatcattgacatatatgaacatcgcggagtgccaaaataccgggatcgctacagcgaacgcggtgtgtcaaaaactgtatcgacggtttctctggcgcatgcaatgcgtgctcaccctcatcttcttatggaggatttaaggattctggttattgaccttgatccgcaatcttcagcaacgatgtttttaagccataaacactctattggtatcgtaaacgcaacatctgcacaggctatgttgcagaatgtaagccgtgaagagctgttagaggagtttattgttccttctgttgtacctggggttgacgttatgcctgcgtcgattgacgatgcctttattgcatccgattggagagagctgtgcaatgagcatctaccgggtcagaacatccatgctgtcctgaaagaaaatgtgattgataagctgaagagcgattatgactttatcctcgttgatagtggtcctcaccttgacgccttcctgaaaaatgctttggcctcggccaatatactgtttacacctctgccgccagcaactgtcgatttccactcatcgcttaaatacgttgcccgccttcctgagttggtgaactcatttcggatgaaggctgcgagtgccagcttgcgactaacattgaaaaacagaccaacaattgggcgaacccttaatccttcaatattaagcggatttgatagttcttcagcctctggcgatcgagtcgagcaggtattcaagttatcaactggtcgccaggccacatttattgaagaggtaatacctccgaaccaggtagaaagcgatacctttgttgatcagcataacaacgggcgtgaccaggcatctcttacgccaaaatcattaaaaagtatccgaagcactattaagcatcagcaattttaccctgcaataggtgttagacgggctacagggaaaattgaaattttggatggttcccggcgtcgagcttctgccatcttagagaacgtagggttgcgggttttagtcacggaccaggagatcagcgttcaggaagcgcaaaatttagcgaaagacgttcagacagcattgcagcacagcattcgagaaataggtctgcgtttgatgcgaatgaaaaatgatgggatgagtcagaaggatattgcagccaaagaagggctgtctcaggcgaaggtcacgcgtgctctccaggcagcgagtgctccggaagaattagtcgcccttttccctgtgcagtcggaattaaccttttcggactacaaaacgctttgtgctgttggcgacgaaatggggtacaagaatttagagtttgatcagcttattcaaaacatatccccggaaataaacgacatcttatccattgaagaaatggccgaagatgaagttaaaaataaaatcctgcgcttgataacaaaggaagcctcactactcacggataaaggttctaaagataagtccgtagttactgaattatggaaatttgaggacaaggatcgctttgcaaggaagcgcgtgaaaggccgtgcattttcttatgagtttaatcgactctcaaaagagaagagtaaattgagtaacttacgcgaataccagaatcgtattgcagatatcgcaaaacgctctaaagctgtgcttggctgggcaagcactgcgcagttcggtactgataaccaattcattaaagatgatgccgcgcgtgccgcatctatccttgaagctgcacgtaaagacccggtttttgcgggtatctctgataatgccaccgctcaaatcgctacagcgtgggcaagtgcactggctgactacgccgcagcacataaatctatgccgcgtccggaaattctggcctcctgccaccagacgctggaaaactgcctgatagagtccacccgcaatagcatggatgccactaataaagcgatgctggaatctgtcgcagcagagatgatgagcgtttctgacggtgttatgcgtctgcctttattcctcgcgatgatcctgcctgttcagttgggggcagctaccgctgatgcgtgtaccttcattccggttacgcgtgaccagtccgacatctatgaagtctttaacgtggcaggttcatcttttggttcttatgctgctggtgatgttctggacatgcaatccgtcggtgtgtacagccagttacgtcgccgctatgtgctggtggcaagctccgatggcaccagcaaaaccgcaaccttcaagatggaagacttcgaaggccagaatgtaccaatccgaaaaggtcgcactaacatctacgttaaccgtattaagtctgttgttgataacggttccggcagcctacttcactcgtttactaatgctgctggtgagcaaatcactgttacctgctctctgaactacaacattggtcagattgccctgtcgttctccaaagcgccggataaaggcactgagatcgcaattgagacggaaatcaatattgaagccgctcctgagctgatcccgctgatcaaccacgaaatgaagaaatacaccctgttcccaagtcagttcgttatcgcggctgagcacacggtacaggcggcgtatgaagcacagcgtgaatttggtctggacctgggttccctacagttccgcaccctgaaggaatacctgtctcatgaacaggatatgctgcgtcttcgcatcatgatctggcgcactcttgcgaccgacacctttgacatcgctctgccggttaaccagtcctttgatgtatgggcaaccatcattcgtggcaaattccagactgtatatcgcgacattattgagcgcgttaaatcttctggtgcgatggggatgtttgctggtgctgatgcagcatctttcttcaaacagttgccgaaggatttcttccagccagccgaagactatatccagactccgtatgttcactacatcggtaccccatttaggaccacccacagcacctaa

SEQ ID NO: 156959 - DNA, 1752 bp, Homo sapiens
  misc_feature (1)...(1752): n = a,t,c or g
atgcctgcgtcgattgacgatgcctttattgcatccgattggagagagctgtgcaatgagcatctaccgggtcagaacatccatgctgtcctgaaagaaaatgtgattgataagctgaagagcgattatgactttatcctcgttgatagtgcaactgtcgatttccactcatcgcttaaatacgttgcccgccttcctgagttggtgaaactcatttcggatgaaggctgcgagtgccagcttgcgactaacattggttttatgtccaagttgagtaacaaggcagaccataagtattgccatagcctggctaaagaagtgttcggtggggatatgcttgatgtcttcctccctcgccttgacggttttgaacgctgcggcgagtcttttgacactgttatttcagctaacccggcaacgtatgttggtagtgctgatgcattgaagaacgcgcgaattgccgcggaagattttgctaaagcagtttttgacctcgagcaggtattcaagttatcaactggtcgccaggccacatttattgaagaggtaatacctccgaaccaggtagaaagcgatacctttgttgatcagcataacaacgggcgtgaccaggcatctcttacgccaaaatcattaaaaagtatccgaagcactattaagcatcagcaattttaccctgcaataggtgttagacgggctacagggaaaattgaaattttggatggttcccggcgtcgagcttctgccatcttagagaacgtagggttgcgggttttagtcacggaccaggagatcagcgttcaggaagcgcaaaatttagcgaaagacgttcagacagcattgcagcacagcattcgagaaataggtctgcgtttgatgcgaatgaaaaatgatgggatgagtcagaaggatattgcagccaaagaagggctgtctcaggcgaagcngtgggcaagtgcactggctgactacgccgcagcacataaatctatgccgcgtccggaaattctggcctcctgccaccagacgctggaaaactgcctgatagagtccacccgcaatagcatggatgccactaataaagcgatgctggaatctgtcgcagcagagatgatgagcgtttctgacggtcgcactaacatctacgttaaccgtattaagtctgttgttgataacggttccggcagcctacttcactcgtttactaatgctgctggtgagcaaatcactgttacctgctctctgaactacaacattggtcagattgccctgtcgttctccaaagcgccggataaaggcactgagatcgcaattgagacggaaatcaatattgaagccgctcctgagctgatcccgctgatcaaccacgaaatgaagaaatacaccctgttcccaagtcagttcgttatcgcggctgagcacacggtacaggcggcgtatgaagcacagcgtgaatttggtctggacctgggttccctacagttccgcaccctgaaggaatacctgtctcatgaacaggatatgctgcgtcttcgcatcatgatctggcgcactcttgcgaccgacacctttgacatcgctctgccggttaaccagtcctttgatgtatgggcaaccatcattcgtggcaaattccagactgtatatcgcgacattattgagcgcgttaaatcttctgacttgttcaacaggccagccattacgctcgtcatcaaaatcactcgcatcaaccaaaccgttattcattcgtga

SEQ ID NO: 156960 - DNA, 4371 bp, Homo sapiens; identical to SEQ ID NO: 121210

SEQ ID NO: 156961 - DNA, 2012 bp, Homo sapiens
cgtgggcaagtgcactggctgactacgccgcagcacataaatctatgccgcgtccggaaattctggcctcctgccaccagacgctggaaaactgcctgatagagtccacccgcaatagcatggatgccactaataaaacgatggtggaatctgtcccaacaaaaatgattagcgttttcgacggttgttcttcttttggttctaatgctgctggtaatgttctgaacatgcaatcggtcggtgtgtacagccagttacgtcgccgctatgtgctggtgccaagctccgatggcaccagcaaaaccgcaaccttcaagatggaagacttcgaaggccagaatgtaccaatccgaaaaggtcgcactaacatctacgttaaccgtattaagtctgttgttgataacggttccggcagcctacttcactcgtttactaatgctgctggtgagcaaatcactgttacctgctctctgaactacaacattggtcagattgccctgtcgttctccaaagcgccggataaaggcactgagatcgcaattgagaggggagcaaatggtgatgttctggacatgcaatccgtcggtgtgtacagccagttacgtcgccgctatgtgctggtggcaagctccgatggcaccagcaaaaccgcaaccttcaagatggaagacttcgaaggccagaatgtaccaatccgaaaaggtcgcactaacatttacgttagccgtattaagtctgttgttgataacggttccggcagcctacttcactcgtttactaatgctgctggtgagcaaatcactgttacctgctctctgaactacaacattggtcagattgccctgtcgttctccaaagcgccggataaaggcactgagatcgcaattgagagggctaccgatgatgcgtgtaccttcattccggttacgcgtgaccagtccgacatttatgaagtctttaacgtggcaggttcatcttttggttcttatgctgctggtgatgttctggacatgcaatccgtcggtgtgtacagccagttacgtcgccgctatgtgctggtggcaagctccgatggcaccagcaaaaccgcaaccttcaagatggaagacttcgaaggccagaatgtaccaatcccaaaaggtcgcaaaaacatctacgttaaccgtattaagtctgttgttgataacggttccggcagcctacttcactcgtttactaatgctgctgctaccgctgatgcgtgtaccttcattccggttacgcgtgaccagtccgacatctatgaagtctttaacgtggcaggttcatcttttggttcttatgctgctggtgatgttctggacatgcaatccgtcggtgtgtacagccagttacgtcgccgctatgtgctggtggcaagctccgatggcaccagcaaaaccgcaaccttcaagatggaagacttcgaaggccagaatgtaccaatccgaaaaggtcgcaataacatctacgttaaccgtattaagtctgttgttgataacggttccggcagcctacttcactcgtttactaatgctgctgctaccgctgatgcgtgtaccttcattccggttacgcgtgaccagtccgacatctatgaagtctttaacgtggcaggttcatcttttggttcttatgctgctggtgatgttctggacatgcaatccgtcggtgtgtacagccagttacgtcgccgctatgtgctggtggcaagctccgatggcaccagcaaaaccgcaaccttcaagatggaagacttcgaaggccagaatgtaccaatccgaaaaggtcgcactaacatctacgttaaccgtattaagtctgttgttgataacggttccggcagcctacttcactcgtttactaatgctgctggtgagcaaatcactgttacctgctctctgaactacaacattggtcagattgccctgtcgttctccaaagcgccggataaaggcactgagatcgcaattgagagggggtcttctacataa

SEQ ID NO: 156962 - DNA, 3042 bp, Homo sapiens
atgctcaatgttctgactgaacaagtacagttgcaaaaggatgagctacacgcgaacgagttttaccaggtctatgcgaaagcggcactggcaaaattgcctctactgactcgagcgaacgttgactatgccgtaagtgaaatggaagaaaagggttatgttttcgataaacgccctgctggctcttcaatgaaatatgcgatgtcaattcagaacatcattgacatatatgaacatcgcggagtgccaaaataccgggatcgctacagcgaagcgtatgtgattttcatctccaatcttaaaggcggtgtgtcaaaaactgtatcgacggtttctctggcgcatgcaatgcgtgctcaccctcatcttcttatggaggatttaaggattctggttattgaccttgatccgcaatcttcagcaacgatgtttttaagccataaacactctattggtatcgtaaacgcaacatctgcacaggctatgttgcagaatgtaagccgtgaagagctgttagaggagtttattgttccttctgttgtacctggggttgacgttatgcctgcgtcgattgccgacgatgcctttattgcatccgattggaaagactgtgcaatgagcatctaccggttggtgaaactcatttcggatgaaggctgcgagtgccagcttgcgactaacattggttttatgtccaagttgagtaacaaggcagaccataagtattgccatagcctggctaaagaagtgttcggtggggatatgcttgatgtcttcctccctcgccttgacggttttgaacgctgcggcgagtcttttgacactgttatttcagctaacccggcaacgtatgttggtagtgctgatgcattgaagaacgcgcgaattgccgcggaagattttgctaaagcagtttttgaccgcatctcttacgccaaaatcattaaaaagttccgaagcactattaagcatcagcaattttaccctgcaataggtgttagacgggctacagggaaaattgaaattttggatggttcccggcgtcgagcttctgccatcttagagaacgtagggttgcgggttttagtcacggaccaggagatcagcgttcaggaagcgcaaaatttagcgaaagacgttcagacagcattgcagcacagcattcgagaaataggtctgcgtttgatgcgaatgaaaaatgatgggatgagtcagaaggatattgcagccaaagaagggctgtctcaggcgaaggtcacgcgtgctctccaggcagcgagtgctccggaagaattagtcgcccttttccctgtgcagtcggaattaaccttttcggactacaaaacgctttgtgctgttggcgacgaaatggggaacaagaatttagagtttgatcagcttattcaaaacatatccccggaaataaacgacatcttatccattgaagaaatggccgaagatgaagttaaaaataaaatcctgcgcttgataacaaaggaagcctcactactcacggataaaggttctaaagataagtccgtagttactgaattatggaaatttgaggacaaggatcgctttgcaaggaagcgcgtgaaaggccgtgcattttcttatgagtttaatcgactctcaaaagagaagagtaaattgagtaacttacgcgaataccagaatcgtattgcagatatcgcaaaacgctctaaagctgtgcttggctgggcaagcactgcgcagttcggtactgataaccaattcattaaagatgatgccgcgcgtgccgcatctatccttgaagctgcacgtaaagacccggtttttgcgggtatctctgataatgccaccgctcaaatcgctacagcgtgggcaagtgcactggctgactacgccgcagcacataaatctatgccgcgtccggaaattctggcctcctgccaccagacgctggaaaactgcctgatagagtccacccgcaatagcatggatgccactaataaagcgatgctggaatctgtcgcagcagagatgatgagcgtttctgacggtgttatgcgtctgcctttattcctcgcgatgatcctgcctgttcagttgggggcagctaccgctgatgcgtgtaccttcattccggttacgcgtgaccagtccgacatctatgaagtctttaacgtggcaggttcatcttttggttcttatgctgctggtgatgttctggacatgcaatccgtcggtgtgtacagccagttacgtcgccgctatgtgctggtggcaagctccgatggcaccagcaaaaccgcaaccttcaagatggaagacttcgaaggccagaatgtaccaatccgaaaaggtcgcactaacatctacgttaaccgtattaagtctgttgttgataacggttccggcagcctacttcactcgtttactaatgctgctggtgagcaaatcactgttacctgctctctgaactacaacattggtcagattgccctgtcgttctccaaagcgccggataaaggcactgagatcgcaattgagacggaaatcaatattgaagccgctcctgagctgatcccgctgatcaaccacgaaatgaagaaatacaccctgttcccaagtcagttcgttatcgcggctgagcacacggtacaggcggcgtatgaagcacagcgtgaatttggtctggacctgggttccctacagttccgcaccctgaaggaatacctgtctcatgaacaggatatgctgcgtcttcgcatcatgatctggcgcactcttgcgaccgacacctttgacatcgctctgccggttaaccagtcctttgatgtatgggcaaccatcattcgtggcaaattccagactgtatatcgcgacattattgagcgcgttaaatcttctggtgcgatggggatgtttgctggtgctgatgcagcatctttcttcaaacagttgccgaaggatttcttccagccagccgaagactatatccagactccgtatgttcactacatcggtaccccatttaggaccacccacagcacctaa

SEQ ID NO: 156963 - DNA, 2610 bp, Homo sapiens
atgtcattcttttctacgttaaaaacagctttgtctttgaaggagaaacttgctgctactggtgttcttgttctgatttgcgcacttgttggtgctgggtttgcatgggaacgtcatcagctaaagcaagccatagagaaaattggcagtcttgatcaggctgttaaggaacgtgataagtcaataatggatcttaaccagaccattgagacgatgaacaaagcagagcaacattttcacagccaggaagtgaaaaatgaatcagaacaagccaagtatgctgacaggcaaatggaacgaaaagctgaagttcagaaacaactggttgcggcgggtaatgttcgccagcgtattcctgctgacactcagcggttgctccgggagtcgatcagcgaatttaacgccgacgccgacaaaggtacagtaaagcaaactatcaacaaagtgatttcaatctacaaaattgagcaggtcactgttggcaagccaggatctgaacaatgccgtcgggctttcgagcttgccgatcagcttggcttaaaacacccggattgcattgagcatgtatttccgacctatgctcaagagcaatgcgctcatgttcttaccgaagaggattgtttcagcaatgcagaacgagacggcgatgatcgctgcattggtgtgatttgctcttgggaattcgctaaagcctgtggtttcgcctcaaaacgtctggatgtgaaactgcgtttagccattcatgaatcccttggccgcctgcgtagcaagggtatcgcttttaagcgcggaaaagatgctaaaggcggctatcagcctggtctgctgaaggtcgagcgttttgatgctgcccttgcacacatatttgataccagcgatccctccacagcacataattcaatgcgacttcaccagttgatagagagtgaagcttggctgcccattgaagcaggaaatcaccaaaatgattcaggctacaacctgaacaatgtaagccgtgaagagctgttagaggagtttattgttccttctgttgtacctggggttgacgttatgcctgcgtcgattgacgatgcctttattgcatccgattggagagagctgtgcaatgagcatctaccgggtcagaacatccatgctgtcctgaaagaaaatgtgattgataagctgaagagcgattatgactttatcctcgttgatagtggtcctcaccttgacgccttcctgaaaaatgctttggcctcggccaatatactgtttacacctctgccgccagcaactgtcgatttccactcatcgcttaaatacgttgcccgccttcctgagttggcagcgagtgctccggaagaattagtcgcccttttccctgtgcagtcggaattaaccttttcggactacaaaacgctttgtgctgttggcgacgaaatggggtacaagaatttagagtttgatcagcttattcaaaacatatccccggaaataaacgacatcttatccattgaagaaatggccgaagatgaagttaaaaataaaatcctgcgcttgataacaaaggaagcctcactactcacggataaaggttctaaagataagtccgtagttactgaattatggaaatttgaggacaaggatcgctttgcaaggaagcgcgtgaaaggccgtgcattttcttatgagtttaatcgactctcaaaagagaagagtaaattgagtaacttacgcgaataccagaatcgtattgcagatatcgcaaaacgctctaaagctgtgcttggctgggcaagcactgcgcagttcggtactgataaccaattcattaaagatgatgccgcgcgtgccgcatctatccttgaagctgcacgtaaagacccggtttttgcgggtatctctgataatgccaccgctcaaatcgctacagcgtgggcaagtgcactggctgactacgccgcagcacataaatctatgccgcgtccggaaattctggcctcctgccaccagacgctggaaaactgcctgatagagtccacccgcaatagcatggatgccactaataaagcgatgctggaatctgtcgcagcagagatgatgagcgtttctgacggtgttatgcgtctgcctttattcctcgcgatgatcctgcctgttcagttgggggcagctaccgctgatgcgtgtaccttcattccggttacgcgtgaccagtccgacatctatgaagtctttaacgtggcaggttcatcttttggttcttatgctgctggtgatgttctggacatgcaatccgtcggtgtgtacagccagttacgtcgccgctatgtgctggtggcaagctccgatggcaccagcaaaaccgcaaccttcaagatggaagacttcgaaggccagaatgtaccaatccgaaaaggtcgcactaacatctacgttaaccgtattaagtctgttgttgataacggttccggcagcctacttcactcgtttactaatgctgctggtgagcaaatcactgttacctgctctctgaactacaacattggtaagattgccctgtggttctcgaaagagccggataaaggcactgagatcccatttgaaggagagaatcaattttaa

SEQ ID NO: 156964 - DNA, 4560 bp, Homo sapiens
atgtcattcttttctacgttaaaaacagctttgtctttgaaggagaaacttgctgctactggtgttcttgttctgatttgcgcacttgttggtgctgggtttgcatgggaacgtcatcagctaaagcaagccatagagaaaattggcagtcttgatcaggctgttaaggaacgtgataagtcaataatggatcttaaccagaccattgagacgatgaacaaagcagagcaacattttcacagccaggaagtgaaaaatgaatcagaacaagccaagtatgctgacaggcaaatggaacgaaaagctgaagttcagaaacaactggttgcggcgggtaatgttcgccagcgtattcctgctgacactcagcggttgctccgggagtcgatcagcgaatttaacgccgacgccgacaaagggatttttatgtctgataaagtaacagtaaagcaaactatcaacaaagcgacttcaatctacaaaattgagcaaatcactgttggcaagccaggatctgaacaataccgtcgtgctttcgagcttgccgatcagcttggtttaaaacacccggattgcattgagcatgtatttccgacctatgctgatgagcaatgtactcatgttcttaccgaagaggattttttcagcactgaagaacgagaaggcgttgatcgctgcattggtgtgatttgttcttcggtaagtgatgagttattccctaatgtgcctgaatatggtggtattggataccaattcctgtacgagggcgatgagcttaaatgctatgaacatgacattgaaagtaaggcaaaagaactaacagttaattcaaacaacactgtgcagcctgtagcgttgatgcgcttgggggtattcgtgccgaagccatcaaagagcaaaggagaaagtaaagagattgatgccaccaaagcgttttcccagctggagatagctaaagccgagggttacgatgatattaaaatcaccggtcctcgactcgatatggatactgatttcaaaacgtggatcggtgtcatctacgcgttcagcaaatacggcttgtcctcaaacaccatccagttatcgtttcaggaattcgctaaagcctgtggtttcccctcaaaacgtctggatgcgaaactgcgtttaaccattcatgaatcacttggacgcttgcgtaacaagggtatcgcttttaagcgcggaaaagatgctaaaggcggctatcagactggtctgctgaaggtcgggcgttttgatgctgaccttgatctgatagagctggaggctgattcgaagttgtgggagctgttccagcttgattatcgcgttctgttgcaacaccacgccttgcgtgcccttccgaagaaagaagctgcacaagccatttacactttcatcgaaagccttccgcagaacccgttgccgctatcgttcgcgcgaatccgtgagcgcctggctttgcagtcagctgttggcgagcaaaaccgtatcattaagaaagcgatagaacagcttaaaacaatcggctatctcgactgttctattgagaagaaaggccgggaaagttttgtaatccacacatcgaaggtgcctgacaagcggtcttcgcagttgatagagagtgaagcttggctgcccattgaagcaggaaatcaccaaaatgattcaggctacagcctgaacgtagaagaaatccgcgtcctttatgcgtggaggatgccaaagcatgttgtgacacacttggcaaaggaccagcttcacaaggttgctcaaagagcaaacagaatgctcaatgttctgactgaacaagtacagttgcaaaaggatgagctacacgcgaacgagttttaccaggtctatgcgaaagcggcactggcaaaattgcctctactgactcgagcgaacgttgactatgccgtaagtgaaatggaagaaaagggttatgttttcgataaacgccctgctggctcttcaatgaaatatgcgatgtcaattcagaacatcattgacatatatgaacatcgcggagtgccaaaataccgggatcgctacagcgaagcgtatgtgattttcatctccaatcttaaaggcgttggtgaactcatttcggatgaaggctgcgagtgccagcttgcgactaacattggttttatgtccaagttgagtaacaaggcagaccataagtattgccatagcctggctaaagaagtgttcggtggggatatgcttgatgtcttcctccctcgccttgacggttttgaacgctgcggcgagtcttttgacactgttatttcagctaacccggcaacgtatgttggtagtgctgatgcattgaagaacgcgcgaattgccgcggaagattttgctaaagcagtttttgacccctctggcgatcgagtcgagcaggtattcaagttatcaactggtcgccaggccacatttattgaagaggtaatacctccgaaccaggtagaaagcgatacctttgttgatcagcataacaacgggcgtgaccaggcatctcttacgccaaaatcattaaaaagtatccgaagcactattaagcatcagcaattttaccctgcaataggtgttagacgggctacagggaaaattgaaattttggatggttcccggcgtcgagcttctgccatcttagagaacgtagggttgcgggttttagtcacggaccaggagatcagcgttcaggaagcgcaaaatttagcgaaagacgttcagacagcattgcagcacagcattcgagaaataggtctgcgtttgatgcgaatgaaaaatgatgggatgagtcagaaggatattgcagccaaagaagggctgtctcaggcgaaggtcacgcgtgctctccaggcagcgagtgctccggaagaattagtcgcccttttccctgtgcagtcggaattaaccttttcggactacaaaacgctttgtgctgttggcgacgaaatggggaacaagaatttagagtttgatcagcttattcaaaacatatccccggaaataaacgacatcttatccattgaagaaatggccgaagatgaagttaaaaataaaatcctgcgcttgataacaaaggaagcctcactactcacggataaaggttctaaagataagtccgtagttactgaattatggaaatttgagggcaaggatcgctttgcaaggaagaggaatcgtattgcagatatcgcaaaacgctctaaagctgtgcttggctgggcaagcactgcgcagttcggtactgataaccaattcattaaagatgatgccgcgcgtgccgcatctatccttgaagctgcacgtaaagacccggtttttgtgcatatctttgataatgccaccgttcaaagcgctacagcgtgggcaagtgcactggctgactacgccgcagcacataaatctatgccgcgtccggaaattctggcctcctgccaccagacgctggaaaactgcctgatagagtccacccgcaatagcatggatgccactaataaagcgatgctggaatctgtcgcagcagagatgatgagcgtttctgacggtgttatgcgtctgcctttattcctcgcgatgatcctgcctgttcagttgggggcagctaccgctgatgcgtgtaccttcattccggttacgcgtgaccagtccgacatctatgaagtctttaacgtggcaggttcatcttttggttcttatgctgctggtgatgttctggacatgcaatccgtcggtgtgtacagccagttacgtcgccgctatgtgctggtggcaagctccgatggcaccagcaaaaccgcaaccttcaagatggaagacttcgaaggccagaatgtaccaatccgaaaaggtcgcactaacatctacgttaaccgtattaagtctgttgttgataacggttccggcagcctacttcactcgtttactaatgctgctggtgagcaaatcactgttacctgctctctgaactacaacattggtcagattgccctgtcgttctccaaagcgccggataaaggcactgagatcgcaattgagacggaaatcaatattgaagccgctcctgagctgatcccgctgatcaaccacgaaatgaagaaatacaccctgttcccaagtcagttcgttatcgcggctgagcacacggtacaggcggcgtatgaagcacagcgtgaatttggtctggacctgggttccctacagttccgcaccctgaaggaatacctgtctcatgaacaggatatgctgcgtcttcgcatcatgatctggcgcactcttgcgaccgacacctttgacatcgctctgccggttaaccagtcctttgatgtatgggcaaccatcattcgtggcaaattccagactgtatatcgcgacattattgagcgcgttaaatcttctggtgcgatggggatgtttgctggtgctgatgcagcatctttcttcaaacagttgccgaaggatttcttccagccagccgaagactatatccagactccgtatgttcactacatcggtaccccatttaggaccacccacagcacctaa

SEQ ID NO: 156965 - DNA, 2850 bp, Homo sapiens
atgagctacacgcatatgcgatgtcaattcagaacatcattgacatatatgaacatcgcggagtgccaaaataccgggatcgctctggcgcatgcaatgcgtgctcaccctcatcttcttatggaggatttaaggattctggttattgaccttgatccgcaatcttcagcaacgatgtttttaagccataaacactctattggtatcgtaaacgcaacatctgcacaggctatgttgcagaatgtaagccgtgaagagctgttagaggagtttattgttccttctgttgtacctggggttgacgttatgcctgcgtcgattgacgatgcctttattgcatccgattggagagagctgtgcaatgagcatctaccgggtcagaacatccatgctgtcctgaaagaaaatgtgattgataagctgaagagcgattatgactttatcctcgttgatagtggtcctcaccttgacgccttcctgaaaaatgctttggcctcggccaatatactgtttacacctctgccgccagcaactgtcgatttccactcatcgcttaaatacgtggcccgccttcatgagttggtgaaactcatttcgaatgaaggctgcgagtgccagcttgcgactaccattggttttatgtccaagttgagtaacaaggcagaccataagtattgccatagcctggctaaagaagtgttcggtggggatatgcttgatgtcttcctccctcgccttgacggttttgaacgctgcggcgagtcttttgacactgttatttcagctaacccggcaacgtatgttggtagtgctgatgcattgaagaacgcgcgaattgccgcggaagattttgctaaagcagtttttgaccagaacgtagggttgcgggttttagtcacggaccaggagatcagcgttcaggaagcgcaaaatttagcgaaagacgttcagacagcattgcagcacagcattcgagaaataggtctgcgtttgatgcgaatgaaaaatgatgggatgagtcagaaggatattgcagccaaagaagggctgtctcaggcgaaggtcacgcgtgctctccaggcagcgagtgctccggaagaattagtcgcccttttccctgtgcagtcggaattaaccttttcggactacaaaacgctttgtgctgttggcgacgaaatggggtacaagaatttagagtttgatcagcttattcaaaacatatccccggaaataaacgacatcttatccattgaagaaatggccgaagatgaagttaaaaataaaatcctgcgcttgataacaaaggaagcctcactactcacggataaaggttctaaagataagtccgtagttactgaattatggaaatttgaggacaaggatcgctttgcaaggaagggcgtgaaaggccgtgcattttcttatgagtttaatcgactctcaaaaaagaagagtaaattgagtaacttacgcgaataccagaatcgtattgcagatatcgcaaaacgctctaaagctgtgcttggctgggcaagcactgcgcagttcggtactgataaccaattcattaaagatgatgccgcgcgtgccgcatctatccttgaagctgcacgtaaagacccggtttttgcgggtatctctgataatgccaccgctcaaatcgctacagcgtgggcaagtgcactggctgactacgccgcagcacataaatctatgccgcgtccggaaattctggcctcctgccaccagacgctggaaaactgcctgatagagtccacccgcaatagcatggatgccactaataaagcgatgctggaatctgtcgcagcagagatgatgagcgtttctgacggtgttatgcgtctgcctttattcctcgcgatgatcctgcctgttcagttgggggcagctaccgctgatgcgtgtaccttcattccggatacgcgtgaccagtccgacatctatgaagtctttaacgtggcaggttcatcttttggttcttatgctgctggtgatgttctggacatgcaatccgtcggtgtgtacagccagttacgtcgccgctatgtgctggtggcaagctccgatggcaccagcaaaaccgcaaccttcaagatggaagacttcgaaggccagaatgtaccaatccgaaaaggtcgcactaacatctacgttaaccgtattaagtctgttgttgataacggttccggcagcctacttcactcgtttactaatgctgctggtgagcaaatcactgttacctgctctctgaactacaacattggtcagattgccctgtcgttctccaaagcgccggataaaggcactgagatcgcaattgagacggaaatcaatattgaagccgctcctgagctgatcccgctgatcaaccacgaaatgaagaaatacaccctgttcccaagtcagttcgttatcgcggctgagcacacggtacaggcggcgtatgaagcacagcgtgaatttggtctggacctgggttccctacagttccgcaccctgaaggaatacctgtctcatgaacaggatatgctgcgtcttcgcatcatgatctggcgcactcttgcgaccgacacctttgacatcgctctgccggttaaccagtcctttgatgtatgggcaaccatcattcgtggcaaattccagactgtatatcgcgacattattgagcgcgttaaatcttctggtgcgatggggatgtttgctggtgctgatgcagcatctttcttcaaacagttgccgaaggatttcttccagccggccgaagactatatccagactccgtatgttcactacatcggtaccccatttaggaccacccacagcacctaa

SEQ ID NO: 156966 - DNA, 4239 bp, Homo sapiens
atgtcattcttttctacgttaaaaacagctttgtctttgaaggagaaacttgctgctactggtgttcttgttctgatttgcgcacttgttggtgctgggtttgcatgggaacgtcatcagctaaagcaagccatagagaaaattggcagtcttgatcaggctgttaaggaacgtgataagtcaataatggatcttaaccagaccattgagacgatgaacaaagcagagcaacattttcacagccaggaagtgaaaaatgaatcagaacaagccaagtatgctgacaggcaaatggaacgaaaagctgaagttcagaaacaactggttgcggcgggtaatgttcgccagcgtattcctgctgacactcagcggttgctccgggagtcgatcagcgaatttaacgccgacgccgacaaagggatttttatgtctgataaagtaacagtaaagcaaactatcaacaaagcgacttcaatctacaaaattgagcaaatcactgttggcaagccaggatctgaacaataccgtcgtgctttcgagcttgccgatcagcttggtttaaaacacccggattgcattgagcatgtatttccgacctatgctgatgagcaatgtactcatgttcttaccgaagaggattttttcagcactgaagaacgagaaggcgttgatcgctgcattggtgtgatttgttcttcggtaagtgatgagttattccctaatgtgcctgaatatggtggtattggataccaattcctgtacgagggcgatgagcttaaatgctatgaacatgacattgaaagtaaggcaaaagaactaacagttaattcaaacaacactgtgcagcctgtagcgttgatgcgcttgggggtattcgtgccgaagccatcaaagagcaaaggagaaagtaaagagattgatgccaccaaagcgttttcccagctggagatagctaaagccgagggttacgatgatattaaaatcaccggtcctcgactcgatatggatactgatttcaaaacgtggatcggtgtcatctacgcgttcagcaaatacggcttgtcctcaaacaccatccagttatcgtttcaggaattcgctaaagcctgtggtttcccctcaaaacgtctggatgcgaaactgcgtttaaccattcatgaatcacttggacgcttgcgtaacaagggtatcgcttttaagcgcggaaaagatgctaaaggcggctatcagactggtctgctgaagaaagaagctgcacaagccatttacactttcatcgaaagccttccgcagaacccgttgccgctatcgttcgcgcgaatccgtgagcgcctggctttgcagtcagctgttggcgagcaaaaccgtatcattaagaaagcgatagaacagcttaaaacaatcggctatctcgactgttctattgagaagaaaggccgggaaacacacatatttgataccagcgatccctccacagcacataattcaatgcgacttcaccagttgatagagagtgaagcttggctgcccattgaagcaggaaatcaccaaaatgattcaggctacaacctgaacaatgtaagccgtgaagagctgttagaggagtttattgttccttctgttgtacctggggttgacgttatgcctgcgtcgattgacgatgcctttattgcatccgattggagagagctgtgcaatgagcatctaccgggtcagaacatccatgctgtcctgaaagaaaatgtgattgataagctgaagagcgattatgactttatcctcgttgatagtggtcctcaccttgacgccttcctgaaaaatgctttggcctcggccaatatactgtttacacctctgccgccagcaactgtcgatttccactcatcgcttaaatacgttgcccgccttcctgagttgaaaaacagaccaacaattgggcgaacccttaatccttcaatattaagcggatttgatagttcttcagcctctggcgatcgagtcgagcaggtattcaagttatcaactggtcgccaggccacatttattgaagaggtaatacctccgaaccaggtagaaagcgatacctttgttgatcagcataacaacgggcgtgaccaggcatctcttacgccaaaatcattaaaaagtatccgaagcactattaagcatcagcaattttaccctgcaataggtgttagacgggctacagggaaaattgaaattttggatggttcccggcgtcgagcttctgccatcttagagaacgtagggttgcgggttttagtcacggaccaggagatcagcgttcaggaagcgcaaaatttagcgaaagacgttcagacagcattgcagcacagcattcgagaaataggtctgcgtttgatgcgaatgaaaaatgatgggatgagtcagaaggatattgcagccaaagaagggctgtctcaggcgaaggtcacgcgtgctctccaggcagcgagtgctccggaagaattagtcgcccttttccctgtgcagtcggaattaaccttttcggactacaaaacgctttgtgctgttggcgacgaaatggggtacaagaatttagagtttgatcagcttattcaaaacatatccccggaaataaacgacatcttatccattgaagaaatggccgaagatgaagttaaaaataaaatcctgcgcttgataacaaaggaagcctcactactcacggataaaggttctaaagataagtccgtagttactgaattatggaaatttgaggacaaggatcgctttgcaaggaagcgcgtgaaaggccgtgcattttcttatgagtttaatcgactctcaaaagagaagagtaaattgagtaacttacgcgaataccagaatcgtattgcagatatcgcaaaacgctctaaagctgtgcttggctgggcaagcactgcgcagttcggtactgataaccaattcattaaagatgatgccgcgcgtgccgcatctatccttgaagctgcacgtaaagacccggtttttgcgggtatctctgataatgccaccgctcaaatcgctacagcgtgggcaagtgcactggctgactacgccgcagcacataaatctatgccgcgtccggaaattctggcctcctgccaccagacgctggaaaactgcctgatagagtccacccgcaatagcatggatgccactaataaagcgatgctggaatctgtcgcagcagagatgatgagcgtttctgacggtgttatgcgtctgcctttattcctcgcgatgatcctgcctgttcagttgggggcagctaccgctgatgcgtgtaccttcattccggttacgcgtgaccagtccgacatctatgaagtctttaacgtggcaggttcatcttttggttcttatgctgctggtgatgttctggacatgcaatccgtcggtgtgtacagccagttacgtcgccgctatgtgctggtggcaagctccgatggcaccagcaaaaccgcaaccttcaagatggaagacttcgaaggccagaatgtaccaatccgaaaaggtcgcactaacatctacgttaaccgtattaagtctgttgttgataacggttccggcagcctacttcactcgtttactaatgctgctggtgagcaaatcactgttacctgctctctgaactacaacattggtcagattgccctgtcgttctccaaagcgccggataaaggcactgagatcgcaattgagacggaaatcaatattgaagccgctcctgagctgatcccgctgatcaaccacgaaatgaagaaatacaccctgttcccaagtcagttcgttatcgcggctgagcacacggtacaggcggcgtatgaagcacagcgtgaatttggtctggacctgggttccctacagttccgcaccctgaaggaatacctgtctcatgaacaggatatgctgcgtcttcgcatcatgatctggcgcactcttgcgaccgacacctttgacatcgctctgccggttaaccagtcctttgatgtatgggcaaccatcattcgtggcaaattccagactgtatatcgcgacattattgagcgcgttaaatcttctggtgcgatggggatgtttgctggtgctgatgcagcatctttcttcaaacagttgccgaaggatttcttccagccagccgaagactatatccagactccgtatgttcactacatcggtaccccatttaggaccacccacagcacctaa

SEQ ID NO: 156967 - DNA, 1953 bp, Homo sapiens
ttaggtgctgtgggtggtcctaaatggggtaccgatgtagtgaacatacggagtctggatatagtcttcggctggctggaagaaatccttcggcaactgtttgaagaaagatgctgcatcagcaccagcaaacatccccatcgcaccagaagatttaacgcgctcaataatgtcgcgatatacagtctggaatttgccacgaatgatggttgcccatacatcaaaggactggttaaccggcagagcgatgtcaaaggtgtcggtcgcaagagtgcgccagatcatgatgcgaagacgcagcatatcctgttcatgagacaggtattccttcagggtgcggaactgtagggaacccaggtccagaccaaattcacgctgtgcttcatacgccgcctgtaccgtgtgctcagccgcgataacgaactgacttgggaacagggtgtatttcttcatttcgtggttgatcagcgggatcagctcaggagcggcttcaatattgatttccgtctcaattgcgatctcagtgcctttatccggcgctttggagaacgacagggcaatctgaccaatgttgtagttcagagagcaggtaacagtgatttgctcaccagcagcattagtaaacgagtgaagtaggctgccggaaccgttatcaacaacagacttaatacggttaacgtagatgttagtgcgaccttttcggattggtacattctggccttcgaagtcttccatcttgaaggttgcggttttgctggtgccatcggagctagtctcgctcatcatctctgctgcgacagattccagcatcgctttattagtggcatccatgctattgcgggtggactctatcaggcagttttccagcgtctggtggcaggaggccagaatttccggacgcggcatagatttatgtgctgcggcgtagtcagccagtgcacttgcccacgctgtagcgatttgagcggtggcattatcagagatacccgcaaaaaccgggtctttacgtgcagcttcaaggatagatgcggcacgcgcggcatcatctttaatgaattggttatcagtaccgaactgcgcagtgcttgcccagccaagcacagctttagagcgttttgcgatatctgcaatacgattctggtattcgcgtaagttactcaatttactcttctcttttgagagtcgattaaactcataagaaaatgcacggcctttcacgcgcttccttgcaaagcgatccttgtcctcaaatttccataattcagtaactacggacttatctttagaacctttatccgtgagtagtgaggcttcctttgttatcaagcgcaggattttatttttaacttcatcttcggccatttcttcaatggataagatgtcgtttatttccggggatatgttttgaataagctgatcaaactctaaattcttgttccccatttcgtcgccaacagcacaaagcgttttgtagtccgaaaaggttaattccgactgcacagggaaaagggcgactaattcttccggagcactcgctgcctggagagcacgcgtgaccttcgcctgagacagcccttctttggctgcaatatccttctgactcatcccatcatttttcattcgcatcaaacgcagacctatttctcgaatgctgtgctgcaatgctgtctgaacgtctttcgctaaattttgcgcttcctgaacgctgatctcctggtccgtgactaaaacccgcaaccctacgttctctaagatggcagaagctcgacgccgggaaccatccaaaatttcaattttccctgtcgcccgtctaacacctattgcagggtaaaattgctgatgcttaatagtgcttcggatactttttaatgattttggcgtaagagatgcctggtcacgcccgttgttatgctgatcaacaaaggtatcgctttctacctggttcggaggcat

SEQ ID NO: 156968 - DNA, 1295 bp, Homo sapiens
ggagtctggatatagtcttcggctggctggaagaaatcttcggcaactgttgaaagaaagatgctgcatcagcaccagcaaacatccccatcgcaccagaagatttaacgcgctcaataatgtcgcgatatacagtctggaatttgccacgaatgatggttgcccatacatcaaaggactggttaaccggcagagcgatgtcaaaggtgtcggtcgcaagagtgcgccagatcatgatgcgaagacgcagcatatcctgttcatgagacaggtattccttcagggtgcggaacgtgtgctcagccgcgataacgaactgacttgggaacagggtgtatttcttcatttcgtggttgatcagcgggatcagctcaggagcggcttcaatattgatttccgtctcaattgcgatctcagtgcctttatccggcgctttggagaacgacagggcaatctgaccaatgttgtagttcagagagcaggtaacagtgatttgctcaccagcagcattagtaaacgagtgaagtaggctgccggaaccgttatcaacaacagacttaatacggttaacgtagatgttagtgcgaccttttcggattggtacattctggccttcgaagtcttccatcttgaaggttgcggttttgctggtgccatcggagcttgccaccagcacatagcggcgacgtaactggctgtacacaccgacggattgcatgtccagaacatcaccagcagcataagaaccaaaagatgaacctgccacgttaaagacttcatagatgtcggactggtcacgcgtaaccggaatgaaggtacacgcatcagcggtagctgcccccaactgaacaggcaggatcatcgcgaggaataaaggcagacgcataacaccgtcagaaacgctcatcatctctgctgcgacagattccagcatcgctttattagtggcatccatgctattgcgggtggactctatcaggcagttttccagcgtctggtggcaggaggccagaatttccggacgcggcatagatttatgtgctgcggcgtagtcagccagtgcacttgcccacgctgtagcgatttgagcggtggcattatcagagatacccgcaaaaaccgggtctttacgtgcagcttcaaggatagatgcggcacgcgcggcatcatctttaatgaattggttatcagtaccgaactgcgcagtgcttgcccagccaagcacagctttagagcgttttgcgatacctgcaatacgattctggtattcgcgtaagttactcaatttactcttc

SEQ ID NO: 156969 - DNA, 2174 bp, Homo sapiens
ttaggtgctgtgggtggtcctaaatggggtaccgatgtagtgaacatacggagtctggatatagtcttcggctggctggaagaaatccttcggcaactgtttgaagaaagatgctgcatcagcaccagcaaacatccccatcgcaccagaagatttaacgcgctcaataatgtcgcgatatacagtctggaatttgccacgaatgatggttgcccatacatcaaaggactggttaaccggcagagcgatgtcaaaggtgtcggtcgcaagagtgcgccagatcatgatgcgaagacgcagcatatcctgttcatgagacaggtattccttcagggtgcggaactgtagggaacccaggtccagaccaaattcacgctgtgcttcatacgccgcctgtaccgtgtgctcagccgcgataacgaactgacttgggaacagggtgtatttcttcatttcgtggttgatcagcgggatcagctcaggagcggcttcaatattgatttccgtctcaattgcgatctcagtgcctttatccggcgctttggagaacgacagggcaatctgaccaatgttgtagttcagagagcaggtaacagtgatttgctcaccagcagcattagtaaacgagtgaagtaggctgccggaaccgttatcaacaacagacttaatacggttaacgtagatgttagtgcgaccttttcggattggtacattctggccttcgaagtcttccatcttgaaggttgcggttttgctggtgccatcggagcttgccaccagcacatagcggcgacgtaactggctgtacacaccgacggattgcatgtccagaacatcaccagcagcataagaaccaaaagatgaacctgccacgttaaagacttcatagatgtcggactggtcacgcgtaaccggaatgaaggtacacgcatcagcggtagctgcccccaactgaacaggcaggatcatcgcgaggaataaaggcagacgcataacaccgtcagaaacgctcatcatctctgctgcgacagattccagcatcgctttattagtggcatccatgctattgcgggtggactctatcaggcagttttccagcgtctggtggcaggaggccagaatttccggacgcggcatagatttatgtgctgcggcgtagtcagccagtgcacttgcccacgctgtagcgctttgaacggtggcattatcaaagatatgcacaaaaaccgggtctttacgtgcagcttcaaggatagatgcggcacgcgcggcatcatctttaatgaattggttatcagtaccgaactgcgcagtgcttgcccagccaagcacagctttagagcgttttgcgatatctgcaatacgattcctcttccttgcaaagcgatccttgccctcaaatttccataattcagtaactacggacttatctttagaacctttatccgtgagtagtgaggcttcctttgttatcaagcgcaggattttatttttaacttcatcttcggccatttcttcaatggataagatgtcgtttatttccggggatatgttttgaataagctgatcaaactctaaattcttgttccccatttcgtcgccaacagcacaaagcgttttgtagtccgaaaaggttaattccgactgcacagggaaaagggcgactaattcttccggagcactcgctgcctggagagcacgcgtgaccttcgcctgagacagcccttctttggctgcaatatccttctgactcatcccatcatttttcattcgcatcaaacgcagacctatttctcgaatgctgtgctgcaatgctgtctgaacgtctttcgctaaattttgcgcttcctgaacgctgatctcctggtccgtgactaaaacccgcaaccctacgttctctaagatggcagaagctcgacgccgggaaccatccaaaatttcaattttccctgtagcccgtctaacacctattgcagggtaaaattgctgatgcttaatagtgcttcggatactttttaatgattttggcgtaagagatgcctggtcacgcccgttgttatgctgatcaacaaaggtatcgctttctacctggttcggaggtattacctcttcaataaatgtggcctggcgaccagttgataacttgaatacctgctcgactcgatcgccagagg

SEQ ID NO: 156970 - DNA, 1504 bp, Homo sapiens
cgatgtagtgaacatacggagtctggatatagtcttcggctggctggaagaaatccttcggcaactgtttgaagaaagatgctgcatcagcaccagcaaacatccccatcgcaccagaagatttaacgcgctcaataatgtcgcgatatacagtctggaatttgccacgaatgatggttgcccatacatcaaaggactggttaaccggcagagcgatgtcaaaggtgtcggtcgcaagagtgcgccagatcatgatgcgaagacgcagcatatcctgttcatgagacaggtattccttcagggtgcggaactgtagggaacccaggtccagaccaaattcacgctgtgcttcatacgccgcctgtaccgtgtgctcagccgcgataacgaactgacttgggaacagggtgtatttcttcatttcgtggttgatcagcgggatcagctcacgagcggcttcaatattgatgtccgtctcaattgcgatctcagtgcctttatccggcgttgggaacagggtgtatttcttcatttcgtggttgatcagcgggatcagctcaggagcggcttcaatattgatttccgtctcaattgcgatctcagtgcctttatccggcgctttggagaacgacagggcaatctgaccaatgttgtagttcagagagcaggtaacagtgatttgctcaccagcagcattagtaaacgagtgaagtaggctgccggaaccgttatcaacaacagacttaatacggttaacgtagatgttagtgcgaccttttcggattggtacattctggccttcgaagtcttccatcttgaaggttgcggttttgctggtgccatcggagcttgccaccagcacatagcggcgacgtaactggctgtacacaccgacggattgcatgtccagaacatcaccagcagcataagaaccaaaagatgaacctgccacgttaaagacttcatagatgtcggactggtcacgcgtaaccggaatgaaggtacacgcatcagcggtagctgcccccaactgaacaggcaggatcatcgcgaggaataaaggcagacgcataacaccgtcagaaacgctcatcatctctgctgcgacagattccagcatcgctttattagtggcatccatgctattgcgggtggactctatcaggcagttttccagcgtctggtggcaggaggccagaatttccggacgcggcatagatttatgtgctgcggcgtagtcagccagtgcacttgcccacgctgtagcgatttgagcggtggcattatcagagatacccgcaaaaaccgggtctttacgtgcagcttcaaggatagatgcggcacgcgcggcatcatctttaatgaattggttatcagtaccgaactgcgcagtgcttgcccagccaagcacagctttagagcgttttgcgatatctgcaatacgattctggtattcgcgtaagttactcaatttactcttctcatcatctgtgtcgacgaacat

SEQ ID NO: 156971 - DNA, 2451 bp, Homo sapiens
atgctcaatgttctgactgaacaagtacagttgcaaaaggatgagctacacgcgaacgagttttaccaggtctatgcgaaagcggcactggcaaaattgcctctactgactcgagcgaacgttgactatgccgtaagtgaaatggaagaaaagggttatgttttcgataaacgccctgctggctcttcaatgaaatatgcgatgtcaattcagaacatcattgacatatatgaacatcgcggagtgccaaaataccgggatcgctacagcgaagcgtatgtgattttcatctccaatcttaaaggcggtgtgtcaaaaactgtatcgacggtttctctggcgcatgcaatgcgtgctcaccctcatcttcttatggaggatttaaggattctggttattgaccttgatccgcaatcttcagcaacgatgtttttaagccataaacactctattggtatcgtaaacgcaacatctgcacaggctatgttgcagaatgtaagccgtgaagagctgttagaggagtttattgttccttctgttgtacctggggttgacgttatgcctgcgtcgattgacgatgcctttattgcatccgattggagagagctgtgcaatgagcatctaccgggtcagaacatccatgctgtcctgaaagaaaatgtgattgataagctgaagagcgattatgactttatcctcgttgatagtggtcctcaccttgacgccttcctgaaaaatgctttggcctcggccaatatactgtttacacctctgccgccagcaactgtcgatttccactcatcgcttaaatacgttgcccgccttcctgagttggtgaaactcatttcggatgaaggctgcgagtgccagcttgcgactaacattggttttatgtccaagttgagtaacaaggcagaccataagtattgccatagcctggctaaagaagtgttcggtggggatatgcttgatgtcttcctccctcgccttgacggttttgaacgctgcggcgagtcttttgacactgttatttcagctaacccggcaacgaagagtaaattgagtaacttacgcgaataccagaatcgtattgcagatatcgcaaaacgctctaaagctgtgcttggctgggcaagcactgcgcagttcggtactgataaccaattcattaaagatgatgccgcgcgtgccgcatctatccttgaagctgcacgtaaagacccggtttttgcgggtatctctgataatgccaccgctcaaatcgctacagcgtgggcaagtgcactggctgactacgccgcagcacataaatctatgccgcgtccggaaattctggcctcctgccaccagacgctggaaaactgcctgatagagtccaaccgcaatagcatggatcccaataataaagcgatgctggaatctgtcgcagcagagatgatgagcgtttctgacggtgttatgcgtctgcctttattcctcgcgatgatcctgcctgttcagttgggggcagctaccgctgatgcgtgtaccttcattccggttacgcgtgaccagtccgacatctatgaagtctttaacgtggcaggttcatcttttggttcttatgctgctggtgatgttctggacatgcaatccgtcggtgtgtacagccagttacgtcgccgctatgtgctggtggcaagctccgatggcaccagcaaaaccgcaaccttcaagatggaagacttcgaaggccagaatgtaccaatccgaaaaggtcgcactaacatctacgttaaccgtattaagtctgttgttgataacggttccggcagcctacttcactcgtttactaatgctgctggtgagcaaatcactgttacctgctctctgaactacaacattggtcagattgccctgtcgttctccaaagcgccggataaaggcactgagatcgcaattgagacggaaatcaatattgaagccgctcctgagctgatcccgctgatcaaccacgaaatgaagaaatacaccctgttcccaagtcagttcgttatcgcggctgagcacacggtacaggcggcgtatgaagcacagcgtgaatttggtctggacctgggttccctacagttccgcaccctgaaggaatacctgtctcatgaacaggatatgctgcgtcttcgcatcatgatctggcgcactcttgcgaccgacacctttgacatcgctctgccggttaaccagtcctttgatgtatgggcaaccatcattcgtggcaaattccagactgtatatcgcgacattattgagcgcgttaaatcttctggtgcgatggggatgtttgctggtgctgatgcagcatctttcttcaaacagttgccgaaggatttcttccagccagccgaagactatatccagactccgtatgttcactacatcggtaccccatttaggaccacccacagcacctaa

SEQ ID NO: 156972 - DNA, 2982 bp, Homo sapiens
atgctcaatgttctgactgaacaagtacagttgcaaaaggatgagctacacgcgaacgagttttaccaggtctatgcgaaagcggcactggcaaaattgcctctactgactcgagcgaacgttgactatgccgtaagtgaaatggaagaaaagggttatgttttcgataaacgccctgctggctcttcaatgaaatatgcgatgtcaattcagaacatcattgacatatatgaacatcgcggagtgccaaaataccgggatcgctacagcgaagcgtatgtgattttcatctccaatcttaaaggcggtgtgtccccaactgtatcgacggtttctctggcgcatgcaatgcgtgctcaccctcatcttcttatggaggatttaaggattctggttattgaccttgatccgcaatcttcagcaacgatgtttttaagccataaacactctattggtatcgtaaacgcaacatctgcacaggctatgttgcagaatgtaagccgtgaagagctgttagaggagtttattgttccttctgttgtacctggggttgacgttatgcctgcgtcgattgacgatgcctttattgcatccgattggagagagctgtgcaatgagcatctaccgggtcagaacatccatgctgtcctgaaagaaaatgtgattgataagctgaagagcgattatgactttatcctcgttgatagtggtcctcaccttgacgccttcctgaaaaatgctttggcctcggccaatatactgtttacacctctgccgccagcaactgtcgatttccactcatcgcttaaatacgttgcccgccttcctgagttgaaaaacagaccaacaattgggcgaacccttaatccttcaatattaagcggatttgatagttcttcagcctctggcgatcgagtcgagcaggtattcaagttatcaactggtcgccaggccacatttattgaagaggtaatacctccgaaccaggtagaaagcgatacctttgttgatcagcataacaacgggcgtgaccaggcatctcttacgccaaaatcattaaaaagtatccgaagcactattaagcatcagcaattttaccctgcaataggtgttagacgggctacagggaaaattgaaattttggatggttcccggcgtcgagcttctgccatcttagagaacgtagggttgcgggttttagtcacggaccaggagatcagcgttcaggaagcgcaaaatttagcgaaagacgttcagacagcattgcagcacagcattcgagaaataggtctgcgtttgatgcgaatgaaaaatgatgggatgagtcagaaggatattgcagccaaagaagggctgtctcaggcgaaggtcacgcgtgctctccaggcagcgagtgctccggaagaattagtcgcccttttccctgtgcagtcggaattaaccttttcggactacaaaacgctttgtgctgttggcgacgaaatggggtacaagaatttagagtttgatcagcttattcaaaacatatccccggaaataaacgacatcttatccattgaagaaatggccgaagatgaagttaaaaataaaatcctgcgcttgataacaaaggaagcctcactactcacggataaaggttctaaagataagtccgtagttactgaattatggaaatttgaggacaaggatcgctttgcaaggaagcgcgtgaaaggccgtgcattttcttatgagtttaatcgactctcaaaagagaagagtaaattgagtaacttacgcgaataccagaatcgtattgcagatatcgcaaaacgctctaaagctgtgcttggctgggcaagcactgcgcagttcggtactgataaccaattcattaaagatgatgccgcgcgtgccgcatctatccttgaagctgcacgtaaagacccggtttttgcgggtatctctgataatgccaccgctcaaatcgctacagcgtgggcaagtgcactggctgactacgccgcagcacataaatctatgccgcgtccggaaattctggcctcctgccaccagacgctggaaaactgcctgatagagtccacccgcaatagcatggatgccactaataaagcgatgctggaatctgtcgcagcagagatgatgagcgtttctgacggtgttatgcgtctgcctttattcctcgcgatgatcctgcctgttcagttgggggcagctaccgctgatgcgtgtaccttcattccggttacgcgtgaccagtccgacatctatgaagtctttaacgtggcaggttcatcttttggttcttatgctgctggtgatgttctggacatgcaatccgtcggtgtgtacagccagttacgtcgccgctatgtgctggtggcaagctccgatggcaccagcaaaaccgcaaccttcaagatggaagacttcgaaggccagaatgtaccaatccgaaaaggtcgcactaacatctacgttaaccgtattaagtctgttgttgataacggttccggcagcctacttcactcgtttactaatgctgctggtgagcaaatcactgttacctgctctctgaactacaacattggtcagattgccctgtcgttctccaaagcgccggataaaggcactgagatcgcaattgagacggaaatcaatattgaagccgctcctgagctgatcccgctgatcaaccacgaaatgaagaaatacaccctgttcccaagtcagttcgttatcgcggctgagcacacggtacaggcggcgtatgaagcacagcgtgaatttggtctggacctgggttccctacagttccgcaccctgaaggaatacctgtctcatgaacaggatatgctgcgtcttcgcatcatgatctggcgcactcttgcgaccgacacctttgacatcgctctgccggttaaccagtcctttgatgtatgggcaaccatcattcgtggcaaattccagactatatattga

SEQ ID NO: 156973 - DNA, 3279 bp, Homo sapiens
atgctcaatgttctgactgaacaagtacagttgcaaaaggatgagctacacgcgaacgagttttaccaggtctatgcgaaagcggcactggcaaaattgcctctactgactcgagcgaacgttgactatgccgtaagtgaaatggaagaaaagggttatgttttcgataaacgccctgctggctcttcaatgaaatatgcgatgtcaattcagaacatcattgacatatatgaacatcgcggagtgccaaaataccgggatcgctacagcgaagcgtatgtgattttcatctccaatcttaaaggcggtgtgtcaaaaactgtatcgacggtttctctggcgcatgcaatgcgtgctcaccctcatcttcttatggaggatttaaggattctggttattgaccttgatccgcaatcttcagcaacgatgtttttaagccataaacactctattggtatcgtaaacgcaacatctgcacaggctatgttgcagaatgctatgttgcagaatgtaagccgtgaagagctgttagaggagtttattgttccttctgttgtacctggggttgacgttatgcctgcgtcgattgacgatgcctttattgcatccgattggagagagctgtgcaatgagcatctaccgggtcagaacatccatgctgtcctgaaagaaaatgtgattgataagctgaagagcgattatgactttatcctcgttgatagtggtcctcaccttgacgccttcctgaaaaatgctttggcctcggccaatatactgtttacacctctgccgccagcaactgtcgatttccactcatcgcttaaatacgttgcccgccttcctgagttggtgaaactcatttcggatgaaggctgcgagtgccagcttgcgactaacattggttttatgtccaagttgagtaacaaggcagaccataagtattgccatagcctggctaaagaagtgttcggtggggatatgcttgatgtcttcctccctcgccttgacggttttgaacgctgcggcgagtcttttgacactgttatttcagctaacccggcaacgtatgttggtagtgctgatgcattgaagaacgcgcgaattgccgcggaagattttgctaaagcagtttttgacccctctggcgatcgagtcgagcaggtattcaagttatcaactggtcgccaggccacatttattgaagaggtaatacctccgaaccaggtagaaagcgatacctttgttgatcagcataacaacgggcgtgaccaggcatctcttacgccaaaatcattaaaaagtatccgaagcactattaagcatcagcaattttaccctgcaataggtgttagacgggctacagggaaaattgaaattttggatggttcccggcgtcgagcttctgccatcttagagaacgtagggttgcgggttttagtcacggaccaggagatcagcgttcaggaagcgcaaaatttagcgaaagacgttcagacagcattgcagcacagcattcgagaaataggtctgcgtttgatgcgaatgaaaaatgatgggatgagtcagaaggatattgcagccaaagaagggctgtctcaggcgaaggtcacgcgtgctctccaggcagcgagtgctccggaagaattagtcgcccttttccctgtgcagtcggaattaaccttttcggactacaaaacgctttgtgctgttggcgacgaaatggggaacaagaatttagagtttgatcagcttattcaaaacatatccccggaaataaacgacatcttatccattgaagaaatggccgaagatgaagttaaaaataaaatcctgcgcttgataacaaaggaagcctcactactcacggataaaggttctaaagataagtccgtagttactgaattatggaaatttgaggacaaggatcgctttgcaaggaagcgcgtgaaaggccgtgcattttcttatgagtttaatcgactctcaaaagagaagagtaaattgagtaacttacgcgaataccagaatcgtattgcagatatcgcaaaacgctctaaagctgtgcttggctgggcaagcactgcgcagttcggtactgataaccaattcattaaagatgatgccgcgcgtgccgcatctatccttgaagctgcacgtaaagacccggtttttgcgggtatctctgataatgccaccgctcaaatcgctacagcgtgggcaagtgcactggctgactacgccgcagcacataaatctatgccgcgtccggaaattctggcctcctgccaccagacgctggaaaactgcctgatagagtccacccgcaatagcatggatgccactaataaagcgatgctggaatctgtcgcagcagaagcgttgatgatgagcgtttctgacggtgttatgcgtctgcctttattcctcgcgatgatcctgcctgttcagttgggggcagctaccgctgatgcgtgtaccttcattccggttacgcgtgaccagtccgacatctatgaagtctttaacgtggcaggttcatcttttggttcttatgctgctggtgatgttctggacatgcaatccgtcggtgtgtacagccagttacgtcgccgctatgtgctggtggcaagctccgatggcaccagcaaaaccgcaaccttcaagatggaagacttcgaaggccagaatgtaccaatccgaaaaggtcgcactaacatctacgttaaccgtattaagtctgttgttgataacggttccggcagcctacttcactcgtttactaatcctgctggtgagcaaatcactgttacctgctctctgaactacaacattggtcagattgccctgtcgttctccaaagcgccggataaaggcactgagatcgcaattgagacggaaatcaatattgaagccgctcctgagctgatcccgctgatcaaccacgaaatgaagaaatacaccctgttcccaaggaaattgtggggtctttgcatcatgatctggcgcactcttgcgaccgacacctttgacatcgctctgccggttaaccagtcctttgatgtatgggcaaccatcattcgtggcaaattccagactgtatatcgcgacattattgagcgcgttaaatcttctggtgcgatggggatgtttgctggtgctgatgcagcatctttcttcaaacagttgccgaaggatttcttccagccagccgaagactatatccagactccgtatgttcactacatcggtaccccatttaggaccacccacagcacctaa

SEQ ID NO: 156974 - DNA, 2790 bp, Homo sapiens
atgacaaagtgctcgcacttgtgcaataactatctcttctcctggttgcgtgataacggaattctgatcgcaaccggtgaacgcaggaacgtccgcaaacaagaatacatatctcgtgggtatttcacccttaaagaaaccgtgatcgatacaagcaatggaagcaggatttctttcacgactcgtataaccggcaaaggtcagcagtggctgatgaagcgattgcttgatgctgacgtagtaagaaccaccagcattgtaatgctggctaaagtcactttcctgagctgtataacgatgagcgattttactttttctggctatgaattggcctgctttgtaacacactccggtctatcccgtagcgccgggcatatcctgtcgcaatgtgcaaatctcgcggcaacaaccagtgaatacttcattcacaagcctcaccgcctgatcacggcagaaactggttatagccaatcaaccgtcgttcgtgcattccgtgaagctgtaaacaaaggaattctgtctgtagagattgttatcggcgatcaccgtgaacgtcgcgctaacctgtaccggtttacaccatcctttttggccttcgcacaacaagccaaaaatgcgctgatagaaagcaaattaaagatctcttcagcggcaaccaaggttaaagctgttctcgctaagacattggctttatttaattttttatccacacccccatgtcaaaatgataccccctccccctgtcaggatgacgtggcaataaagaataagaagtcacaagttaaaaaaacaaaaagatcagtttccggcggtgccggaacaaccagcctcaaaaaattgacttcatggatcgctaaggcaaaagcaaaggctgacaatctgcggttatccaaaaaacgcactcaaaaacatgagttcaagcagaaagtagaggcggctgcgcggaaatatgcttacctgaagaacaagcgttcgcctgatattggcgggatatcaaacttcgataacctaccgcattgcatgacggtaaacgaagctcttaatgcggttttagccaaaaataaagataacgaacaatggggtgcggttgctggcgcctatatcgccgacatcaccgatggggaagatcgggctcgccacttcgggctcatgagcgcttgtttcggcgtgggttcaggggtatacatgcagactcggtatagaggtaaacttgtgtcacaggggtttgttgtacagatgattttgacacccagggatgctgatgggacttttattacctccacagacagtgagaccgtgcactaccactatggccctaaggacctggtcacaatcttgttctacatcttcatcaccatcatcttgcatgctgtggttcaggagtacattttagataaaatcagcaaacggcttcatctctccaaagtcaaacacagcaagttcaatgaatctggacagctggtcgtctttcatttcacctcggtgatttggtgcttctacgtggtggtgacgactccacaggccctaacaagggtcctgaactgtctcctggccctgggctccaacgctgctgtcatgggtgaatgcggttttgctcagctccagcagacgtgggcaagtgcactggctgactacgccgcagcacataaatctatgccgcgtccggaaattctggcctcctgccaccagacgctggaaaactgcctgatagagtccacccgcaatagcatggatgccactaataaagcgatgctggaatctgtcgcagcagagatgatgagcgtttctgacggtgttatgcgtctgcctttattcctcgcgatgatcctgcctgttcagttgggggcagctaccgctgatgcgtgtaccttcattccggttacgcgtgaccagtccgacatctatgaagtctttaacgtggcaggttcatcttttggttcttatgctgctggtgatgttctggacatgcaatccgtcggtgtgtacagccagttacgtcgccgctatgtgctggtggcaagctccgatggcaccagcaaaaccgcaaccttcaagatggaagacttcgaaggccagaatgtaccaatccgaaaaggtcgcactaacatctacgttaaccgtattaagtctgttgttgataacggttccggcagcctacttcactcgtttactaatgctgctggtgagcaaatcactgttacctgctctctgaactacaacattggtcagattgccctgtcgttctccaaagcgccggataaaggcactgagatcgcaattgagacggaaatcaatattgaagccgctcctgagctgatcccgctgatcaaccacgaaatgaagaaatacaccctgttcccaagtcagttcgttatcgcggctgagcacacggtacaggcggcgtatgaagcacagcgtgaatttggtctggacctgggttccctacagttccgcaccctgaaggaatacctgtctcatgaacaggatatgctgcgtcttcgcatcatgatctggcgcactcttgcgaccgacacctttgacatcgctctgccggttaaccagtcctttgatgtatgggcaaccatcattcgtggcaaattccagactgtatatcgcgacattattgagcgcgttaaatcttctggtgcgatggggatgtttgctggtgctgatgcagcatctttcttcaaacagttgccgaaggatttcttccagccagccgaagactatatccagactccgtatgttcactacatcggtaccccatttaggaccacccacagcacctaa

SEQ ID NO: 156975 - DNA, 3438 bp, Homo sapiens
atgctcaatgttctgactgaacaagtacagttgcaaaaggatgagctacacgcgaacgagttttaccaggtctatgcgaaagcggcactggcaaaattgcctctactgactcgagcgaacgttgactatgccgtaagtgaaatggaagaaaagggttatgttttcgataaacgccctgctggctcttcaatgaaatatgcgatgtcaattcagaacatcattgacatatatgaacatcgcggagtgccaaaataccgggatcgctacagcgaagcgtatgtgattttcatctccaatcttaaaggcggtgtgtcaaaaactgtatcgacggtttctctggcgcatgcaatgcgtgctcaccctcatcttcttatggaggatttaaggattctggttattgaccttgatccgcaatcttcagcaacgatgtttttaagccataaacactctattggtatcgtaaacgcaacatctgcacaggctatgttgcagaatgctatgttgcagaatgtaagccgtgaagagctgttagaggagtttattgttccttctgttgtacctggggttgacgttatgcctgcgtcgattgacgatgcctttattgcatccgattggagagagctgtgcaatgagcatctaccgggtcagaacatccatgctgtcctgaaagaaaatgtgattgataagctgaagagcgattatgactttatcctcgttgatagtggtcctcaccttgacgccttcctgaaaaatgctttggcctcggccaatatactgtttacacctctgccgccagcaactgtcgatttccactcatcgcttaaatacgttgcccgccttcctgagttggtgaaactcatttcggatgaaggctgcgagtgccagcttgcgactaacattggttttatgtccaagttgagtaacaaggcagaccataagtattgccatagcctggctaaagaagtgttcggtggggatatgcttgatgtcttcctccctcgccttgacggttttgaacgctgcggcgagtcttttgacactgttatttcagctaacccggcaacgtatgttggtagtgctgatgcattgaagaacgcgcgaattgccgcggaagattttgctaaagcagtttttgacccggatttgatagttcttcagcctctggcgatcgagtcccgcaggtattcgagttatcaactggtcgccaggccacatttattgaagagggtaatacctccgaaccaggtagaaagcgatacctttgttgatcagcataacaacgggcgtgtccaggcatctcttacgccaaaatcattaaaaagtatccgaagcactattaagcatcagcaattttaccctgcaataggtgttagacgggctacagggaaaattgaaattttggatggttcccggcgtcgagcttctgccatcttagagaacgtagggttgcgggttttagtcacggaccaggagatcagcgttcaggaagcgcaaaatttagcgaaagacgttcagacagcattgcagcacagcattcgagaaataggtctgcgtttgatgcgaatgaaaaatgatgggatgagtcagaaggatattgcagccaaagaagggctgtctcaggcgaaggtcacgcgtgctctccaggcagcgagtgctccggaagaattagtcgcccttttccctgtgcagtcggaattaaccttttcggactacaaaacgctttgtgctgttggcgacgaaatggggaacaagaatttagagtttgatcagcttattcaaaacatatccccggaaataaacgacatcttatccattgaagaaatggccgaagatgaagttaaaaataaaatcctgcgcttgataacaaaggaagcctcactactcacggataaaggttctaaagataagtccgtagttactgaattatggaaatttgaggacaaggatcgctttgcaaggaagcgcgtgaaaggccgtgcattttcttatgagtttaatcgactctcaaaagagaagagtaaattgagtaacttacgcgaataccagaatcgtattgcagatatcgcaaaacgctctaaagctgtgcttggctgggcaagcactgcgcagttcggtactgataaccaattcattaaagatgatgccgcgcgtgccgcatctatccttgaagctgcacgtaaagacccggtttttgcgggtatctctgataatgccaccgctcaaatcgctacagcgtgggcaagtgcactggctgactacgccgcagcacataaatctatgccgcgtccggaaattctggcctcctgccaccagacgctggaaaactgcctgatagagtccacccgcaatagcatggatgccactaataaagcgatgctggaatctgtcgcagcagagatgatgagcgtttctgacgcagagatgatgagcgtttctgacggtgttatgcgtctgcctttattcctcgcgatgatcctgcctgttcagttgggggcagctaccgctgatgcgtgtaccttcattccggttacgcgtgaccagtccgacatctatgaagtctttaacgtggcaggttcatcttttggttcttatgctgctggtgatgttctggacatgcaatccgtcggtgtgtacagccagttacgtcgccgctatgtgctggtggcaagctccgatggcaccagcaaaaccgcaaccttcaagatggaagacttcgaaggccagaatgtaccaatccgaaaaggtcgcactaacatctacgttaaccgtattaagtctgttgttgataacggttccggcagcctacttcactcgtttactaatgctgctggtgagcaaatcactgttacctgctctctgaactacaacattggtcagattgccctgtcgttctccaaagcgccggataaaggcactgagatcgcaattgagacggaaatcaatattgaagccgctcctgagctgatcccgctgatcaaccacgaaatgaagaaatacaccctgttcccaagtcagttcgttatcgcggctgagcacacggtacaggcggcgtatgaagcacagcgtgaatttggtctggacctgggttccctacagttccgcaccctgaaggaatacctgtctcatgaacaggatatgctgcgtcttcgcatcatgatctggcgcactcttgcgaccgacacctttgacatcgctctgccggttaaccagtcctttgatgtatgggcaaccatcattcgtggcaaattccagactgtatatcgcgacattattgagcgcgttaaatcttctggtgcgatggggatgtttgctggtgctgatgcagcatctttcttcaaacagttgccgaaggatttcttccagccagccgaagactatatccagactccgtatgttcactacatcggtaccccatttaggaccacccacagcacctaa

SEQ ID NO: 156976 - DNA, 50993 bp, Homo sapiens
  misc_feature (1)...(50993): n = a,t,c or g
ctacaaactgcgcatactggtggacgaacccctctcaattgcgatctcagtgcctttattcggcgctttggagaacgacagggcaatctgaccaatgttgtagttcagagagcaggtaacagtgatttgctcaccagcagcattagtaaacgagtgaagtaggctgccggaaccgttatcaacaacagacttaatacggttaacgtagatgttagtgcgaccttttcggattggtacattctggccttcgaagtcttccatcttgaaggttgcggttttgctggtgccatcggagcttgccaccagcacatagcggcgacgtaactggctgtacacaccgacggattgcatgtccagaacatcaccagcagcataagaaccaaaagatgaacctgccacgttaaagacttcatagatgtcggactggtcacgcgtaaccggaatgaaggtacacgcatcagcggtagctgcccccaactgaacaggcaggatcatcgcgaggaataaaggcagacgcataacaccgtcagaaacgctcatcatctctgctgcgacagattccagcatcgctttattagtggcatccatgctattgcgggtggactccctctcaattgcgatctcagtgcctttatccggcgctttggagaacgacagggcaatctgaccaatgttgtagttcagagagcaggtaacagtgatttgctcaccagcagcattagtaaacgagtgaagtaggctgccggaaccgttatcaacaacagacttaatacggttaacgtagatgttagtgcgaccttttcggattggtacattctggccttcgaagtcttccatcttgaaggttgcggttttgctggtgccatcggagcttgccaccagcacatagcggcgacgtaactggctgtacacaccgacggattgcatgtccagaacatcaccagcagcataagaaccaaaagatgaacctgccacgttaaagacttcatagatgtcggactggtcacgcgtaaccggaatgaaggtacacgcatcagcggtagctgcccccaactgaacaggcaggatcatcgcgaggaataaaggcagacgcataacaccgtcagaaacgctcatcatctctgctgcgacagattccagcatcgctttattagtggcatccatgctattgcgggtggactctatcaggcagttttccagcgtctggtggcaggaggccagaatttccggacgcggcatagatttatgtgctgggggcgtagtcagccagtgcacttgcccacgctgcgcaaaattgagtgacgcatccctctcaattgcgatctcagtgcctttatccggcgctttggagaacgacagggcaatctgaccaatgttgtagttcagagagcaggtaacagtgatttgctcaccagcagcattagtaaacgagtgaagtaggctgccggaaccgttatcaacaacagacttaatacgggtaacgtagatgttagtgcgaccttttcggattggtacattctggccttcgaagtcttccatcttgaaggttgcggttttgctggtgccatcggagcttgccaccagcacatagcggcgacgtaactggctgtacacaccgacggattgcatgtccagaacatcaccagcagcataagaaccaaaagatgaacctgccacgttaaagacttcatagatgtcggactggtcacgcgtaaccggaatgaaaggacacgcatcagcggtagctgcccccaactgaacaggccagatcatcgggaggaataaaggcagacgcataacaccgtcagaaacgctcatcatctctggtgcgacagattccagcatcgctttattagttgcattcatgctattgggggtggactttatcaaggcagttttccacgtctggtggcaggaaggcaagatttccgggacccgcataaaattatgtgcagcagcattagtaaacgagtgaagtaggctgccggaaccgttatcaacaacagacttaatacggttaacgtagatgttattgcgaccttttcggattggtacattctggccttcgaagtcttccatcttgaaggttgcggttttgctggtgccatcggagcttgccaccagcacatagcggcgacgtaactggctgtacacaccgacggattgcatgtccagaacatcaccagcagcataagaaccaaaagatgaacctgccacgttaaagacttcatagatgtcggactggtcacgcgtaaccggaatgaaggtacacgcatcagcggtagctgcccccaactgaacaggcaggatcatcgcgaggaataaaggcagacgcataacaccgtcagaaacgctcatcatctctgctgcgacagattccagcatcgctttattagtggcatccatgctattgcgggtggactctatcaagcagtttttcaacgtctggtggcaggaggccagaaattcccgacgccggataaatttatgtgcagcagcattagtaaacgagtgaagtaggctgccggaaccgttatcaacaacagacttaatacggttaacgtagatgttattgcgaccttttcggattggtacattctggccttcgaagtcttccatcttgaaggttgcggttttgctggtgccatcggagcttgccaccagcacatagcggcgacgtaactggctgtacacaccgacggattgcatgtccagaacatcaccagcagcataagaaccaaaagatgaacctgccacgttaaagacttcatagatgtcggactggtcacgcgtaaccggaatgaaggtacacgcatcagcggtagctgcccccaatcccctctcaattgcgatctcagtgcctttatccggcgctttggagaacgacagggcaatctgaccaatgttgtagttcagagagcaggtaacagtgatttgctcaccagcagcattagtaaacgagtgaagtaggctgccggaaccgttatcaacaacagacttaatacggttaacgtatatgttattgcgaccttttcggattggtacattctggccttcgaagtcttccatcttgaaggttgcggttttgctggtgccatcggagcttgccaccagcacatagcggcgacgtaactggctgtacacaccgacggattgcatgtccagaacatcaccagcagcataagaaccaaaagatgaacctgccacgttaaagacttcatagatgtcggactggtcacgcgtaaccggaatgaaggtacacgcatcagcggtagctgcccccaactgaacaggcaggatcatcgcgaggaataaaggcagacgcataacaccgtcagaaacgctcatcatctctgctgcgacagattccagcatcgctttattagtggcatccatgctattgcgggtggactctatcaagcagttttccagcgtctggtggcaggaggccaaaattttccggacgccgcataaatttatgtgctctgcaccaactttggtgagaactcccctctcaattgcgatctcagtgcctttattcggcgctttggagaacgacagggcaatctgaccaatgttgtagttcagagagcaggtaacagtgatttgctcaccagcagcattagtaaacgagtgaagtaggctgccggaaccgttatcaacaacagacttaatacggttaacgtagatgttagtgcgaccttttcggattggtacattctggccttcgaagtcttccatcttgaaggttgcggttttgctggtgccatcggagcttgccaccagcacatagcggcgacgtaactggctgtacacaccgacggattgcatgtccagaacatcaccagcagcataagaaccaaaagatgaacctgccacgttaaagacttcatagatgtcggactggtcacgcgtaaccggaatgaaggtacacgcatcagcggtagctgcccccaactgaacaggcaggatcatcgcgaggaataaaggcagacgcataacaccgtcagaaacgctcatcatctctgctgcgacagattccagcatcgctttattagtggcatccatgctattgcgggtggactctatcaagcagttttccaacgtctggtggcaggaggccagaatttccggacgcggcataaatttatgtgctgcggcgtattcagccagtgcacttgcccacgcagcagcattagtaaacgagtgaagtaggctgccggaaccgttatcaacaacagacttaatacggttaacgtttatgtttttgcgaccttttgggattggtacattctggccttcgaagtcttccatcttgaaggttgcgggtttgctggtgccatcggagcttgccaccagcacatagcggcgacgtaactggctgtacacaccgacggattgcatgtccagaacatcaccagcagcataagaaccaaaagatgaacctgccacgttaaagacttcatagatgtcggactggtcacgcgtaaccggaatgaaggtacacgcatcatcggtagctgcccccaactgaacaggcaggatcatcgcgaggaataaaggcagacgcataacaccgtcagaaacgctcattatttctgctgcgacagattccagcattgctttatttagggcattcatgctatttgcggtgggctctattaagccgtttttcaagtcagcagcattagtaaacgagtgaagtaggctgccggaaccgttatcaacaacagacttaatacggttaacgtagatgttattgcgaccttttcggattggtacattctggccttcgaagtcttccatcttgaaggttgcggttttgctggtgccatcggagcttgccaccagcacatagcggcgacgtaactggctgtacacaccgacggattgcatgtccagaacatcaccagcagcataagaaacaaaagatgaacctgccacgttaaagactttatagatgtcggactggtcacgcgtaaccggaatgaaagtacacgcatcagcggtagctgtgcccaactgaacaagcaggatcattgcgaggaatataagcggacgcctaacaccgtcagagacgctcattatctctggtgcgacagattccagcatcgctttattagtggcattcatgctattgcgggtggactccctctcaattgcgatctcagtgcctttttccggcgctttggagaacgacagggcaatctgaccaatgttgtagttcagagagcaggtaacagtgatttgctcaccagcagcattagtaaacgagtgaagtaggctgccggaaccgttatcaacaacagacttaatacggttaacgtatatgttattgcgaccttttgggattggtacattctggccttcgaagtcttccatcttgaaggttgcggttttgctggtgccatcggagcttgccaccagcacatagcggcgacgtaactggctgtacacaccgacggattgcatgtccagaacatcaccagcagcataagaaccaaaagatgaacctgccacgttaaagacttcatagatgtcggactggtcacgcgtaaccggaatgaaggtacacgcatcagcggtagctgcccccaactgaacaggcaggatcatcgcgaggaataaaggcagacgcataacaccgtcagaaacgctcatcatctctgctgcgacagattccagcatcgctttattagtgggatccatgctattgcgggtggactctttaaggcagtttttcagcgtctggtggcaggaggcccgaatttccggacgccggataaatttatgtgcagcagcattagtaaacgagtgaagtaggctgccggaaccgttatcaacaacagacttaatacggttaacgtagatgttagtgcgaccttttcggattggtacattctggccttcgaagtcttccatcttgaaggttgcggttttgctggtgccatcggagcttgccaccagcacatagcggcgacgtaactggctgtacacaccgacggattgcatgtccagaacatcaccagcagcataagaaccaaaagatgaacctgccacgttaaagacttcatagatgtcggactggtcacgcgtaaccggaatgaaggtacacgcatcagcggtagctgcccccaactgaacaggcaggatcatcgcgaggaataaaggcagacgcataacaccgtcagaaacgctcatcatctctgccctctcaattgcgatctcagtgcctttatccggcgctttggagaacgacagggcaatctgaccaatgttgtagttcagagagcaggtaacagtgatttgctcaccagcagcattagtaaacgagtgaagtaggctgccggaaccgttatcaacaacagacttaatacggttaacgtatatgttatttcgaccttttgggattggtacattctggccttcgaagtcttccatcttgaaggttgcggttttgctggtgccatcggagcttgccaccagcacatagcggcgacgtaactggctgtacacaccgacggattgcatgtccagaacatcaccagcagcataagaaccaaaagatgaacctgccacgttaaagacttcatagatgtcggactggtcacgcgtaaccggaatgaaggtacacgcatcaacgggagctgcccccaactgaacaggcaggatcatcgcgaggaataaaggcagacgcataacaccggccgaaaccctcatcatcttttgctgggacagaattccagcattgggtttatttaggggcattccagcagcattagtaaacgagtgaagtaggctgccggaaccgttatcaacaacagacttaatacggttaacgtagatgttagtgcgaccttttcggattggtacattctggccttcgaagtcttccatcttgaaggttgcggttttgctggtgccatcggagcttgccaccagcacatagcggcgacgtaactggctgtacacaccgacggattgcatgtccagaacatcaccagcagcataagaaccaaaagatgaacctgccacgttaaagacttcatagatgtcggactggtcacgcgtaaccggaatgaaggtacacgcatcagcggtagctgcccccaactgaacaggcaggatcatcgcgaggaataaaggcagacgcataacaccgtcagaaacgctcatcatctctgcagcagcattagtaaacgagtgaagtaggctgccggaaccgttatcaacaacagacttaatacggttaacgtttatgttattgcgaccttttgggattggtacattctggccttcgaagtcttccatcttgaaggttgcggttttgctggtgccatcggagcttgccaccagcacatagcggcgacgtaactggctgtacacaccgacggattgcatgtccagaacatcaccagcagcataagaaccaaaagatgaacctgccacgttaaagacttcatagatgtcggactggtcacgcgtaaccggaatgaaggtacacgcatcagcggtagcagcagcattagtaaacgagtgaagtaggctgccggaaccgttatcaacaacagacttaatacggttaacgtatatgttattgcgaccttttcggattggtacattctggccttcgaagtcttccatcttgaaggttgcggttttgctggtgccatcggagcttgccaccagcacatagcggcgacgtaactggctgtacacaccgacggattgcatgtccagaacatcaccagcagcataagaaccaaaagatgaacctgccacgttaaagacttcatagatgtcggactggtcacgcgtaaccggaatgaaggtacactcatcagcggtagctgcccccaactgaacaggcaggatcatcgcgaggaataaaggcagacgcataacaccgtcagaaacgctcatcatctctgctgcgacagattccagcatcgctttattagtggcatccatgctattgcgggtggactctattaagccggtttccagcgtctggtggcaggaagccagaattttcggacgcggcataaatttatgtgctgcggcgtattcagccagtgcacttgcccacgccaaccacaaattttcttcgggaaaccactcgagcaacctgcggaaacatgtggaggaacccctctcaattgcgatctcagtgcctttatccggcgctttggagaacgacagggcaatctgaccaatgttgtagttcagagagcaggtaacagtgatttgctcaccagcagcattagtaaacgagtgaagtaggctgccggaaccgttatcaacaacagacttaatacggttaacgtagatgttagtgcgaccttttcggattggtacattctggccttcgaagtcttccatcttgaaggttgcggttttgctggtgccatcggagcttgccaccagcacatagcggcgacgtaactggctgtacacaccgacggattgcatgtccagaacatcaccagcagcataagaaccaaaagatgaacctgccacgttaaagacttcatagatgtcggactggtcacgcgtaaccggaatgaaggtacacgcatcagcggtagctgcccccaactgaacaggcaggatcatcgcgaggaataaaggcagacgcataacaccgtcagaaacgctcatcatctctgcagcagcattagtaaacgagtgaagtaggctgccggaaccgttatcaacaacagacttaatacggttaacgtagatgttagtgcgaccttttcggattggtacattctggccttcgaagtcttccatcttgaaggttgcggttttgctggtgccatcggagcttgccaccagcacatagcggcgacgtaactggctgtacacaccgacggattgcatgtccagaacatcaccagcagcataagaaccaaaagatgaacctgccacgttaaagacttcatagatgtcggactggtcacgcgtaaccggaatgaaggtacacgcatcagcggtagctgcccccaactgaacaggcaggatcatcgcgaggaataaaggcagacgcataacaccgtcagaaacgctcatcatctctgctgcgacagattccagcatcgctttattagtggcatccatgctattgcgggtggactctatcaggcagttttccagcgtctggtggcaggaggccagaatttccggacgcggcatagatttatgtgctgcggcgtattcagccagtgcacttgcccacgccctctcaattgcgatctcagtgcctttatccggcgctttggagaacgacagggcaatctgaccaatgttgtagttcagagagcaggtaacagtgatttgctcacgcagcagcattagtaaacgagtgaagtaggctgccggaaccgttatcaacaacagacttaatacggttaacgtagatgttagtgcgaccttttcggattggtacattctggccttcgaagtcttccatcttgaaggttgcggttttgctggtgccatcggagcttgccaccagcacatagcggcgacgtaactggctgtacacaccgacggattgcatgtccagaacatcaccagcagcataagaaccaaaagatgaacctgccacgttaaagacttcatagatgtcggactggtcacgcgtaaccggaatgaaggtacacgcatcagcggtagctgcccccaactgaacaggcaggatcatcgcgaggaataaaggcagacgcataacaccgtcagaaacgctcatcatctctgctgcgacagattccagcatcgctttattagtggcatccatgctattgcgggtggactcagcagcattagtaaacgagtgaagtaggctgccggaaccgttatcaacaacagacttaatacggttaacgtagatgtttgtgcgaccttttcggattggtacattctggccttcgaagtcttccatcttgaaggttgcggttttgctggtgccatcggagcttgccaccagcacatagcggcgacgtaactggctgtacacaccgacggattgcatgtccagaacatcaccagcagcataagaaccaaaagatgaacctgccacgttaaagacttcatagatgtcggactggtcacgcgtaaccggaatgaaggtacacgcatcagcggtagctgcccccaactgaacaggcaggatcatcgcgaggaataaaggcagacgcataacaccgtcagaaacgctcatcatctctgctgcgacagattccagcatcgctttattagtggcatccatgctattgcgggtggactctatcaggcagttttccagcgtctggtggcaggaggcccgaattttcggacgcggcatagatttatgtgcctggggcgtatcaaccagtgcacttgcccacgcgactgattgcatgtccataacatcaccagcaacataagaaccataagatgaacctgccacgttaaagacttcatagatgtcggactggtcacgcgtaaccggaatgaaggtacacgcattatcggtagctgccctcaactgaacaggcaggatcatcgcgaggaataaaggcacacgcataacaccgtcagaaacgctcatcatctcagcagcattagtaaacgagtgaagtaggctgccggaaccgttatcaacaacagacttaatacggttaacgtagatgtttgtgcgaccttttcggattggtacattctggccttcgaagtcttccatcttgaaggttgcggttttgctggtgccatcggagcttgccaccagcacatagcggcgacgtaactggctgtacacaccgacggattgcatgttcagaacatcaccagcagcataagaaccaaaagatgaacctgccacgttaaagacttcatagatgtcggactggtcacgcgtaaccggaatgaaggtacacgcatcagctgtagctgcccccaactgaacaggcaggatcatctcgaggaataaaggcagacgcataacaccgtcagaaacgctcatcatctctgctgcgacagattccagcatcgctttattagtggcatccatgctattgcgggtggactctatcacgcagttatccagcgtctggtggcaggaagccaaaatttccggacgcggcataaatttatgtgcagcagcattagtaaacgagtgaagtaggctgccggaaccgttatcaacaacagacttaatacggttaacgtatatgttttttcgaccttttcggattggtacattctggccttcgaagtcttccatcttgaaggttgcggttttgctggtgccatcggagcttgccaccagcacatagcagcgacgtaactggctgtacacaccgacggattgcatgttcataacattaccatcagcatatgaaccaaaagatgagcctgtcacgttgaagacttcatatatgtctgactggtcacgcgtaaccggaatgaaagtacacgcattaccagttgctggccccaactgaacatgctggatcatcgcgaggaataaaggcagacgcattacaccgtcagaaacgctcatcatctctgcagcagcattagtaaacgagtgaagtaggctgccggaaccgttatcaacaacagacttaatacggttaacgtatatgttattgcgaccttttcggattggtacattctggccttcgaagtcttccatcttgaaggttgcggttttgctggtgccatcggagcttgccaccagcacatagcggcgacgtaactggctgtacacaccgacggattgcatgtccagaacatcaccagcagcataagaaccaaaagatgaacctgccacgttaaagacttcatagatgtcggactggtcacgcgtaaccggaatgaaggtacacgcatcagcggtagctgcccccaactgaacaggcaggatcatcgcgaggaataaaggcagacgcataacaccgtcagaaacgctcatcatctctgctgagacagattccagcatcgctttattagtggcatccatgctattgcgggtggactttatcaagcaggttttcagcttctggtggcaggaggccagaattttcggacgcgggattaaattatgtgcttgcgcgtaattagccagtgcatttgcccacacagcagcattagtaaacgagtgaagtaggctgccggaaccgttatcaacaacagacttaatacgggtaacgtttatgttttttcgacctttggggattggtacattctggccttcgaagtcttccatcttgaaggttgcggttttgctggtgccatcggagcttgccaccagcacatagcggcgacgtaactggctgtacacaccgacggattgcatgtccagaacatcaccagcagcataagaaccaaaagatgaacctgccacgttaaagacttcatatatgtcggactggtcacgcgtaaccggaatgaaggtacacgcatcatctgtagctgcccccaatnacccgccggtaactttctgggagatctccctctcaattgcgatctcagtgcctttattcggcgctttggagaacgacagggcaatctgaccaatgttgtagttcagagagcaggtaacagtgatttgctcaccagcagcattagtaaacgagtgaagtaggatcttgaaggttgcggttttgctggtgccatcggagcttgccaccagcacatagcggcgacgtaactggctgtacacaccgacggattgcatgtgcagaacatcaccagcagcataagaaccaaaagatgaacctgccacgttaaagacttcatagatgtcggactggtcacgcgtaaccggaatgaaggtacacgcatcagcggtagcagcagcattagtaaacgagtgaagtaggctgccggaaccgttatcaacaacagacttaatacggttaacgtatatgtttttgcgaccttttgggattggtacattctggccttcgaagacttccatcttgaatgttgcggttttgctggtgccatcagagcttgccaccagctcatagcaggcgacgtaactggggntaacgtagatgtttttgcgaccttttcggattggtacattctggccttcgaagtcttccatcttgaaggttgcggttttgctggtgccatctgagcttgccaccagcacatagcggcgacgtaactggctgtacacaccgacggattgcatgtccagaacatcaccagcagcataagaaccaaaagatgaacctgccacgttaaagacttcatagatgtcggactggtcacgcgtaaccggaatgaaggtacacgcatcaccggtagctgcccccaaatcttgaaggttgcggatttgctggtgccatcggagcttgccaccagcacatagcggctgacgtaactggctgtacacaccgacggattgcatgttcagagcatcaccatctttgcggatgggtacattctggccttcgaagtcttccatcttgaaggttgcggttttgctggtgccatcggagcttgccaccaacacatagcggcgacgtaactggctgtacacaccgactgattgcatgtccagaacatcaccatcagcataagaaccataagatgaaccagcagcattagtaaacgagtgaagtaggctgccggaaccgttatcaacaacagacttaatacggttaacgtagatgttagtgcgaccttttcggattggtacattctggccttcgaagtcttccatcttgaaggttgcggttttgctggtgccatcggagcttgccaccagcacatagcggcgacgtaactggctgtacacaccgacggattgcatgtccagaacatcaccagctgcataagaacctatagatgaacttgccaccgttaaagacttaatagaatgtggaacagcagcattagtaaacgagtgaagtaagctgccggaaccgttatcaacaacagacttaatacgggtaacgtttatgtttgttcgaccttttcggattggtacattctggccttcgaagtcttccatcttgaatgttgcggttttgctggtgccatcggagcttgccaccagcacatataggcgacgtaactggctgtacacaccgacggattgtatgtgcagaacatctccagcagcataagagccaaaagatgaacctgccacgttgaagacttcatagaatgtagactggttacgcgtaacccgaatgaaagtacacccatcatcggttgcagcagcattagtaaacgagtgaagtaggctgccggaaccgttatcaacaacagacttaatacggataacgtagatgttattgcgaccttttgggattggtacattctggccttcgaagtcttccatcttgaagggtgcggttttgctggtgccatcggagcttgccaccagcacatagcggcgacgtaactggctgtacacaccgacggattgcatgtacagaacattaccagcagcataagaaccaaaagatgaacctgccacgttaaagacttcatagatgtcggactggtcacgcgtaaccggaatgaatgtacacgcatcagcgggagctgcccccaactgaacatgcatgatcatcgcgaggaataaaggcagacgcataacatcgtcagaaacgctcatcatatctgcagcagcattagtaaacgagtgaagtaggctgccggaaccgttatcaacaacagacttaatacggttaacgtagatgtttgtgcgaccttttcggattggtacattctggccttcgaagtcttccatcttgaaagttgcggttttgctggtgccatcggagcttgccaccagcacatagcggcgacgtaactggctgtacacaccgacggattgcatgttcagaacatcaccagcagcataagaaccaaaagatgaacctgccacgttaaagacttcatatatgtcggactggtcacgcgtaaccggaatgaaggtacacgcatcagcggtagctgcccccaactgaacaggcaggatcatcgcgaggaataaaggcagacgcataacaccgtcagaaacgctcatcatctctgctgcgacagattccagcatcgctttattagtggcatacatgctattgcgggtggactctatcaagcagttttccaacatctggtggcaggaggccagaatttccggacgcggcatagatttatgtgctgcggcgtagtcagccagtgcacttgcccacgcagcagcattagtaaacgagtgaagtaggctgccggaaccgttatcaacaacagacttaatacggctaacgtatatgttagtgcgaccttttgggattggtacattctggccttcgaagtcttccatcttgaaggttgcggttttgctggtgccatcggagcttgccaccagcacatagcggcgacgtaactggctgtacacaccgacggattgcatgtccagaacatcaccagcagcataagaaccaaaagatgaacctgccacgttaaagacttcatagatgtcggactggtcacatgtaaccggaatgaaggtacacgcatcagcggtagctgcccccaactgaacaggcaggatcatcgcgaggaataaatgcagacgcataacaccgtcagaaacgctcatcatctctgcagcagcattagtaaacgagtgaagtaggctgccggaaccgttatcaacaacagacttaatacggttaacgtagatgtttgtgcgaccttttcggattggtacattctggccttcgaagtcttccatcttgaaggttgcggttttgctggtgccatcggagcttgccaccagcacatagcggcgacgtaactggctgtacacaccgacggattgcatgtccagaacatcaccagcagcataagaaccaaaagatgaacctgccacgttaaagacttcatagatgtcggactggtcacgcgtaaccggaatgaaggtacacgcatcagcggtagctgcccccaactgaacaggcaggatcatcgcgaggaataaaggcagacgcataacaccgtcagaaacgctcatcatctctgcagcagcattagtaaacgagtgaagtaggctgccggaaccgttatcaacaacagacttaatacggttaacgtagatgttattgcgaccttttcggattggtacattctggccttcgaagtcttccatcttgaaggttgcggttttgctggtgccatcggagcttgccaccagcacatagcggcgacgtaactggctgtacacaccgacggattgcatgtccagaacatcaccagcagcataagaaccaaaagatgaacctgccacgttaaagacttcatatatgtcggactggtcacgcgtaaccggaatgaaggtacacgcatcagcggtagctgcccccaactgaacaggcaggatcatcgcgaggaataaaggcagacgcataacaccgtcagaaacgctcatcatctctgcagcagcattagtaaacgagtgaagtaggctgccggaaccgttatcaacaacagacttaatacggttaacgtagatgttagtgcgaccttttcggattggtacattctggccttcgaagtcttccatcttgaaggttgcggttttgctggtgccatcggagcttgccaccagcacatagcggcgacgtaactggctgtacacaccgacggattgcatgtccagaacatcaccagcagcataagaaccaaaagatgaacctgccacgttaaagacttcatagatgtcggactggtcacgcgtaaccggaatgaaggtacacgcatcagcggtagctgcccccaactgaacaggcaggatcatcgcgaggaataaaggcagacgcataacaccgtcagaaacgctcatcatctctgctgcgacagattccagcatcgctttattagtggcatccatgctattgcgggtggactctatcaggcagttttccagcgtcctctcaattgcgatctcagtgcctttatccggcgctttggagaacgacagggcaatctgaccaatgttgtagttcagagagcaggtaacagtgatttgctcaccagcagcattagtaaacgagtgaagtaggctgccggaaccgttatcaacaacagacttaatacggttaacgtatatgttagtgcgaccttttcggattggtacattctggccttcgaagtcttccatcttgaaggttgcggttttgctggtgccatcggagcttgccaccagcacatagcggcgacgtaactggctgtacacaccgacggattgcatgtccagaacatcaccagcagcataagaaccaaaagatgaacctgccacgttaaagacttcatagatgtcggactggtcacgcgtaaccggaatgaaggtacacgcatcagcggtagctgcccccaactgaacaggcaggatcatcgcgaggaataaaggcagacgcataacaccgtcagaaacgctcatcatctctgcagcagcattagtaaacgagtgaagtaggctgccggaaccgttatcaacaacagacttaatacggttaacgtagatgttagtgcgaccttttcggattggtacattctggccttcgaagtcttccatcttgaaggttgcggttttgctggtgccatcggagcttgccaccagcacatagcggcgacgtaactggctgtacacaccgacggattgcatgtccagaacatcaccagcagcataagaaccaaaagatgaacctgccacgttaaagacttcatagatgtcggactggtcacgcgtaaccggaatgaaggtacacgcatcagcggtagctgcccccaactgaacaggcaggatcatcgcgaggaataaaggcagacgcataacaccgtcagaaacgctcatcatctctgctgcgacagattccagcatcgctttattagtggcatccatgctattgcgggtggactctatcaggcagtttttcagcgtctggtggcaagaggccaaaatttccggacgcggcatagatttatgtgctggggcgtaatcagccagtgcacttgcccacgcagcagcattagtaaacgagtgaagtaggctgccggaaccgttatcaacaacagacttaatacggttaacgtagatgtttgtgcgaccttttcggattggtacattctggccttcgaagtcttccatcttgaaggttgcggttttgctggtgccatcggagcttgccaccagcacatagcggcgacgtaactggctgtacacaccgacggattgcatgtccagaacatcaccagcagcataagaaccaaaagatgaacctgccacgttaaagacttcatagatgtcggactggtcacgcgtaaccggaatgaaggtacacgcatcagcggtagctgcccccaactgaacaggcaggatcatcgcgaggaataaaggcagacgcataacaccgtcagaaacgctcatcatctctgctgcgacagattccagcatcgctttattagtggcatccatgctattgcgggtggactcagcagcattagtaaacgagtgaagtaggctgccggaaccgttatcaacaacagacttaatacggttaacgtagatgttagtgcgaccttttcggattggtacattctggccttcgaagtcttccatcttgaaggttgcggttttgctggtgccatcggagcttgccaccagcacatagcggcgacgtaactggctgtacacaccgacggattgcatgtccagaacatcaccagcagcataagaaccaaaagatgaacctgccacgttaaagacttcatagatgtcggactggtcacgcgtaaccggaatgaaggtacacgcatcagcggtagctgcccccaactgaacaggcaggatcatcgcgaggaataaaggcagacgcataacaccgtcagaaacgctcatcatctctgctgcgacagattccagcatcgctttattagtggcatccatgctattgcgggtggactctatcaagcagttttccagcgtctggtggcaggaagcccaattttccggacgcggcatagatttatgtgctgcggcgtaatcagccagtgcacttgcccacgcagcagcattagtaaacgagtgaagtaggctgccggaaccgttatcaacaacagacttaatacggttaacgtttatgtttttgcgaccttttcggattggtacattctggccttcgaagtcttccatcttgaaggttgcggttttgctggtgccatcggagcttgccaccagcacatagcggcgacgtaactggctgtacacaccgacggattgcatgtccagaacatcaccagcagcataagaaccaaaagatgaacctgccacgttaaagacttcatagatgtcggactggtcacgcgtaaccggaatgaaggtacacgcatcagcggtagctgcccccaactgaacaggcaggatcatcgcgaggaataaaggcagacgcataacaccgtcagaaacgctcatcatctctgcagcagcattagtaaacgagtgaagtaggctgccggaaccgttatcaacaacagacttaatacggttaacgtatatgttattgcgaccttttcggattggtacattctggccttcgaagtcttccatcttgaaggttgcggttttgctggtgccatcggagcttgccaccagcacatagcggcgacgtaactggctgtacacaccgacggattgcatgtccagaacatcaccagcagcataagaaccaaaagatgaacctgccacgttaaagacttcatagatgtcggactggtcacgcgtaaccggaatgaaggtacacgcatcagcggtagcagcagcattagtaaacgagtgaagtaggctgccggaaccgttatcaacaacagacttaatacggttaacgtagatgttagtgcgaccttttcggattggtacattctggccttcgaagtcttccatcttgaaggttgcggttttgctggtgccatcggagcttgccaccagcacatagcggcgacgtaactggctgtacacaccgacggattgcatgtccagaacatcaccagcagcataagaaccaaaagatgaacctgccacgttaaagacttcatagatgtcggactggtcacgcgtaaccggaatgaaggtacacgcatcagcggtagctgcccccaactgaacaggcaggatcatcgcgaggaataaaggcagacgcataacaccgtcagaaacgctcatcatctctgctgcgacagattccagcatcgctttattagtggcatccatgctattgcgggtggactcagcagcattagtaaacgagtgaagtaggctgccggaaccgttatcaacaacagacttaatacggttaacgtagatgttagtgcgaccttttcggattggtacattctggccttcgaagtcttccatcttgaaggttgcggttttgctggtgccatcggagcttgccaccagcacatagcggcgacgtaactggctgtacacaccgacggattgcatgtccagaacatcaccagcagcataagaaccaaaagatgaacctgccacgttaaagacttcatagatgtcggactggtcacgcgtaaccggaatgaaggtacacgcatcagcggtagctgcccccaactgaacaggcaggatcatcgcgaggaataaaggcagacgcataacaccgtcagaaacgctcatcatctctgctgcgacagattccagcatcgctttattagtgggatccatgctattgcggggggactctatcaggcagttttccaacgtctgggtggcaggaagccagaatttcccgacccggcatagatttatgtgctgcggggttaatagccagtgccacttgcccaccctgtatcgaatttgaccgtgggcattatcaaaaatacccgaaaaaccggggcttttacttgcagcagcagcattagtaaacgagtgaagtaggctgccggaaccgttatcaacaacagacttaatacggttaacgtagatgttagtgcgaccttttcggattggtacattctggccttcgaagtcttccatcttgaaggttgcggttttgctggtgccatcggagcttgccaccagcacatagcggcgacgtaactggctgtacacaccgacggattgcatgtccagaacatcaccagcagcataagaaccaaaagatgaacctgccacgttaaagacttcatagatgtcggactggtcacgcgtaaccggaatgaaggtacacgcatcagcggtagctgcccccaactgaacaggcaggatcatcgcgaggaataaaggcagacgcataacaccgtcagaaacgctcatcatctctgctgcgacagattccagcatcgctttattagtggcatccatgctattgcgggtggactctatcaggcaggtttccagcgtctggtggcaggaagccagaattttcggacgccgcatagatttatgtgctggggcgtagtcaggcaaggcacttgcccacgctgtagcgatttgaacggtgggcttttcagaaatacccccaaaaaccgggtcttttcttgcaacagcagcattagtaaacgagtgaagtaggctgccggaaccgttatcaacaacagacttaatacggttaacgtagatgttttttctaccttttcggattggtacattctggccttcgaagtcttccatcttgaaggttgcggttttgctggtgccatcggagcttgccaccagcacatagcggcgacgtaactggctgtacacaccgacggattgcatgtccagaacatcaccagcagcataagaaccaaaagatgaacctgccacgttaaagacttcatagatgtcggactggtcacgcgtaaccggaatgaaggtacacgcatcagcggtagctgcccccaacggcgctttggagaccgacagggcaatctgaccaatgttgtagttcagagagcgggtaacagtgatttgctcaccagcagcattagtaaacgagtgaagtaggctgccggaaccgttatcaacaacagacttaatacgggtaacgtttatgttatttcgaccttttgggattggtacattctggccttcgaagtcttccatcttgaaggttgcgggtttgctggtgccatcggagcttgccaccagcacatagcggcgacgtaactggctgtacacaccgacggattgcatgtccagaacatcaccagcagcataagaaccaaaagatgaacctgccacgttaaagacttcatagatgtcggactggtcacgcgtaaccggaatgaaggtacacgcatcatcggtagctgcccccaactgaacaggcaggatcatcgtgaggaataaaggcagacgcataacaccgtcagaaacgctcatcatctctgcagcagcattagtaaacgagtgaagtaggctgccggaaccgttatcaacaacagacttaatacggttaacgtagatgtttgtgcgaccttttcggattggtacattctggccttcgaagtcttccatcttgaaggttgcggttttgctggtgccatcggagcttgccaccagcacatagcggcgacgtaactggctgtacacaccgacggattgcatgtccagaacatcaccagcagcataagaaccaaaagatgaacctgccacgttaaagacttcatagatgtcggactggtcacgcgtaaccggaatgaaggtacacgcatcagcggtagctgcccccaactgaacaggcaggatcatcgcgaggaataaaggcagacgcataacaccgtcagaaacgctcatcatctctgctgcgacagattccagcatcgctttattagtggcatccatgctattgcgggtggactctatcatgcagttttccagcgtctggtgggcaggaagccagaattttcggaccccggcatagatttatgtgctgcggcgtagtcagccaatgcacttgcccacgcagcagcattagtaaacgagtgaagtaggctgccggaaccgttatcaacaacagacttaatacgggtaacgtagatgttattgcgaccttttcggattggtacattctggccttcgaagtcttccatcttgaaggttgcggttttgctggtgccatcggagcttgccaccagcacatagcggcgacgtaactggctgtacacaccgacggattgcatgtccagaacatcaccagcagcataagaaccaaaagatgaacctgccacgttaaagacttcatagatgtcggactggtcacgcgtaaccggaatgaaggtacacgcatcagcggtagctgcccccaactgaacaggcatgatcatcgcgaggaataaaggcagacgcataacaccgtgagaaacgctcatcatctctgatgcgacagataacagcatcgctttattagtggcatccatgctattgcgggtggactcagcagcattagtaaacgagtgaagtaggctgccggaaccgttatcaacaacagacttaatacggttaacgtagatgtttgtgcgaccttttcggattggtacattctggccttcgaagtcttccatcttgaaggttgcggttttgctggtgccatcggagcttgccaccagcacatagcggcgacgtaactggctgtacacaccgacggattgcatgtccagaacatcaccagcagcataagaaccaaaagatgaacctgccacgttaaagacttcatagatgtcggactggtcacgcgtaaccggaatgaaggtacacgcatcagcggtagctgcccccaactgaacaggcaggatcatcgcgaggaataaaggcagacgcataacaccgtcagaaacgctcatcatctctgctgcgacagattccagcattcgtttattagtggcatccatgctattgcgggtggactctatcaggcagttttccagcgtctggtggcaggaggccagaatttccggacgccgcatagatttatgtgcagcagcattagtaaacgagtgaagtaggctgccggaaccgttatcaacaacagacttaatacggttaacgtttatgttatttcgaccttttcggattggtacattctggccttcgaagtcttccatcttgaatgttgcggttttgctggtgccatcggagcttgccaccagcacatagcggcgacgtaactggctgtacacaccgacggattgcatgttcagaacatcaccagcagcataagaaccaaaagatgaacctgccacgttaaagacttcatagatgtcggactggtcacgcgtaaccggaatgaaggtacacgcataagcggtagcagcagcattagtaaacgagtgaagtaggctgccggaaccgttatcaacaacagacttaatacggttaacgtttatgttttttcgacctttgcggattggtacattctggccttcgaagtcttccatcttgaaggttgcggttttgctggtgccatcggagcttgccaccagcacatagcggcgacgtaactggctgtacacaccgacggattgcatgtccagaacatcaccagcagcataagaaccaaaagatgaacctgccacgttaaagacttcatacatgtcggactggtcacgcgtaaccggaatgaaggtacacgcatcagcggtagctgcccccaanagngcctttatccggcgctttggagacgacagggcaatctgaccaatgttgtagttcagagagcaggtaacagtgatttgctcaccagcagcattagtaaacgagtgaagtaggctgccggaaccgttatcaacaacagacttaatacggttaacgtttatgttattgcgaccttggcggattggtacattctggccttcgaagtcttccatcttgaaggttgcggttttgctggtgccatcggagcttgccaccagcacatagcggcgacgtaactggctgtacacaccgacggattgcatgtccagaacatcaccagcagcataagaaccaaaagatgaacctgccacgttaaagacttcatagatgtcggactggtcacgcgtaaccggaatgaaggtacacgcatcagcggtagctgcccccaagtttatgtttttgcgaccctgggggattggtacattctggccttcgaagtcttccatcttgaaggttgcggttttgctggtgccatcggagcttgccaccagcacatagcggcgacgtaactgggtgtacacaccgactgattgcatgtccagaacatcaccagcagcataagaaccaaaagatgaaccagcagcattagtaaacgagtgaagtaggctgccggaaccgttatcaacaacagacttaatacggctaacgtagatgtttgtgcgaccttttcggattggtacattctggccttcgaagtcttccatcttgaaggttgcggttttgctggtgccatcggagcttgccaccagcacatagcggcgacgtaactggctgtacacaccgacggattgcatgtccagaacatcaccagcagcataagaaccaaaagatgaacctgccacgttaaagacttcatagatgtcggactggtcacgcgtaaccggaatgaaagtacacgcatcagcggtagctgcccccaactgaacaggcaggatcatcgcgaggaataaaggcggacgcataacaccgtcagaaacgctcatcatctctgctgcgacagattccagcatcgctttattagtggcatccatgctattgcgggtggactctatcaagcagttttccagcgtctggtggcacgaggccaaaattttccgacgccgcatagatttatgtgctgcggcgtagtcagccagtgcacttgcccacgcagcagcataagaaccaaaagatgaacctgccacgttaaagacttcataaatgtcggactggtcacgcggtaccggaatgaaggtacacgcatcaacgggagctttgcggattggtacattctggccttcgaagtcttccatcttgaaggttgcggttttgctggtgccatcggagcttgccaccagcacatagcggcgacgtaactggctgtacacaccgactgattgcatgtccagaacatcaccagcagcataagaaccaaaagatgaacctgccacgttaaagacttcatagatgtcggactggtcacgcgtaaccggaatgaaggtacacgcatcagcggtagctgcccccaactgaacaggcaggatcatcgcgaggaataaaggcagacgcataacaccgtcagaaacgctcaacatctttgcttgggggattggtacattctggccttcgaagtcttccatcttgaaggttgcggttttgctggtgccatcggagcttgccaccagcacatagcggcgacgtaactggctgtacacaccgacggattgcatgtccagaacatcaccagcagcataagaaccaaaagatgaacctgccacgttaaagacttcatagatgtcggactggtcacgcgtaacccgaatgaagggacacgcatcagcggtagctgcccccaacttgaacggcaggaacatcgcgagggataaagggagacgcataaacaccgtcagaaaacgctcataatcttttgcagcagcattagtaaacgagtgaagtaggctgccggaaccgttatcaacaacagacttaatacggttaacgtacatgtttttgctaccttgtgggattggtacattctggccttcgaagtcttccatcttgaaggttgcggttttgctggtgccatcggagcttgccaccagcacatagcggcgacataactggagggcaatctgaccaatgttgtagttcagagagcaggtaacagtgatttgctcaccagcagcattagtaaacgagtgaagtaggctgccggaaccgttatcaacaacagacttaatacggttaacgtagatgttagtgcgaccttttcggattggtacattctggccttcgaagtcttccatcttgaaggttgcggttttgctggtgccatcggagcttgccaccagcacatagcggcgacgtaactggctgtacacaccgacggattgcatgtccagaacatcaccagcagcataagaaccaaaagatgaacctgccacgttaaagacttcatagatgtcggactggtcacgcgtaaccggaatgaaggtacacgcatcagcggtagctgcccccaactgaacaggcaggatcatcgcgaggaataaaggcagacgcataacaccgtcagagacgctcatcatctctgctgcgacagattccagcatcgctttattagtggcatccatgctattgcgggtggactctatcaggcagttttcagcgtctgggggcaaggagcccaaaattttccgacccggcataaatttatgtgctggggcgtaatcagccaatgcacttggcccagcagcagcattagtaaacgagtgaagtaggctgccggaaccgttatcaacaacagacttaatacggctaacgtatatgttattgcgaccttttcggattggtacattctggccttcgaagtcttccatcttgaaggttgcggttttgctggtgccatcggagcttgccaccagcacatagcggcgacgtaactggctgtacacaccgactgattgcatgtgcagaacatcaccagcagcataagaaccaaaagatgaacctgccacgttaaagacttcatagatgtctgactggtcacgcgtaaccggaatgaatgtacacgcatcagcggtagctgcccccaactgaacatgcgggatcatcgcagcagcattagtaaacgagtgaagtaggctgccggaaccgttatcaacaacagacttaatacgggtaacgtagatgtttgtgcgaccttttcggattggtacattctggccttcgaagtcttccatcttgaaagttgcggttttgctggtgccatcggagcttgccaccagcacatagcggcgacgtaactggctgtacacaccgacggattgcatgtccagaacatcaccagcagcataagaaccaaaagatgaacctgccacgttaaagacttcatagatgtcggactggtcacgcgtaaccggaatgaaggtacacgcatcagcggtagctgcccccaactgaacaggcaggatcatcgcgaggaataaaggcagacgcataacaccgtcagaaacgctcatcatctctgctgcgacagattccagcatcgctttattagtggcatccatgctattgcgggtggactctatcaggcagttttccagcgtctggtggcaggaagccagaatttcccgacgcggcatagatttatgtgcttttgggattggtacattctggccttcgaagtcttccatcttgaaagttgcggttttgctggtgccatcggagcttgccaccagcacatagcggcgacgtaactggctgtacacaccgacggattgcatgtccagaacatcaccagcagcataagaaccaaaagatgaacctgccacgttaaagacttcatatatgtcggactggtcacgcgtaaccggaatgaaggtacacgcatcatcggtagctgcccccaactgaacaagcaggatcatcgcgaggaataaaggcggacgcataacaccgtcagaaacgctcatcatctctgcagcagcattagtaaacgagtgaagtaggctgccggaaccgttatcaacaacagacttaatacggttaacgtatatgtttttgcgaccttttgggattggtacattctggccttcgaagtcttccatcttgaaggttgcggttttgctggtgccatcggagcttgccaccagcacatagcggcgacgtaactggctgtacacaccgacggattgcatgtccagaacatcaccagcagcataagaaccaaaagatgaacctgccacgttaaagacttcatagatgtcggactggtcacgcgtaaccggaatgaaggtacacgcatcagcggtagctgcccccaactgaacaggcaggatcatcgcgaggaataaaggcagacgcataacaccgtcagaaacgctcatcatctttgctgcgacagattccagcatcggtttattagtggcatccatgcttttgcgggtggactcagcagcattagtaaacgagtgaagtaggctgccggaaccgttatcaacaacagacttaatacggttaacgtatatgttagtgcgaccttttcggattggtacattctggccttcgaagtcttccatcttgaaggttgcggttttgctggtgccatcggagcttgccaccagcacatagcggcgacgtaactggctgtacacaccgacggattgcatgtccagaacatcaccagcagcataagaaccaaaagatgaaccagcagcattagtaaacgagtgaagtaggctgccggaaccgttatcaacaacagacttaatacggttaacgttgatgtttgtgcgacctttggggattggtacattctggccttcgaagtcttccatcttgaaggttgcggttttgctggtgccatcggagcttgccaccagcacatagcggcgacgtaactggctgtacacaccgacggattgcatgtccagaacatcaccagcagcataagaaccaaaagatgaacctgccacgttaaagacttcatagatgtcggactggtcacgcgtaaccggaatgaaggtacacgcatcagcggtagctgcccccaactgaacaggcaggatcatcgcgaggaataaaggcagacgcataacaccgtcagaaacgctcatcatctctgctgcgacagattccagcatcgctttattagtggcatccatgctattgcgggtggactctatcaggcagttttccagcgtttggtggcaggaggccagaatttccggacgcgggatagatttatgtgctgcggcgtaatcagccaatgcacttgcccacgcagcagcattagtaaacgagtgaagtaggctgccggaaccgttatcaacaacagacttaatacggttaacgtatatgtttttgcgaccttttgggattggtacattctggccttcgaagtcttccatcttgaaggttgcggttttgctggtgccatcggagcttgccaccagcacatagcggcgacgtaactggctgtacacaccgacggattgcatgtccagaacattaccaacagcataagaaccaaaagatgaaccagcagcattagtaaacgagtgaagtaggctgccggaaccgttatcaacaacagacttaatacggttaacgtagatgtttgtgcgaccttttcggattggtacattctggccttcgaagtcttccatcttgaaggttgcggttttgctggtgccatcggagcttgccaccagcacatagcggcgacgtaactggctgtacacaccgacggattgcatgtccagaacatcaccagcagcataagaaccaaaagatgaacctgccacgttaaagacttcatagatgtcggactggtcacgcgtaaccggaatgaaggtacacgcatcagcggtagctgcccccaactgaacaggcaggatcatcgcgaggaataaaggcagacgcataacaccgtcagaaacgctcatcatctctgcttttgggattggtacattctggccttcgaagtcttccatcttgaaggttgcggttttgctggtgccatcggagcttgccaccagcacatagcggcgacgtaactggctgtacacaccgacggattgcatgtccagaacatcaccagcagcataagaaccaaaagatgaacctgccacgttaaagacttcatagatgttggactggtcacgcgtaaccggaatgaaggtacacgcatcagcggtagctgtccccaatantgtagaatctcccctctcaattgcgatctcagtgcctttatccggcgctttggagaccgacagggcaatctgaccaatgttgtagttcagagagcaggtaacagtgatttgctcaccagcagcattagtaaacgagtgaagtaggctgccggaaccgttatcaacaacagacttaatacggttaacgtatatgttagtgcgaccttttcggattggtacattctggccttcgaagtcttccatcttgaaggttgcggttttgctggtgccatcggagcttgccaccagcacatagcggcgacgtaactggctgtacacaccgacggattgcatgtccagaacatcaccagcagcataagaaccaaaagatgaacctgccacgttaaagacttcatagatgtcggactggtcacgcgtaaccggaatgaaggtacacgcatcagcggtagctgcccccaactgaacaggcaggatcatcgcgaggaataaaggcagacgcataacaccgtcagaaacgctcatcatctctgctgcgacagattccagcatcgctttattagtggcatccatgctattgcgggtggactctatcaagcagttttccagcgtctggtggcaggaggccagaatttccggacgcggcataaatttatgtgctgcggcgtagtcagccagtgcacttgcccacgcttttgggattggtacattctggccttcgaagtcttccatcttgaaggttgcggttttgctggtgccatcggagcttgccaccagcacatagcggcgacgtaactggctgtacacaccgacggattgcatgtccagaacatcaccagcagcataagaaccaaaagatgaacctgccacgttaaagacttcatagatgtcggactggtcacgcgtaaccggaatgaaggtacacgcatcagcggtagctgcccccaactgaacaggcaggatcatcgcgaggaataaaggcagacgcataacaccgtcagaaacgctcatcatttttgcagcagcattagtaaacgagtgaagtaggctgccggaaccgttatcaacaacagacttaatacggttaacgtatatgtttgttcgaccttttcggattggtacattctggccttcgaagtcttccatcttgaaggttgcggttttgctggtgccatcggagcttgccaccagcacatagcggcgacgtaactggctgtacacaccgacggattgcatgtccagaacatcaccagcagcataagaaccaaaagatgaaccagcagcattagtaaacgagtgaagtaggctgccggaaccgttatcaacaacagacttaatacggttaacgtagatgttattgcgaccttttgggattggtacattctggccttcgaagtcttccatcttgaaggttgcggttttgctggtgccatcggagcttgccaccagcacatagcggcgacgtaactggctgtacacaccgacggattgcatgtccagaacatcaccagcagcataagaaccaaaagatgaacctgccacgttaaagacttcatagatgtcggactggtcacgcgtaaccggaatgaaggtacacgcatcagcggtagcagcagcattagtaaacgagtgaagtaggctgccggaaccgttatcaacaacagacttaatacggttaacgtatatgttagtgcgaccttttcggattggtacattctggccttcgaagtcttccatcttgaaggttgcggttttgctggtgccatcggagcttgccaccagcacatagcggcgacgtaactggctgtacacaccgacggattgcatgtccagaacatcaccagcagcataagaaccaaaagatgaacctgccacgttaaagacttcatagatgtcggactggtcacgcgtaaccggaatgaaggtacacgcatcagcggtagctgcccccaactgaacaggcaggatcatcgcgaggaataaaggcagacgcataacaccgtcagaaacgctcatcatctctgctgcgacagattccagcatcgctttattagtggcatccatgctattgcgggtggactctatcaagcagttttccagcgtctggtggcatgaggccagaatttccggacgcggcatagatttatgtgctggggcgtagtcagccagtgcacttgcccacgcagcagcattagtaaacgagtgaagtaggctgccggaaccgttatcaacaacagacttaatacggttaacgtatatgttagtgcgaccttttcggattggtacattctggccttcgaagtcttccatcttgaaggttgcggttttgctggtgccatcggagcttgccaccagcacatagcggagacgtaactggctgtacacaccgacggattgcatgtccagaacatcaccagcagcataagaaccaaaagatgaacctgccacgttaaagacttcatagatgtcggactggtcacgcgtaaccggaatgaaggtacacgcatcagcggtagctgcccccaactgaacaggcaggatcatcgcgaggaataaaggcagacgcataacaccgtcagaaacgctcatcatctctgctgcgacagattccagcatcgctttattagtggcatccatgctattgcgggtggactctatcaggcagttttccagcgtctggtggcaggaggccagaatttccggacgcggcatagatttatgtgctgcggcgtagtcagccagtgcacttgcccacgcagcagcattagtaaacgagtgaagtaggctgccggaaccgttatcaacaacagacttaatacggttaacgtagatgttattgcgaccttttcggattggtacattctggccttcgaagtcttccatcttgaaggttgcggttttgctggtgccatcggagcttgccaccagcacatagcggcgacgtaactggctgtacacaccgacggattgcatgtccagaacatcaccagcagcataagaaccaaaagatgaacctgccacgttaaagacttcatagatgtcggactggtcacgcgtaaccggaatgaaggtacacgcatcagcggtagctgcccccaactgaacaggcaggatcatcgcgaggaataaaggcagacgcataacaccgtcagaaacgctcatcatctctgcagcagcattagtaaacgagtgaagtaggctgccggaaccgttatcaacaacagacttaatacggttaacgtatatgtttttgcgaccttttcggattggtacattctggccttcgaagtcttccatcttgaaggttgcggttttgctggtgccatcggagcttgccaccagcacatagcggcgacgtaactggctgtacacaccgacggattgcatgtccagaacatcaccagcagcataagaaccaaaagatgaacctgccacgttaaagacttcatagatgtcggactggtcacgcgtaaccggaatgaaggtacacgcatcatcggtagcagcagcattagtaaacgagtgaagtaggctgccggaaccgttatcaacaacagacttaatacggttaacgtatatgtttttgcgaccttttgggattggtacattctggccttcgaagtcttccatcttgaaggttgcggttttgctggtgccatcggagcttgccaccagcacatagcggcgacgtaactggctgtacacaccgacggattgcatgtccagaacatcaccagcagcataagaaccaaaagatgaaccagcagcattagtaaacgagtgaagtaggctgccggaaccgttatcaacaacagacttaatacggttaacgtatatgtttttgcgaccttttgggatgggtacattctggccttcgaagtcttccatcttgaaggttgcggttttgctggtgccatcggagcttgccaccagcacatagcggcgacgtaactggttnatagatgtcggactggtcacgcgtaaccggaatgaaggtacacgcattagcgggtagctggccccaacagcagcattagtaaacgagtgaagtaggctgccggaaccgttatcaacaacagacttaatacggttaacgtatatgtttttgcgaccttttcggattggtacattctggccttcgaagtcttccatcttgaaggttgcggttttgctggtgccatcggagcttgccaccagcacataacggcgacgtaactggctgtacacaccgacggattgcatgtccagaacattaccagcagcataagaaccaaaagatgaaccagcagcattagtaaacgagtgaagtaggctgccggaaccgttatcaacaacagacttaatacggttaacgtagatgttagtgcgaccttttcggattggtacattctggccttcgaagtcttccatcttgaaggttgcggttttgctggtgccatcggagcttgccaccagcacatagcggcgacgtaactggctgtacacaccgacggattgcatgtccagaacatcaccagcagcataagaaccaaaagatgaacctgccacgttaaagacttcatagatgtcggactggtcacgcgtaaccggaatgaaggtacacgcatcagcggtagctgcccccaactgaacaggcaggatcatcgcgaggaataaaggcagacgcataacaccgtcagaaacgctcatcatctctggtgcgacagattccagcatcgctttattagtggcatccatgctattgcgggtggactctatcaggcaggtttccagcgtctggtggcaggaggccagaatttccggacgcggcatagatttatgtgcagcagcattagtaaacgagtgaagtaggctgccggaaccgttatcaacaacagacttaatacggttaacgtagatgttattgcgaccttttcggattggtacattctggccttcgaagtcttccatcttgaaggttgcggttttgctggtgccatcggagcttgccaccagcacatagcggcgacgtaactggctgtacacaccgacggattgcatgtccagaacatcaccagcagcataagaaccaaaagatgaacctgccacgttaaagacttcatagatgtcggactggtcacgcgtaaccggaatgaaggtacacgcatcagcggtagctgcccccaactgaacaggcaggatcatcgcgaggaataaaggcagacgcataacaccgtcagaaacgctcatcatctctgctgcgacagattccagcatcgctttattagtggcatccatgctattgcgggtggactctatcaggcagttttccagcgtctggtggcaggaggccagaatttccggacgccgcatagatttatgtgctgcggcgtagtcagccagtgcacttgcccacgcagcagcattagtaaacgagtgaagtaggctgccggaaccgttatcaacaacagacttaatacggttaacgtagatgttagtgcgaccttttcggattggtacattctggccttcgaagtcttccatcttgaaggttgcggttttgctggtgccatcggagcttgccaccagcacatagcggcgacgtaactggctgtacacaccgacggattgcatgtccagaacatcaccagcagcataagaaccaaaagatgaacctgccacgttaaagacttcatagatgtcggactggtcacgcgtaaccggaatgaaggtacacgcatcagcggtagctgcccccaactgaacaggcaggatcatcgcgaggaataaaggcagacgcataacaccgtcagaaacgctcatcatctctgctgcgacagattccagcatcgctttattagtggcatccatgctattgcgggtggactctatcaggcagttttccagcgtctggtggcaggaggccagaatttccggacgcggcatagatttatgtgctgcggcgtagtcagccagtgcacttgcccacgcagcagcattagtaaacgagtgaagtaggctgccggaaccgttatcaacaacagacttaatacggttaacgtagatgttagtgcgaccttttcggattggtacattctggccttcgaagtcttccatcttgaaggttgcggttttgctggtgccatcggagcttgccaccagcacatagcggcgacgtaactggctgtacacaccgacggattgcatgtccagaacatcaccagcagcataagaaccaaaagatgaacctgccacgttaaagacttcatagatgtcggactggtcacgcgtaaccggaatgaaggtacacgcatcagcggtagctgcccccaactgaacaggcaggatcatcgcgaggaataaaggcagacgcataacaccgtcagaaacgctcatcatctctgctgcgacagattccagcatcgctttattagtggcatccatgctattgcgggtggactcagcagcattagtaaacgagtgaagtaggctgccggaaccgttatcaacaacagacttaatacggttaacgtatatgttagtgcgaccttttcggattggtacattctggccttcgaagtcttccatcttgaaggttgcggttttgctggtgccatcggagcttgccaccagcacatagcggcgacgtaactggctgtacacaccgacggattgcatgtccagaacatcaccagcagcataagaaccaaaagatgaacctgccacgttaaagacttcatagatgtcggactggtcacgcgtaaccggaatgaaggtacacgcatcagcggtagctgcccccaactgaacaggcaggatcatcgcgaggaataaaggcagacgcataacaccgtcagaaacgctcatcatctttgctgcgacagatttcaacatcgctttattagtggcatccatgctattgcgggtggactcagcagcattagtaaacgagtgaagtaggctgccggaaccgttatcaacaacagacttaatacggttaacgtatatgttattgcgaccttttcggattggtacattctggccttcgaagtcttccatcttgaaggttgcggttttgctggtgccatcggagcttgccaccagcacatagcggcgacgtaactggctgtacacaccgacggattgcatgtccagaacatcaccagcagcataagaaccaaaagatgaacctgccacgttaaagacttcatagatgtcggactggtcacgcgtaaccggaatgaaggtacacgcatcagcggtagctgcccccaactgaacaggcaggatcatcgcgaggaataaaggcagacgcataacaccgtcagaaacgctcatcatctctgctgcgacagattccagcatcgctttattagtggcatccatgctattgcgggtggactctatcaggcagttttccagcgtctgggtggcagaagccagaatttccggacgcggcatagatttatgtgctgcggggtattcagcccgtgcactggcccacgcagcagcattagtaaacgagtgaagtaggctgccggaaccgttatcaacaacagacttaatacggttaacgtagatgttagtgcgaccttttcggattggtacattctggccttcgaagtcttccatcttgaaggttgcggttttgctggtgccatcggagcttgccaccagcacatagcggcgacgtaactggctgtacacaccgacggattgcatgtccagaacatcaccagcagcataagaaccaaaagatgaacctgccacgttaaagacttcatagatgtcggactggtcacgcgtaaccggaatgaaggtacacgcatcagcggtagctgcccccaactgaacaggcaggatcatcgcgaggaataaaggcagacgcataacaccgtcagaaacgctcatcatctctgctgcgacagattccagcatcgctttattagtggcatccatgctattgcgggtggactctatcaggcaggttttcaacgtctggtggccagaagccaaaattttcggacgcggcataaatttatgtgcttcggggtaatcaacccttgcacttgcccacgcagcagcattagtaaacgagtgaagtaggctgccggaaccgttatcaacaacagacttaatacggttaacgtatatgttagtgcgaccttttcggattggtacattctggccttcgaagtcttccatcttgaaggttgcggttttgctggtgccatcggagcttgccaccagcacatagcggcgacgtaactggctgtacacaccgacagattgcatgtccagaacatcaccagcagcattagaaccaaaagatgaaccagcagcattagtaaacgagtgaagtaggctgccggaaccgttatcaacaacagacttaatacggttaacgtatatgttattgcgaccttttcggattggtacattctggccttcgaagtcttccatcttgaaggttgcggttttgctggtgccatcggagcttgccaccagcacatagcggcgacgtaactggctgtacacaccgacggattgcatgtccagaacatcaccagcagcataagaaccaaaagatgaacctgccacgttaaagacttcatagatgtcggactggtcacgcgtaaccggaatgaaggtacacgcatcagcggtagctgcccccaactgaacaggcaggatcatcgcgaggaataaaggcagacgcataacaccgtcagaaacgctcatcatctctgctgcgacagattccagcatcgctttattagtggcatccatgctattgcgggtggactctatcaggcagttttccagcgtctggtggcaggaagccaaaatttccggacgcggcattaaattatgtgctggggcgtaatcagccagtgcacttgcccacgcagcagcattagtaaacgagtgaagtaggctgccggaaccgttatcaacaacagacttaatacggttaacgtatatgtttgtgcgaccttttcggattggtacattctggccttcgaagtcttccatcttgaaggttgcggttttgctggtgccatcggagcttgccaccagcacatagcggcgacgtaactggctgtacacaccgacggattgcatgtccagaacatcaccagcagcataagaaccaaaagatgaacctgccacgttaaagacttcatagatgtcggactggtcacgcgtaaccggaatgaaggtacacgcatcagcggtagctgcccccaactgaacaggcaggatcatcgcgaggaataaaggcagacgcataacaccgtcagaaacgctcatcatctctgctgcgacagattccagcatcgctttattagtggcatccatgctattgcgggtggactctatcaggcagttttccagcgtctgggggcaggaggccaaaatttccggacgcggcatagatttatgtgctgcggcgtaatcagccagtgcacttgcccacgcagcagcattagtaaacgagtgaagtaggctgccggaaccgttatcaacaacagacttaatacggttaacgtatatgttatttcgacctttggggattggtacattctggccttcgaagtcttccatcttgaaggttgcggttttgctggtgccatcagagcttgccaccagcacatagcggcgacgtaactggctgtacacaccgacggattgcatgtccagaacatcaccagcagcataagaaccaaaagatgaaccagcagcattagtaaacgagtgaagtaggctgccggaaccgttatcaacaacagacttaatacggttaacgtagatgtttgtgcgaccttttcggattggtacattctggccttcgaagtcttccatcttgaaggttgcggttttgctggtgccatcggagcttgccaccagcacatagcggcgacgtaactggctgtacacaccgacggattgcatgtccagaacatcaccagcagcataagaaccaaaagatgaacctgccacgttaaagacttcatagatgtcggactggtcacgcgtaaccggaatgaaggtacacgcatcagcggtagctgcccccaactgaacaggcaggatcatcgcgaggaataaaggcagacgcataacaccgtcagaaacgctcattatttctgctgcgacagattccagcatcgctttattaagggcattcatgctattgcgggtggactcagcagcattagtaaacgagtgaagtaggctgccggaaccgttatcaacaacagacttaatacggttaacgtatatgttagtgcgaccttttcggattggtacattctggccttcgaagtcttccatcttgaaggttgcggttttgctggtgccatcggagcttgccaccagcacatagcggcgacgtaactggctgtacacaccgacggattgcatgtccagaacatcaccagcagcataagaaccaaaagatgaacctgccacgttaaagacttcatagatgtcggactggtcacgcgtaaccggaatgaaggtacacgcatcatcggtagctgcccccaactgaacaggcaggatcatcgcgaggaataaaggcagacgcataacaccgtcagaaacgctcatcatctctgctgcgacagattccaacatcgttttattagtggcatccatgctattgcggggggactcagcagcattagtaaacgagtgaagtaggctgccggaaccgttatcaacaacagacttaatacggctaacgtatatgttattgcgacctttgcggattggtacattctggccttcgaagtcttccatcttgaaggttgcggttttgctggtgccatcggagcttgccaccagcacatagcggcgacgtaactggctgtacacaccgacggattgcatgtgcagaacatcaccagcagcataagaaccaaaagatgaacctgccacgttaaagacttcatagatgtcggactggtcacgcgtaaccggaatgaatgtacacgcatcagcggtagctgcccgcaactgaacaggcatgatcatcgcgaggaataaaggcagacgcataacaccgtgagaaacgctcatgatctgtgctgcgacagattccagcatagctttattagtggcatccatgctattgccggtggactctatcaggcagtttttcagcgtttggggggcaggaagccagaatttcccgacgcggcatagaattatgtgcagcagcattagtaaacgagtgaagtaggctgccggaaccgttatcaacaacagacttaatacggttaacgtatatgtttgtgcgacctttgcggattggtacattctggccttcgaagtcttccatcttgaaggttgcggttttgctggtgccatcggagcttgccaccagcacatagcggcgacgtaactggctgtacacaccgacggattgcatgtccagaacatcaccagcagcataagaaccaaaagatgaacctgccacgttaaagacttcatagatgtcggactggtcacgcgtaaccggaatgaaggtacacgcatcatcggtagctgcccccaactgaacaggcaagatcatcgcgaggaataaaggcagacgcataacaccgtcagaaacgctcatcatctctgctgcgacagatttcagcatcgctttatttgtggcatacatgctatcgcgggtggactctataacgcacgttttccatggtgtgagggatgcaggccagaatttatctgacgcatccttagattttatgtgctggaggcgtattacagacaatttcacttgtccgagcgtgtagaggatctgattcggcgcactcatcatagattcatgcgctagcgggggtattttaccagcagctcccctctcaatggcgatctcagtgcctttttccggcgctttgtagaacgacagggcaatctgaccaatgttgtagttcagagagcaggtaacagtgatttgctcaccagcagcattagtaaacgagtgaagtaggctgccggaaccgttatcaacaacagacttaatacggctaacgtagatgtttgtgcgaccttttcggattggtacattctggccttcgaagtcttccatcttgaaggttgcggttttgctggtgccatcggagcttgccaccagcacatagcggcgacgtaactggctgtacacaccgacggattgcatgtccagaacatcaccagcagcataagaaccaaaagatgaacctgccacgttaaagacttcatagatgtcggactggtcacgcgtaaccggaatgaaagtacacgcattaacggtagctggccccaactgaacaggcaggatcatcgcgaggaataaaggcagacgcataacaccgtcaaaaacgctcattatcttttggtgggaacagattccaaccttcgctttattaatgggcttccatgcttgggggggtggtacattctggccttcgaagtcttccatcttgaaggttgcgggtgtgctggtgccatcggagcttgccaccagcacatagcggcgacgtaactggctgtacacaccgacggattgcatgtccagaacatcaccagcagcataagaaccaaaagatgaacctgccacgttaaagacttcatagatgtcggactggtcacgcgtaaccggaatgaaggtacacgcatcagcggtagctggccccaactgaacaagcaggatcatcgcgaagaataaaggcagacgcctaacaacgtcggaaacgctcattatctcatgcagcacatagcggcgacgtaactggctgtacacaccgacggattgcatgtccagaacatcaccagcagcataagaaccaaaagatgaacctgccacgttaaagacttcatagatgtcggactggtcacgcgtaaccggaatgaaggtacacgcatcagcggtagctgcccccgatgattggaacagatttcccaacttcgttttctttaatgggattgccatgcctccggtgggggggaatcctatgagggcgatttgccgaccgcctgtgtggtccacgaggcccgaaatttcccgggaaccgggtcgtagtattttagtaacgacggattgcatgtccagaacatcaccagcagcataagaaccaaaagatgaacctgccacgttaaagacttcatagatgtcggactggtcacgcgtaaccggaatgaaggtacacgcatcagcggtagctgccctcaactgaacatgcaggatcatcgcaatgttgtagttcagagagcgggtaacagtgatttgctcaccagcagcattagtaaacgagtgaattatgctgccggaaccgttatcaacaacagacttaatacggttaacgtagatgtcctcgctaccgacggattgcatgtccagaacatcaccagcagcataagaaccaaaagatgaacctgccacgttaaagacttcatagatgtcggactggtcacgcgtaaccggaatgaaggtacacgcattagcggtagcagcagcattagtaaacgagtgttttaggctgccggaaccgttatcaacaacagacttaatacggttaacgtagatgccatcgctaccttgtcggattggtacattctggccttcgaagtcttccatcttgaaggttgcggttttgctggtgccatcggagagggcaatctgaccaatgttgtagttcagagagcaggtaacagtgatttgctcaccagcagcattagtaaacgagtgatgtaggctgccggaaccgttatcaacaacagacttaatacggttaacgtagatgttagtgcgaccttgtcggattggtacattctggccttcgaagtcttccatcttgaaggttgcggttttgctggtgccatcggagcttgccaccagcacatagcggcgacgtaactggctgtacacaccgacggattgcatgtccagaacatcaccagcagcataagaaccaaaagatgaacctgccacgttaaagacttcatagatgtcggactggtcacgcgtaaccggaatgaaggtacacgcatcagcggtagctgcccccaactgaacaggcaggatcatcgcgaggaataaaggcagacgcataacaccgtcagaaacgctcatcatctctgctgcgacagattccaacatcgctttattagtggcatccatgctattgcgggtggactctatcaggcagttttccagcgtttggtggcaggaagccagaatttccggacgcgggatagatttatgtgcttttcggattggtacattctggccttcgaagtcttccatcttgaaagttgcggttttgctggtgccatcggagcttgccaccagcacatagcggcgacgtaactggctgtacacaccgacggattgcatgtccagaacatcaccagcagcataagaaccaaaagatgaacctgccacgttaaagacttcatagatgtcggactggtcacgcgtaaccggaatgaaggtacacgcatcagcggtagctgcccccaactgaacaggcaggatcatcgcgaggaataaaggcagacgcataacaccgtcagaaacgctcatcatctctgctgcgacagattccagcatcgctttattagtggcatccatgctattgcgggtggactcagcagcattagtaaacgagtgaattaggctgccggaaccgttatcaacaacagacttaatacggttaacgtagatgttctcgcgaccttgtcggattggtacattctggccttcgaagtcttccatcttgaaagttgcggttttgctggtgccatcggagcttgccaccagcacatagcggcgacgtaactggctgtacacaccgacggattgcatgtccagaacatcaccagcngcataagaaccaaaagatgaacctgccacgttaaagacttcatagatgtcggactggtcacgcgtaaccggaatgaagggacacgcatcaacggtagctgcccccaacttcattgcgactagtgccttattcgcgctttggaaacgacgggcaatctgaccaatgttgtagttcagagagcaggtaacagtgatttgctcaccagcagcattagtaaacgagtgaagtaggctgccggaaccgttatcaacaacagacttaatacggttaacgtagatgttagtgctaccttttgggattggtacattctggccttcgaagtcttccatcttgaaggttgcgggtttgctggtgccatcggagcttgccaccagcacatagcggcgacgtaactggctgtacacaccgacggattgcatgtccagaacatcaccagcagcataagaaccaaaagatgaacctgccacgttaaagacttcatagatgtcggactggtcacgcgtaaccggaatgaaggtacacgcatcagcggtagctgcccccaactgaacaggcaggatcatcgcgaggaataaaggcagacgcataacaccgtcagaaacgctcatcatctctgctgcgacagattccagcatcgctttattagtggcatccatgctattgcgggtggactctatcaggcagttttccagcgtctggtggcaggaggccagaatttccggacgcggcatagatttatgtgctgcggcgtagtcagccagtgcacttgcccacgcgacggattgcatgtccagaacatcaccagcagcataagaaccaaaagatgaacctgccacgttaaagacttcatagatgtcggactggtcacgcgtaaccggaatgaaggtacacgcatcagcggtagctgcccccaactgaacaggcaggatcatcgcgaggaataaaggcagacgcataacaccgtcagaaacgcttatcatctctgcagcagcattagtaaacgagtgaagtaggctgccggaaccgttatcaacaacagacttaatacggttaacgtagatgttagtgctaccttttcggattggtacattctggccttcgaagtcttccatcttgaaggttgcggttttgctggtgccatcggagcttgccaccagcacatagcggcgacgtaactggctgtacacaccgacggattgcatgtccagaacatcaccagcagcataagaaccaaaagatgaacctgccacgttaaagacttcataaatgtcggactggtcacgcgtaaccggaatgaaggtacacgcatcagcggtagctgcccccaactgaacaggcaggatcatctcgaggaataaaggcggacgcataacaccgtcagaaacgctcatcatctctggtgggacagattccaacatcgctttattaaagggatccatgctattgggggggggctctatcaggcagttttccaacgtcagcagcattagtaaacgagtgatgtaggctgccggaaccgttatcaacaacagacttaatacggttaacgtagatgcctcgcgacctttgcgggttggtacattctggccttcgaagtcttccatcttgaaggttgcggttttgctggtgccatcggagcttgccaccagcacatagcggcgacgtaactggctgtacacaccgacggattgcatgtccagaacatcaccagcagcataagaaccaaaagatgaacctgccacgttaaagacttcatagatgtcggactggtcacgcgtaaccggaatgaaggtacacgcatcagcggtagctgcccccaactgaacaggcaggatcatcgcgaggaataaaggcagacgcataacaccgtcagaaacgctcatcatctctgctgcgacagattccagcatcgctttattagtggcatccatgctattgcgggtggactctatcaggcagttttccagcgtctgggggcaggaagccaaaatttcccgacacggcatagatttatgtgcttgggcgtaatcagccattgcatttgcccacccagcagcattagtaaacgagtgaagtaggctgccggaaccgttatcaacaacagacttaatacggataacgtagatgttagtgctaccttttgggattggtacattctggccttcgaagtcttccatcttgaaggttgcggttttgctggtgccatcggagcttgccaccagcacatagcggcgacgtaactggctgtacacaccgacggattgcatgtccagaacatcaccagcagcataagaaccaaaagatgaacctgccacgttaaagacttcatagatgtcggactggtcacgcgtaaccggaatgaaggtacacgcatcagcggtagctgcccccaactgaacaggcaggatcatcgcgaggaataaaggcagacgcataacaccgtcagaaacgctcatcatctctgctgcgacagattccagcatcgctttattaggggcatccatgctattgcggggggactcagcagcattagtaaacgagtgaagtaggctgccggaaccgttatcaacaacagacttaatacggttaacgtagatgttagtgcgaccttttcggattggtacattctggccttcgaagtcttccatcttgaaggttgcggttttgctggtgccatcggagcttgccaccagcacatagcggcgacgtaactggctgtacacaccgacggattgcatgtccagaacatcaccagcagcataagaaccaaaagatgaacctgccacgttaaagacttcatagatgtcggactggtcacgcgtaaccggaatgaaggtacacgcatcagcggtagctgcccccaactgaacaggcaggatcatcgcgaggaataaaggcagacgcataacaccgtcagaaacgctcatcatctctgctgcgacagattccagcatcgctttattagtggcatccatgctattgcgggtggactctatcaggcagttttccagcgtctggtggcaggaggccagaatttccggacgcggcatagatttatgtgctgcggcgtagtcagccagtgcacttgcccacgctgtagcgatttgagcggtggcattatcagagatacccgcaaaaaccgggtctttacgtgcagcttcaaggatagatgcggcacgcgcggcatcatctttaatgaattggttatcagtaccgaactgcgcagtgcttgcccagccaagcacagctttagagcgttttgcgatatctgcaatacgattctggtattcgcgtaagttactcaatttactcttctcttttgagagtcgattaaactcataagaaaatgcacggcctttcacgcgcttccttgcaaagcgatccttgtcctcaaatttccataattcagtaactacggacttatctttagaacctttatccgtgagtagtgaggcttcctttgttatcaagcgcaggattttatttttaacttcatcttcggccatttcttcaatggataagatgtcgtttatttccggggatatgttttgaataagctgatcaaactctaaattcttgttccccatttcgtcgccaacagcacaaagcgttttgtagtccgaaaaggttaattccgactgcacagggaaaagggcgactaattcttccggagcactcgctgcctggagagcacgcgtgaccttcgcctgagacagcccttctttggctgcaatatccttctgactcatcccatcatttttcattcgcatcaaacgcagacctatttctcgaatgctgtgctgcaatgctgtctgaacgtctttcgctaaattttgcgcttcctgaacgctgatctcctgggtcgtgactaaaacccggatccctacgttctctaagatgggagaagctcgacgccggggaacatccaaaattttcatttttcctggtagcccgtctaacacctattgcagggtaaaattgctgatgcttaatagtgcttcggatactttttaatgattttggcgtaagagatgcctggtcacgcccgttgttatgctgatcaacaaaggtatcgctttctacctggttcggaggtattacctcttcaataaatgtggcctggcgaccagttgataacttgaatacctgctcgactcgatcgccagaggctgaagaactatcaaatccggttgccgggttagctgaaataacagtgtcaaaagactcgccgcagcgttcaaaaccgtcaaggcgagggaggaagacatcaagcatatccccaccgaacacttctttagccaggctatggcaatacttatggtctgccttgttactcaacttggacataaaaccaatgttagtcgcaagctggcactcgcagccttcatccgaaatgagtttcaccaactcaggaaggcgggcaacgtatttaagcgatgagtggaaatcgacagttgctggcggcagaggtgtaaacagtatattggccgaggccaaagcatttttcaggaaggcgtcaaggtgaggaccactatcaacgaggataaagtcataatcgctcttcagcttatcaatcacattttctttcaggacagcatggatgttctgacccggtagatgctcattgcacagctctctccaatcggatgcaataaaggcatcgtcaatcgacgcaggcataacgtcaaccccaggtacaacagaaggaacaataaactcctctaacagctcttcacggcttacattctgcaacatagcctgtgcagatgttgcgtttacgataccaatagagtgtttatggcttaaaaacatcgttgctgaagattgcggatcaaggtcaataaccagaatccttaaatcctccataagaagatgagggtgagcacgcattgcatgcgccagagaaaccgtcgatacagtttttgacacaccgcctttaagattggagatgaaaatcacatacgcttcgctgtagcgatcccggtattttggcactccgcgatgttcatatatgtcaatgatgttctgaattgacatcgcatatttcattgaagagccagcagggcgtttatcgaaaacataacccttttcttccatttcacttacggcatagtcaacgttcgctcgagtcagtagaggcaattttgccagtgccgctttcgcatagacctggtaaaactcgttcgcgtgtagctcatccttttgcaactgtacttgttcagtcagaacattgagcat

SEQ ID NO: 156977 - DNA, 461 bp, Homo sapiens; identical to SEQ ID NO: 148960

SEQ ID NO: 156978 - DNA, 904 bp, Homo sapiens; identical to SEQ ID NO: 148961

SEQ ID NO: 156979 - DNA, 6294 bp, Homo sapiens; identical to SEQ ID NO: 131479

SEQ ID NO: 156980 - DNA, 687 bp, Homo sapiens
taggtggaacacttgatatttaaataggagttgaaaagggtgaaaagagtatcagagacctcatttttttcctttgcaataagctgaagaaactttctttttcaggagagatggcaaaggtatatgctgttgccagagtcctgtggtataagcatctgtttttattatagtatgtcaaagttagggaaatgggactggcaagtaaaaaatggaatttaatttcaatgttttatgggaactctgatttaatgggaagcaaactagttcatattagcaggaattattttattttttcgagacagagtttcactctcgttggccaggctggagtgcaatggcgtgatctcggctcaccgcaacctctgcttcccgggttcaagcgattctcctgcctcagcctcccaagtagctgggattacaggcatacaccaccacacccagctaattttgtatttttagtagagacggggtttctccatgttggtcaggctggtctcgaactcccaacctcgggtgatctgcccgcctcggcctcccaaagtcctgggattacaggtgtgagccactgcacctggccgatcccgtcccatctcttaaaaaaaaaaatcaaaaagataaacatacatttgtaatggctggctatctggagacagagggccagagcagatgactgactgaggtcctttc

SEQ ID NO: 156981 - DNA, 413 bp, Homo sapiens
agaccttcaacgtgcccgccatgtacgtggccatccaggccgtgctgtccctctacgcctccggcaggaccaccggcatcgtgctggactccggcgacggcgtcaccacgatgtaccctgggatcgctgaccgcatgcagaaagagatcaccgcgctggcacccagcaccatgaagatcaagatcatcgccccgccggagcgcaaatactcggtgtggatcggcggctccatcctggcctcgctgtccaccttccagcagatgtggatcaccaagcaggagtacgacgaggccggcccttccatcgtccaccgcaaatgcttctagacacactccacctccagcacgcgacttctcaggacgacgaatcttctcaatgggggggcggctgagctccagccaccccgcagtccg

SEQ ID NO: 156982 - DNA, 413 bp, Homo sapiens
  misc_feature (1)...(413): n = a,t,c or g
cctggcacccagcacaatgaagatcaagatcattgctcctcctgagcgcaagtactccgtgtggatcggcggctccatcctggcctcgctgtccaccttccagcagatgtggatcagcaagcaggagtatgacgagtccggcccctccatcgtccaccgcaaatgcttctaggcggactatgacttagttgcgttacaccctttcttgacaaaacctaacttgcgcagaaaacaagatgagattggcatggctttatttggtttttttggtatgctttgggnnnnnnnnnnnnnnnggcctgggctcgggattaaaaaccgggaccgggggagggaccacctgccggggggaccgggcttcccccaaggttcaaaagggggccgggggcttagtgggccattgggtgtttttt

SEQ ID NO: 156983 - DNA, 1715 bp, Homo sapiens
  misc_feature (1)...(1715): n = a,t,c or g
accgcagcggacagcgccaagtgaagcctcgcttccctcccgcggcgaccagggcccgagccgagagtagcagttgtagctacccgcccagaaactagacacaatgtgcgacgaagacgagaccaccgccctcgtgtgcgacaatggctccggcctggtgaaagccggcttcgccggggatgacgcccctagggccgtgttcccgtccatcgtgggccgcccccgacaccagggcgtcatggtcggtatgggtcagaaagattcctacgtgggcgacgaggctcagagcaagagaggtatcctgaccctgaagtaccctatcgagcacggcatcatcaccaactgggatgacatggagaagatctggcaccacaccttctacaacgagcttcgcgtggctcccgaggagcaccccaccctgctcaccgaggcccccctcaatcccaaggccaaccgcgagaagatgacccagatcatgtttgagaccttcaacgtgcccgccatgtacgtggccatccaggccgtgctgtccctctacgcctccggaaggaccaccggcatcgtgctggactccggcgacggcgtcacccacaacgtgcccatttatgagggctacgcgctgccgcacgccatcatgcgcctggacctggcgggccgcgatctcaccgactacctgatgaagatcctcactgagcgtggctactccttcgtgaccacagctgagcgcgagatcgtgcgcgacatcaaggagaagctgtgctacgtggccctggacttcgagaacgagatggcgacgggccgccatccatccatcctcccatggaaaagagctacgagctgccagacggggcaggtcatcaccatcggcaacgagcgcttccgctgcccggagacgttcttccagccctccttcatcggtatggaagtcggcgggcatttcacgagaccaccttacaacagcatcatgaagtgtgacatcgacattcaggaaggaccctgtatgccaaccaacgtcatgttcggggggcacccacgattgtacccctgggaattcgctgacccgcatgcaagaaagagattcaccggcgctggcaccccaggcacccatgaagaatccaaagataaggattcattcgccccccgccggagcggcaaaatactcgggttgttggatccggcgggcttccattccctgggccctcgctgtcccacctttccagccagatgttggatcacccaaggcagggagtaccgaccgagggccgggccctttccattcgtccaaccgcaaatgcttctagacacacttccaccttccagcacggcgactttctcaggaccgacggaatcttctcacatgggggggcggctgagctccagccacccccgcagtcactttctttgttaacaacttcccgttgctgccatccgtaaacttgacacagtgtttataaccgtgtacatacattaactttattacctccattttgttatttttcggaaacaaagccctgtgggaagaaaatggaaactttgaagaagcattaaagtcattctggttaagctgcnnnnnnnnnnnnnngggggggctttttaagggagccaattttagtacccgcgggcgggcaacaaaaaattttttatagggggcccataaaataaattactgggcccggtttaaaacaccctggataggagaaaaccctgtcttcccc

SEQ ID NO: 156984 - DNA, 614 bp, Homo sapiens
ttacgcccctggtgtgtcaccttagaacctgagcccagtatcacactttgcgagcagctcgtctagaccccaacttcgccatagcctagatggaggccaaagccactgacggtcctcctccatttgaagccggggttttcctaccatatactttctctccagccaacaaccgcctacatccacggacatctgaaggtggccgtgacttaagcgactttatcagctatctacacgtagaagctacaaacccccctgtaattcaagaagtataacccaagaagaagcaagaaggcacaggaggatctctaaagcagtagccaaacaccacttcgtaaaaggactcttccatcagagatgggacaaccattggggaggactaggacccatatgggaattattacctctcagggccgagaggacagaatggatataatctgaatcctgttaaatttcttagctgcactgtttatggaaataccaggaccagtttatgtttgtggttttgggaaaaattatttgtgttgggggaaatgttgtgggggtggggttgagttggggatattttctaattttttttgtacatttggaacagtgacaataaatgagaccccttt

SEQ ID NO: 156985 - DNA, 979 bp, Homo sapiens
tgctatcagaactgctaaaggagagaagtttgtcatgcaggaggagttctcgcgtgatgggaaggctctggagaggttcctgcaggattactttgatggcaatctgaagagatacctgaagtctgaacctatcccagagagcaatgatgggcctgtgaaggtagtggtagcagagaattttgatgaaatagtgaataatgaaaataaagatgtgctgattgaattttatgccccttggtgtggtcattgtaagaacctggagcccaagtataaagaacttggcgagaagctcagccaaagacccaaatatcgtcatagcccaagatggatgccacagccaattaatgtgcattctccatatgaagtcagaggtttttccttcccatatacttctctccaagccaaacaagaagctaaatcctaaagaaatatgaaggtggccgtgaattaaggtgatttttattggctatctaccaaagagaagctaccaaacccccccctgtaattcaagtatagtttatacccaagtatagaagaagaaggcaccaggaggatctcctaaagccagtagcccaaacacccactttgtaaaaggactccttcccatcagagatgggaaaacccattggggaggacctaggaccccatatgggaattattacctctcagggccgagaggacagaatggatataatcctgaatcctgttaaattttctctaaactgtttcttagctgcgactgtttatgggaaatacccaggacccagtttatgtttgtggttttggggaaaaattatttgtgttgggggggaaatgttgtgggggtggggttgagtttgggggtatttttctaatttctttttgtacatttggaacagtgacaataaatgaggacccctttaaaaaaaaaaaaaaaaaaaaaaaaaaaaaaaaaaaaaaaaaaaagggccggccgctttaaaagggatcccaagcttac

SEQ ID NO: 156986 - DNA, 558 bp, Homo sapiens; identical to SEQ ID NO: 149125

SEQ ID NO: 156987 - DNA, 115 bp, Homo sapiens; identical to SEQ ID NO: 149126
  misc_feature (1)...(115): n = a,t,c or g

SEQ ID NO: 156988 - DNA, 2161 bp, Homo sapiens; identical to SEQ ID NO: 149127

SEQ ID NO: 156989 - DNA, 654 bp, Homo sapiens; identical to SEQ ID NO: 148510
  misc_feature (1)...(654): n = a,t,c or g

SEQ ID NO: 156990 - DNA, 1671 bp, Homo sapiens; identical to SEQ ID NO: 148511

SEQ ID NO: 156991 - DNA, 2502 bp, Homo sapiens
atgcccgctgctgcctgcagacaggacaagaagtctggacgcttctactcgtttacagaggcggagggcacggtggcagtcacacagggcaaggccgagggccgggcagctccctggagcctcccaagtgtgaagaaggcccaggagaaagtgtggggagaggagaggaggccgccagcgctgggtcggaacgagctgattgcccgctacatcaagctccggacagggaagacccgcaccaggaagcaggtgggcctcaagagacgggtaggggtcccgggggtggtaccccagcaccagtctgctcccaaggtctccagccacatccaggtgctggctcgtcgcaaagctcgcgagatccaggccaagctaaaggaccaggcagctaaggacaaggccctgcagagcatggctgccatgtcgtctgcacagatcatctccgccacggccttccacagtagcatggccctcgcccggggccccggccgcccagcagtctcagggttttggcaaggagctttgccaggccaagccggaacgtcccatgatgtgaagcctttctctcagcaaacctatgctgtccagcctccgctgcctctgccagggtttgagtctcctgcagggcccgccccatcgccctctgcgcccccggcacccccatggcagggccgcagcgtggccagctccaagctctggatgttggagttctctgccttcctggagcagcagcaggacccggacacgtacaacaagcacctgttcgtgcacattggccagtccagcccaagctacagcgacccctacctcgaagccgtggacatccgccaaatctatgacaaattcccggagaaaaagggtggactcaaggatctcttcgaacggggaccctccaatgccttttttcttgtgaagttctgggtcagaggccgggaaggcactagtcagaggcagaaggcaggcccaggactggaagccaaaacccaggcataccaactcatcccacctcagaaaccacctccagcagagccagaaagaaccttggcagtgggtcacccaacctgccgctttgtaggtgaggaaaatggcctgaagaagccaatcgacttgcccaagttcccacagcagttacagtccaggaaagcttcctggaggaggaaatacctgagtcaccccagggaaaaggacagctgcaggtcagaagggcacgcgcacataatgagagactgggtctctgaactaagagttaccaggcgaccggggaagacggcggaggtgcaggtcctgttgctttaatgttcgaggcccatctcctgggcccgcctggccggccatcggggctaaacaaggtactgctgggccggaaaggtgggtgttcgtacgctgtgaaggcatcaacatttctggcaattttctacagaaacatgttgcatgttaaagcacctggccttcctccacaagcggatgaacaccaacccttcccgaggccccttaccacttccgggcccccagccgcatcttctggcggaccgtgcgaggtatgctgccccacaaaaccaagcgaggccaggccgctctggaccgtctcaaggtgtttgacggcttcccacccccctttcaacaagaaaaagcgggatggtggtttcctgctgccctcaaggttgtgcgtctgaagcctacaagaaagtttgccctatctggggccccctgcctcacgaggttggctggaagtaccaggcaagtgaccagcacccctgaaggagaagaggaaaagagaaagccaaagatccactaccgggaagaaagaaccagctcattgaggctacggaaacaggccgagaaagaacgtggagaagaaaattgaccaattaccaccagaggtccttcaagaccccacgggacttctgggtctgagcccaattaaagactgttaaattccctcatgcttggcctggcctgcccttcctccattgttgcccctggaatgtacgggaccccaggggcagcagcaagtccccaggtgccacagggcagccctgggacataggaagctgggagcaaggaaagggtcttagtcactgcccctccgaagttgcttgaaagcactcggagaattgtgcaggtgtcatttatctatgaccaattaggaagagcaacccagttactatgagtgaaaaggagccaaaaaacctgattggagggccctatcttgtgagtggggcatctgtttggactttccacctggtcatatactctgcagctgttagaatgtgcaagcacttggggacagcatgagcttgctgttgtacacagggtatttctagaagcagaaatagactgggaaagatgcacaaccaaggggttacaggcatcgcccatgctcctcacctgtattttgtaatcagaaataaattgcttttaaagaaaaaaaaaaaaaaaaaaaaagggcggccgctctagagtatccctcgaggggcccaagcttacgcgtacccagctttcttg

SEQ ID NO: 156992 - DNA, 1047 bp, Homo sapiens; identical to SEQ ID NO: 119417

SEQ ID NO: 156993 - DNA, 1413 bp, Homo sapiens; identical to SEQ ID NO: 126882

SEQ ID NO: 156994 - DNA, 1686 bp, Homo sapiens; identical to SEQ ID NO: 149204

SEQ ID NO: 156995 - DNA, 411 bp, Homo sapiens; identical to SEQ ID NO: 124679

SEQ ID NO: 156996 - DNA, 565 bp, Homo sapiens; identical to SEQ ID NO: 149206

SEQ ID NO: 156997 - DNA, 492 bp, Homo sapiens; identical to SEQ ID NO: 149207

SEQ ID NO: 156998 - DNA, 345 bp, Homo sapiens; identical to SEQ ID NO: 149208

SEQ ID NO: 156999 - DNA, 1704 bp, Homo sapiens; identical to SEQ ID NO: 124683

SEQ ID NO: 157000 - DNA, 1374 bp, Homo sapiens; identical to SEQ ID NO: 149210

SEQ ID NO: 157001 - DNA, 1002 bp, Homo sapiens; identical to SEQ ID NO: 119418

SEQ ID NO: 157002 - DNA, 1635 bp, Homo sapiens; identical to SEQ ID NO: 119415

SEQ ID NO: 157003 - DNA, 816 bp, Homo sapiens; identical to SEQ ID NO: 149213

SEQ ID NO: 157004 - DNA, 1152 bp, Homo sapiens; identical to SEQ ID NO: 149214

SEQ ID NO: 157005 - DNA, 675 bp, Homo sapiens; identical to SEQ ID NO: 124689

SEQ ID NO: 157006 - DNA, 2436 bp, Homo sapiens; identical to SEQ ID NO: 149216

SEQ ID NO: 157007 - DNA, 1065 bp, Homo sapiens; identical to SEQ ID NO: 149217

SEQ ID NO: 157008 - DNA, 2406 bp, Homo sapiens; identical to SEQ ID NO: 124674

SEQ ID NO: 157009 - DNA, 2838 bp, Homo sapiens; identical to SEQ ID NO: 149219

SEQ ID NO: 157010 - DNA, 4701 bp, Homo sapiens; identical to SEQ ID NO: 149220

SEQ ID NO: 157011 - DNA, 2947 bp, Homo sapiens; identical to SEQ ID NO: 149221

SEQ ID NO: 157012 - DNA, 1127 bp, Homo sapiens
aaaaatcagaagggaacgagaaaagtgaagatgctgaagttttggatgccacaccttctggtattatgaagacagataacacagaagttcttctctctgctgacttcactggagcaatcaaagtgtttgttaataaaagaaaaaatgtatcttaatttgaaatggcatttaaaataaacatatcagtaagtttctatatgtatcaaaactgaaaaaatagtgttccaggctaacatacttttttaatttttattgaaagttgttcaaatataatatattttttgagaggcagtgttaatgatctaggaaaccctgggctgatagagtagaaaggaatatggctagaataacattgccaaacattaggctttatgttttgttatgtttgagttttcgttgtataattatgaacatgcacaagtttctgcatgaaaagatattaatatattaatcacatgtatgtgccttttggttacatgcattaaatctaacagagttaaattatttcagtggctcttttggcctcttactaggggggatagtcttgtttctagcttaaacaattttttttttgcacaaaatttcatttttaataaaagtgggtatcttttgactgagttattgttttgaaaatgggtatatagggtttccagtaggggtcaacaacccatatggtaaagggtttttataaatttctcaatttggggggacaagatttttttgtggtctaaattgtggggcttaagattcttttctttatatgggaacatataatttttttttctttgccacactggagcacaatgtttctatgtaaagaattattttcattctttatccatgagcaccaggctttgctcccttaaaaaaaaaattaagccccattaaggagtgagtcttctttttttacaataatgtaaaaattaaactgtttacatttttttaaagcattgtagtttttaaaaattaagctgttttgttttgtgttgttgaatttgaaagcctttgtaaatatcaatataatgtaccaatgaaataacatctggggcaatgaaaccctgactcatgttgttgatggttagcatattgatatttacaaaggctttcaaattcaacaacacaaaaaa

SEQ ID NO: 157013 - DNA, 750 bp, Homo sapiens
atggagatagttgtgctgtgtgcattgaattgtataaaccaaatgatttggtacgcatcttaacgtgcaaccatattttccataagacatgtgttgacccatggctgttagaacacaggacttgccccatgtgcaaatgtgacatactcaaagctttgggaattgaggtggatgttgaagatggatcagtgtctttacaagtccctgtatccaatgaaatatctaatagtgcctcctcccatgaagaggataatcgcagcgagaccgcatcatctggatatgcttcagtacagggaacagatgaaccgcctctggaggaacacgtgcagtcaacaaatgaaagtctacagctggtaaaccatgaaggcaaattctgtgggcagtgggatgttattccctcatgtttgaccaacccaacgctttgaagggtggacggaaactcctaatcaaggggactgctgtttcggggaatttaaatctttaaatctgtgtaaatagaaaacttgaaccattagtaataacagaactgccaatcagggcctagtttctattaataaattggataaatttaataaaataagagtgatactgaaagtgctcagatgactaatattatgctatagttaaatggcttaaaatatttaacctgttaacttttttccacaaactcattataatatttcgcataggcaagtttcctctcagtagtgataaccacatttttagacaattcaaaactgtccttcaaga

SEQ ID NO: 157014 - DNA, 629 bp, Homo sapiens
tgagactgtctcagtctgtcacccaggctggagtgcagtggcacgatctcagctcactgcaacctctgccctccaagtccaagcgattctcgtgcctcagccacccaaatagttgggattacaggcatacaccacaacacccagctaatttttgtatttttttcttttgtagagacggggtttcaccatgttggccatgctggtcctgtcctggcctcaagtgatccacccacctcagcctctcagtgttgggattataggcaaccgcgcccggccaaatccattatcatcacttaatgtttaaaggctacgttcagtttcctataggtgatattgttaggatctactagcaaatgatttggtaacctgacatctttgtattcatgtccaaaaaaattcttttataagaacaaaaatggtactcttagcctcattcactggagtattactgaaaagcatgatattcttactctattttgggtacattatgacagagaggttattattaccaactgtcagtagaactgaggcttcttgagtaaaggggattgaggtaaacctttggaagctggtgaatacatttcaagacacaacatggcacctgtgtctagctctatggtacaacatgg

SEQ ID NO: 157015 - DNA, 463 bp, Homo sapiens
tgatgtgggaggaggtcacatgccctatctgcctggaccccttcgtggagcctgtgagcatcgagtgtggccacagcttctgccaggaatgcatctctcaggttgggaaaggtgggggcagcgtctgtcctgtgtgccggcagcgctttctgctcaagaatctccggcccaatcgacagctagccaacatggtgaacaaccttaaagaaatcagccaggaggccagagagggcacacagggggaacggtgtgcagtgcatggagagagacttcaccaaactcatcttgatcaaccaaaaacatgtttctgccttctttatgggacttaagttttttttttctcctctccatctctaggatgtcgtctttggtgagatctctattatatcttgtatggtttgcaaaagggcttcctaaaaataaaaaataaaatttaaaaaactgtgaaaaaaaaaaaaaaaaa

SEQ ID NO: 157016 - DNA, 1970 bp, Homo sapiens
gggagctggctaccagcgttgagttgccctgtaaagccaaaccccctaaaggtctccacactgctgtttaacggcacacttgacaatggcttcagcagcacgcttgacaatgatgtgggaggaggtcacatgccctatctgcctggaccccttcgtggagcctgtgagcatcgagtgtggccacagcttctgccaggaatgcatctctcaggttgggaaaggtgggggcagcgtctgtgctgtgtgccggcagcgctttctgctcaagaatctccggcccaatcgacagctagccaacatggtgaacaaccttaaagaaatcagccaggaggccagagagggcacacagggggaacggtgtgcagtgcatggagagagacttcacctgttctgtgagaaagatgggaaggccctttgctgggtatgtgcccagtctcggaaacaccgtgaccacgccatggtccctcttgaggaggctgcacaggagtaccaggtgaggcctaagagacacctggagaagctccaggtggcattaggggaactgagaagaaagcaggagttggctgagaagttggaagtggaaattgcaataaagagagcagactggaagaaaacagtggaaacacagaaatctaggattcacgcagagtttgtgcagcaaaaaaacttcctggttgaagaagaacagaggcagctgcaggagctggagaaggatgagagggagcagctgagaatcctgggggagaaagaggccaagctggcccagcagagccaggccctacaggagctcatctcagagctagatcgaaggtgccacagctcagcactggaactgctgcaggaggtgataattgtcctggaaaggagtgagtcctggaacctgaaggacctggatattacctctccagaactcaggagtgtgtgccatgtgccagggctgaagaagatgctgaggacatgtgcagtccacatcactctggatccagacacagccaatccgtggctgatactttcagaagatcggagacaagtgaggcttggagacacccagcagagcatacctggaaatgaagagagatttgatagttatcctatggtcctgggtgcccagcactttcactctggaaaacattactgggaggtagatgtgacaggaaaggaggcctgggacctgggtgtctgcagagactctgtgcgcaggaaggggcactttttgcttagttccaagagtggcttctggacaatttggttgtggaacaaacaaaaatatgaggctggcacctacccccaggactccctcccaccttcaggtgcttccatgccaagttgggattttcctggactatgaggctggcatggtctccttctacaacatcactgacccatggctccctcatctactctttctctgaatgtgcctttacaggacctctgcggccattcttcagtccctggtatcaatgatggaggaaaaaacacagccccctctaaccctcttgtcccactgaatattggatcacaaggatccactgactattggatggctttctctgggacactgccactctccccccattgggcacccgcttcttcagccacaaaaccctggcctctttttccccatggaactctggaaccacctttgtcctctgcagaggcatcccgggatccccagcaagcgagctttagcagggaagtcacttcacccatcaacattcctgccccagatggcgtggtgtgattccctccagtgaagcagcctccttatatttgggcccaaactcatcttgatcaaccaaaaacatgtttcttgccttctttatgggggatttaagtttttttttttcttcctcttccatctctaggggatgttcgtctttggggtgaggatctctattatatcttgtatgggttgcaaaagggcttcctaaaaataaaaaataaaatttacaaaactgtgaaaaaaaaag

SEQ ID NO: 157017 - DNA, 495 bp, Homo sapiens
  misc_feature (1)...(495): n = a,t,c or g
nttgaaagctgtacaccgctgcaccggaccggaattcccgggacgacaacggctacggcatgagcaaggacggcttcgcgggcgacgatgccccccgggccgtcttcccctccatcgagaggcactcttccagccttccttcctgggcatggaggcctgtggcatccacgaaactaccttcaactccatcatgaagggtgacgtggacatccgcaaagacctgtacgccaacacagtgctgtctggcggcaccaccatgtaccctggcattgccgacaggatgcagaaggagatcactgccctggcacccagcacaatgaagatcaagatcattgctcctcctgagcgcaagtactccgtgtggatcggtggctacatcctgggctggctgtccaccttccaccagatgtggatcagcaagcaggagtatgacgagtccggacccttcatagtgcacacgacatgcttctaggcggactatgacttagatgcgta

SEQ ID NO: 157018 - DNA, 721 bp, Homo sapiens; identical to SEQ ID NO: 123507
  misc_feature (1)...(721): n = a,t,c or g

SEQ ID NO: 157019 - DNA, 837 bp, Homo sapiens; identical to SEQ ID NO: 129601

SEQ ID NO: 157020 - DNA, 705 bp, Homo sapiens
ctgcatgtggctcccgaggagcaccctgtgctgctgaccgaggcccccctgaaccccaaagccaactgtgagaagatgacccagatcatgtttgagaccttcaacaccccagccatgtatgtggccatccaggccatgctgtccctgtacgcctccgtccgtaccgcccatgtacaagggcttcacaccacggccgagcgggaaatcgtgcgtgacatcaagaagctgtgctacgtcgccctggacttcgagcgggagatggccatggtggcctccagctcctccctggagaagagctacaagctgctcgatggccaggtcatcaccatcggcaacgagcggttccactgccccgaggcgctcttccagccttccttcctgggcatggaatcctgtggcatccacaaaactaccttcaactacatcatgaagtgtgacgtggacatctgcaaagacctgtacaccaacacagtgctgtctggcggcaccaccatgtaccctggcatcaccaacaggatgcagaagaagatcaccgccctagcacccagcatgatgaagatcaagatcattgctcctcccgagcgcaagtactccgtgtggatcagcggctccatcctggcctcgctgtctaccttccagcagatgtggatcagcaagcagaagtatgaccagtccggcccctccatcgtccacgaatgcttctag

SEQ ID NO: 157021 - DNA, 1626 bp, Homo sapiens; identical to SEQ ID NO: 141068

SEQ ID NO: 157022 - DNA, 1430 bp, Homo sapiens
  misc_feature (1)...(1430): n = a,t,c or g
atggaagaagagatcgccgcgctggtcattgacaatggctccggcatgtgcaaagctggttttgctggggacgacgctccccgagccgtgtttccttccatcgtcgggcgccccagacaccagggcgtcatggtgggcatgggccagaaggactcctacgtgggcgacgaggcccagagcaagcgtggcatcctgaccctgaagtaccccattgagcatggcatcgtcaccaactgggacgacatggagaagatctggcaccacaccttctacaacgagctgcgcgtggccccggaggagcacccagtgctgctgaccgaggcccccctgaaccccaaggccaacagagagaagatgactcagattatgtttgagaccttcaacaccccggccatgtacgtggccatccaggccgtgctgtccctctacgcctctgggcgcaccactggcattgtcatggactctggagacggggtcacccacacggtgcccatctacgagggctacgccctcccccacgccatcctgcgtctggacctggctggccgggacctgaccgactacctcatgaagatcctcactgagcgaggctacagcttcaccaccacggccgagcgggaaatcgtgcgcgacatcaaggagaagctgtgctacgtcgccctggacttcgagcaggagatggccaccgccgcatcctcctcttctctggagaagagctacgagctgcccgatggccaggtcatcaccattggcaatgagcggttccggtgtccggaggcgctgttccagccttccttcctgggtatggaatcttgcggcatccacgagaccaccttcaactccatcatgaagtgtgacgtggacatccgcaaagacctgtacgccaacacggtgctgtcgggcggcaccaccatgtacccgggcattgccgacaagattgcagaaggagatcaccgccctggggccccagcaccatgaagatcaagatcatcgcacccccagagcgcaagtactcagtgtggatcggcggctccatcctggcctcactgtccacctttccagcagatgtggattagcaagcaggaagtacgacgagtcgggcccctccatcgtccaccggcaaatgcttctaggcggactatgacttagttgcgttacaccctttcttgacaaaacctaacttgcgcagaaaacaagatgagattggtatggcnnnnnnnnnnnnnnnnnnnnnnnnnnngnnnnnnnnnnnnnnngggctggccccaggattaaaaaccggaaccgggaaaggggacaccagccggtgggagcaaccttcccccaaagttcacaagggggccgaggactttgatggcccatggtggttttttaaatagccttcccaaatatgaaaggtaagaaggctttgggcctccctgggagggggg

SEQ ID NO: 157023 - DNA, 1534 bp, Homo sapiens
tttttttttttttttacgcagcttaaccagaatgactttaatgcttcttcaaagtttccattttcttcccacagggctttgtttcgaaaaataacaaaatggaggtaataaagttaatgtatgtacaccgttataaacactgtgtcaagtttacggatggcagcaacgggaagttgttacaaagaaagtgactgcggggtggctggagctcagccgccccccccattgagaagattcgtcgtccttgagaagtcgcgtgcttggaggtggagtgtgtctagaagcatttgcggttggacgatggaagggccggcctcgtcgtactcctgcttggtgatccacatctgctggaaggtggacagcgaggccaggatggagccgccgatccacacccgagtattttgcgctccggcgggggcgaatgaatcttgatcttccatgggtgctggggtgccagcgcgggtgatctcttttctgcatgcggtcagcgattcccaagggacatcgtgggtgccccccgacatgaacgttgttggcataaaaggtccttcctgaatgtcgatgtcacacttcatgatgctgttgtaaggtggtctcgtgaaatgcccgccgacttccataccgatgaaggagggctggaagaacgtctccgggcagcggaagcgctcgttgccgatggtgatgacctgccccgtctggcagctcgtagctcttttccagggaggaggaggaggcggccgtcgccatctcgttctcgaagtccagggccacgtagcacagcttctccttgatgtcgcgcacgatctcgcgctcagctgtggtcacgaaggagtagccacgctcagtgaggatcttcatcaggtagtcggtaagatcgcggcccgccaggtccaggcgcatgatggcgtgcggcagcgcgtagccctcataaatgggcacgttgtgggtgacgccgtcgccggagtccagcacgatgccggtggtcctgccggaggcgtagagggacagcacggcctggatggccacgtacatggcgggcacgttgaaggtctcaaacatgatctgggtcatcttctcgcggttggccttgggattgaggggggcttcggtgagcagggtggggtgctcctcgggagccacgcgaagctcgttgtagaaggtgtggtgccagatcttctccatgtcatcccagttggtgatgatgccgtgctcgatagggtacttcagggtcaggatacctctcttgctctgagcctcgtcgcccacgtaggaatctttctgacccataccgaccatgacgccctggtgtcgggggcggcccacgatggacgggaacacggccctaggggcgtcatccccggcgaagccggctttcaccaggccggagccattgtcgcacacgagggcggtggtctcgtcttcgtcgcacattgtgtctagtttctgggcgggtagctacaactgctactctcggctcgggccctggtcgccgcgggagggaagcgaggcttcacttggcgctgtccgctgcggt

SEQ ID NO: 157024 - DNA, 1915 bp, Homo sapiens
atgggggacaccccacgccagttcggaggcgcgaggccgcgctcgggaggcgcgctccgggggtgccgctctcggggcgggggcaaccggcggggtctttgtctgagccgggctcttgccaatggggatcgcaggctcaccatggatgatgatatcgccgcgctcgtcgtcgacaacggctccggcatgtgcaaggccggcttcgcgggcgacgatgccccccgggccgtcttcccctccatcgtggggcgccccaggcaccagggcgtgatggtgggcatgggtcagaaggattcctatgtgggcgacaagggcccagagcaagagaggcattctgaccctgaagtaccgcatcgagcatggcatcgtcaccaactgggaggatatggaggagatttggctccacaccttctacagtgagctgcatgtggctcctgaggagcaccccctgctgctgactgaggcctctctgaaccccaaggccaaccacgagaaggtaaaccagatcatgtttgagaccttcaacaccccagccatgtatgtggccatccaggccttgctgtccctgtacgcctctggccgtaccactggcatcgtgatggactccggtgacggggtcacccacactgtgcccatctacgggggggtatgccctcccccacaccatcctgcatctggacctggctggcccagacctgactgaccacctcatgaagatcctcaccgagcgcggctacagcttcaccaccacggccaagcgggaaatcgtgcatgacatcgaggagaacctgtgctatgttgccctcgactttgagcaggagatggccatggtggcctccaaccccctactggagaagagctaggagctgcctgacggccagggtcatcaccattggcaatgagccggttccgctgccctgaggcactcttccagccttcattcctgggcatggagtcctgtggacatccacgaaactaccttcagactccatcatgaaagtgtgacgtggacatccgcaaagacctgtacgaccaacacagtgctgtctggacggacaccaccatgtaccctgggcattgccgacaggatgcagaaggagatcactgccctggcacccagcacaatgaagatgaagatcattgctcctcctgagcgcaagtactccgtgtggatcggcggctccatcctggcctcgctgtccacctttccagcaaattttggatcagcaagcaggagtatgacgagtccggcccctctcatcgtacaccgcaaatgcttctaggcggactatggacttagtttgcgttacaacctttctttgacaaaacctaaacttgcgccagaaaacaagattgagatttggcatgggtttatttgtttttgtttgttttgttttggttttttttttttttttttgggttgaattcaggatttaaaaactgggaacgggtgaaggtgacagcagtcggttggagcgagcatcccccaaagttcacaatgtggccgaggactttgattgcacattgttgttttttttaatagtcattcccaaatatgagatgcattgttacaggaagtcccttgccatcctaaaagccaccccacttctctctaaggagaatggcccagtcctctcccaagtccacacaggggaggtgatagcattgctttcgtgtaaattatgtaatgcaaaatttttttaatcttcgccttaatacttttttattttgttttattttgaatgatgagccttcgtgcccccccttcccccttttttgtcccccaacttgagatgtatgaaggcttttggtctccctgggagtgggtggaggcagccagggcttacctgtacactgacttgagaccagttgaataaaagtgcacaccttaaaaaaaaaaaaaaaaaaaaaaaaa

SEQ ID NO: 157025 - DNA, 412 bp, Homo sapiens
gagacagagtctcgctctgttgcccaggctggagtgcagtggcacaatcttggctcactgcaaccttccccttccgggttcaagcgattctcttgcctcagcctcccgagtaactgggattacaggcacccgccatcatgcccggctaatttttgtatttttgtagagacaaggtttcaccatgttggccaggctggtctcaaactcctgacctcaggtgatccgcccaccttggcttcctaaattgctgggattacaggcatgagccactgcgcctggcccagcctgcacatttggactcttttgctgtttgccaagtgccccaggaggtggacagggcaggttttactggcagccatattttcccaatgaggaagcagcccagagaggttaggtgacttgctcaaggaca

SEQ ID NO: 157026 - DNA, 4145 bp, Homo sapiens
aaataactaaagatatgtccattctcccaaagggagacacaggtggtttttccaatgattcccttgccctccatggttggatgagtcctgtagaattccagaaccccatttggacacagctaatatccctgctctttgggggtagaaaataaggacaccaagtcattggtagggaggtacaggcccgttcctctgctgctgcagagagagaatgactcaagaaaattgggctaaaatttgtttaaaaaaaaaaaaaccacaaaaaaataagtaaaagaatcacaggtgctgactgattgataattacatcttggaccagccaaatgcctttatttttacgtctatttttttggtggctgtaatcaaatgtgtgtttaaaattcctcattccccactgtagggttctagctgcaattatattacattgccttttagcaggcaactctaccatattcactcatataagctttgattgcagtagctctggatttagtatctatttctaagctggccctatgtaaactatttggtatttgaattaaatgaatattaatgatgccccttggtttttttggttttgaagtatcttcctatgcttgtgatgactgtatgagaaaactaggctaatagtgtaaatagataccattgcttgatctggtgcctgagtggaacttgcctataatgaaattctgagaaattctcatttgtaagtgttggtagtgataggtaaggttattccctccatcccaggagttacactgtacctttggaatgacagtgatgtaccaatgatgtctttctttccactctggtctcaaatcagtaagaactggatattacttttaatttagcttactgttctgtcctaaaaagtaaacattataaaaatgaacctgaaaagagtcttagggagtctgatctcaccatattcatacggtgtgacaggtatttaaagaggggaggcatcactaaagctatttataaacctgaacaaccttttccaagttttcataaagttttaacaatttaaatatccatactgcatctaggaattcaataaatataattgcatatgttgtgctttccataaattaaaatcctcaaatgcatctcaaaccaagatggtatttccacatcatgcctattacaaagcaaatataatagatactatgcctggtcataaaagccaggtaaacccccctaccccattcaaaaggcagcaatatctagtttccctacatctattaaatgagtgcttttctgttaaaaatcagaatatggaaaaaaagtcagttttttcccttatgcaccactcaaaacaagcataatcctctaaatgttttttttttaaatttccttacagtgttatttcttctagacaactgagtgggtggagaaagaaaagtgataaggaaaacattttcatcttttacatcttcctccagcccctaaaattctcatctgacactttgtgacatgtgtagtggtgtcagcatctcttcaaatatagctcccttcacgttggaccctctcaggttggcttcttgaagatcacacccagacagatcacaattctgcaagatgaaaacaatattcatgtaattcatgtggaaatttcaggccttatctatttctgctcagaatgatttctggggcagattaggaaaatgttcttatacaataaaactcagttaatttccggaaaactgatgatacaccaccctaaattaagatgttcttctatctttatttgttacctctagttcaggctgatcaccataaatatgtataaacaaaggttaaagaggaagcatgtcccttgttcttgcatattttataaggagacattgaaaacaggggtccccaacccctgggccacagactgatactggtccatggcctgttaagaatcaggccacacagcaggaggtcaccagtagatgaagcttcatctgtatttacagccagtccctgtatggctcaagttacagcctgagctccacctcctgtcagatcagcaggggcattagattcgcacaggagcgtgaaccctattgtgaactgcacatgtgagggatctaggtggggtactcctcatgagaatctaatccctgatgatctgtcactgtctccaacacccccagatgggactgtctagttgcaagaaaacaaactcagggctcccactgattctacattatggtgagttatataattatttcattatgtattacaatgtaatactagtagaaataaagtgcacaataaatgtaacgcgcttgaatcatcccaaaaccagcccccgactctgatctgtgaaaatattttcttccacaaaaccagtccctggtgccaaaaaggttggggaccactgatttaaaatacagaatggattccaacataataaatacacacacacacacacacacacacacacacaattttttttttgaaacggagttttgctcttgttgcccaggctagagtgcaatggcgtgatctctgctctctgaaacctccacctcccgagttcaagcaattctcctgcctcagcctcccaagtagctaggattacaggtgcccgccaccatgcccagctaatttttttttttttttgtatttttagtagagacggggtttcaccatgttggccaggctggtctcaaactcctaacctcaagtgattcgcccaccttggcctcccaaaatgctggggttacaggcatgagccactgcgcctggccccaaagtaataaatattatcaaaacaattttactatgatccaagaacaacaacaacaaaaggaatgagatggggggaagactttttttttaatctgaaaagattttacttaatcaaattgtgtaatagatttttccattccctagccctagtatttttatagcaaggaactgcccttctttttaaagccccaaaggtacgtatataatacagtgagtttgacagatgtacacaacagtgtaaccaccgcaatttgaagctatttcttaatttgtcttgagatcacggagcaataagatagagattccacttaagtccctggatatgataggggacaatggttagagagaagggtgactaaacgtaacctgttaggagaacaaatgtcagcagctctcccctcaatagtcaacctgatcagtctttgcaatcagagagagggaggcttttgctgctaggccacactgagtacacagtactaaaaccaaggaaaaaaaatatattcttaggtgaaagtaatgtaacaaacaataaataattgtgctcgtgataggattatacttaggccaattctttttgccttgaagttgaaaggggcctgctactctgctaccgagagctatcaagatatctaggcaaaaatattatgaaaaaacattaacagcaagctaaattttgacataccgttctctgctatccaatttataccagatttcatagctaccagccacatgtggctacttaaatttaaatgaattaaaattaaataaaatttaaaaatcaatttctcatttgcactagccaaatctcaagcgctcaatagctatatatgggtggtagctactatactgaacagcacagatatagaacatgtccctcctgcacaaagtgctattggatagtgctgatatagacctatcaacagctatcaagtctgctagctaaactggcaaattaagaagacatacaaatataattctttgaaaaagatgaccaggcaaaattataatctcaagctgaaaaccaaaaaacatatggttccaatttcaaatagacttttcctgaacctgatttcaaacctggatatcatttaaatttctcaagtagtttaagaagtaatctagcccatttaattctattcggaattaaattttatggaaaatgcaatacattagataacacatctatcaaacttatttacttgagaaaaactcaaggaaaaggagagaaatgaaatcaacttagactgaatgtcagatgagtcttccaatccagttttaccagccaactactttgttttgatttcaataaattttgcatgagatgcttagtaagtctagagtaataaaaattcttaaagtgttggtgaactcacctctaaatcagttcctgccagagttgc

SEQ ID NO: 157027 - DNA, 1157 bp, Homo sapiens
gcgccgccggtgccggcgaacgcgctgggcgcgcggggcgaggcggtgcggctgcagctgcagggcgaggagctgcggctgcaggagagagagcgtgcgactgcaccagattaacatctacctcagcgaccgcatctcactgcaccgccgcctgcccgtgcgctggaacccgctgtgcaaagagaagaaatatgattatgataatttgcccaggacatctgttatcatagcattttataatgaagcctggtcaactctccttcggacagtttacagtgtccttgagacatccccggatatcctgctagaagaagtgatccttgtagatgactacagtgatagagagcacctgaaggagcgcttggccaatgagctttcgggactgcccaaggtgcgcctgatccgcgccaacaagagagagggccctggtgcgagcccggctgctgggggcgtctgcggcgaggggcgatgttctgaccttcctggactgtcactgtgagtgccacgaagggtggctggagccgctgctgcagaggatccatgaagaggagtcggcagtggtgtgcccggtgactgatgtgatcgactggaacaccttcgaatacctggggaactccggggagccccagatcggcggtttcgactggaggctggtgttcacgctggcacacagttcctgagagggagaggatacggatgcaatcccccgtcgatgtcatcaggtctccaacaatggctggtgggctgtttgctgtgagtaagaaatattttgaatatctggggtcttatgatacaggaatggaagtttggggaggagaaaacctcgaattttcctttaggatctggcagtgtggtggggttctggaaacacacccatgttcccatgttggccatgttttccccaagcaagctccctactcccgcaacaaggctctggccaacagtgttcgtgcagctgaagtatggatggatgaatttaaagagctctactaccatcgcaacccccgtgcccgcttggaaccttttggggatgtgacagagaggaagcagctccgggacaagctccagtgtaaagacttcaagtggttcttggagactgtgtatccagaactgcatgtgcctgaggacaggcctggcttcttcgggatgctccagaa

SEQ ID NO: 157028 - DNA, 3003 bp, Homo sapiens
atggggtttcgccatgttgaccaggctggtcttgaactcctgacctcaggaattcagcatgaacttggccactctgagcgcctagaggccacactcaggtcgaaggcacgtggccctgtgacaacgtggcagctcacttcttcaaagccagcagcagacactctcagcaggtggcctctaggagctgaggttctcagtcctacaaccacaaggaatgaattttgccaaaaaacatgccagcctgggctagatcctgagttcctgaagttccgctgtatttgcaggtgcaaagagaagaaatatgattatgataatttgcccaggacatctgttatcatagcattttataatgaagcctggtcaactctccttcggacagtttacagtgtccttgagacatccccggatatcctgctagaagaagtgatccttgtagatgactacagtgatagagggtgctctgctgccttggtcctcatggaccaggctggtttttcacctcctactcactctggtcaaccagaagacttaaaggggaaggagagccacacccttcctcccgagggcactgcttggaagttctccacacatcccattgagcagagcgtggttgcctggccacagcacctgaaggagcgcttggccaatgagctttcgggactgcccaaggtgcgcctgatccgcgccaacaagagagagggcctggtgcgagcccggctgctgggggcgtctgcggcgaggggcgatgttctgaccttcctggactgtcactgtgagtgccacgaagggtggctggagccgctgctgcagaggctttctgtggttccagccagcttgatcacaagccatcagttcctgggggagctggcctttgccaggggccagctagaacttgcccagcaggagagacggatggatgtcttgggtgctttcaggatccatgaagaggagtcggcagtggtgtgcccggtgattgatgtgatcgactggaacaccttcgaatacctggggaactccggggagccccagatcggcggtttcgactggaggctggtgttcacgtggcacacagttcctgagagggagaggatacggatgcaatcccccgtcgatgtcatcaggtctccaacaatggctggtgggctgtttgctgtgagtaagaaatattttgaatatctggggtcttatgatacaggaatggaagtttggggaggagaaaacctcgaattttcctttaggatctggcagtgtggtggggttctggaaacacacccatgttcccatgttggccatgttttccccaagcaagctccctactcccgcaacaaggctctggccaacagtgttcgtgcagctgaagtatggatggatgaatttaaagagctctactaccatcgcaacccccgtgcccgcttgggcctggcatgcgacgaatgctccatcaaagctggctggtggttagaaccttttggggatgtgacagagaggaagcagctccgggacaagctccagtgtaaagacttcaagtggttcttggagactgtgtatccagaactgcatgtgcctgaggacaggcctggcttcttcgggatgctccagaacaaaggactaacagactactgctttgactataaccctcccgatgaaaaccagattgtgggacaccaggtcattctgtacctctgtcatgggatgggccagaatcagtttttcgagtacacgtcccagaaagaaatacgctataacacccaccagcctgagggctgcattgctgtggaagcaggaatggatacccttatcatgcatctctgcgaagaaactgccccagagaatcagaagttcatcttgcaggaggatggatctttatttcacgaacagtccaagaaatgtgtccaggctgcgaggaaggagtcgagtgacagtttcgttccactcttacgagactgcaccaactcggatcatcagaaatggttcttcaaagagcgcatgttatgaagcctcgtgtatcaaggagcccatcgaaggagactgtggagccaggactctgcccaacaaagacttagctaagcagtgaccagaacccaccaaaaactaggctgcattgctttgaagaggcaatcattttgccatttgtgaaagttgtgttggatttagtaaaaatgtgaataagctttgtacttattttgagaactttttaaatgttccaaaataccctattttcaaagggtaatcgtaagatgttaacccttggtatttagaaaattaaaaccttataatatttttctatcaagatgtatattttacagtcgtgccttttactctcattagcaaaaaagataaagattttattttggtatttacaagaattcccaggtacgaagatatctgcatgggtggaaatcaggttcaagcaacgtactttgcattaactgataatacctcagctgcggggttaaagttttcccagtatagagagactgtcactaggaacattgtattgatttattcaggtcattgagatcttctagatgtattttaaaaagaatgctttttggttatgtgttgctaccaccagttaacactccattaatggtcatgtcagcccaaaggggactaacccaaaagctgaaatctcagaggaacaatttgctttactaagctgagtcaacttgagagcgaacttctaacaatgccgcactgtagtgtggctggttctaccactatgactttaaaacatgtttatatcatttttaatttttatgatacggtagtgtcagggagaaatgtaatgttctatatgaaattcctttttcaagtttgttcattaataacagttattaatttaaatcagcgttagagtttgtgctgctgcaactgctgtgaaaatttctctgagtaattctgatttgtgaatgatcccagaccaaccctgagattttgtcaacctgattaagtcaatatgaatgattaaaaagatgtgagaacactgaaaaaaaaaaaaaa

SEQ ID NO: 157029 - DNA, 465 bp, Homo sapiens
ttttacaggaacacagatttgatgttttaataaaaatacgatttctacaaaaggtgcttaacacggcccaggacgggctgtccgcgtggagtcagccgtaggacccctgaaggatttacaaagacagagccggctcaccagcacactcctgccagcaccgggacccactgcgaacaagtccacgtggtcctcattctcttccctggggacagggcagcacagtcagatgctgagactgaggccacacacatgggggcgccttcctgccttggcccggcccagctgcctctggagccaggaggccgtggcagccacaccacaagtgtggattccagacacgattctgtggaggggttccgggattccagacagactgaatctccatggaatgatgaaaattaaaatttacttgattatggaagtctctgatttattccagccaaatattagatgagccctcgtgcc

SEQ ID NO: 157030 - DNA, 3638 bp, Homo sapiens
  misc_feature (1)...(3638): n = a,t,c or g
atggcgtccatcttactgaggagctgccgcggccgggcgcccgcccgcctcccgccgccgcctcggtacaccgtcccgcggggtagtccaggggatcctgctcatctcagctgtgccagcaccctggggttgaggaactgcctgaatgttccatttggctgctgcactcccatccaccctgtgtacacatcctccagaggcgatcacctcggctgttgggctctgaggcccgagtgccttcgcatagtgtcgagagcgccatggacctctacctctgtgggttttgtggctgtgggacctcagtgccttcctgtgcgtggctggcactcttcgcgccctgttcgcgatgactcggtagtagagaagtccctcaagtccttgaaggacaagaacaagaagctggaggaaggcggcccggtgtacagcccccccgcagaggtggtggtgaagaagtccctggggcagcgggtgctggacgagctgaagcactactaccatggcttccgcctgctatggatcgacaccaagatcgcggcacgcatgctctggcgcatcctcaacggccacagcctgacccgccgggagcgcaggcagtttctccggatctgcgctgacctcttccgcctggtgccgttccttgtgttcgtggtggtgccgttcatggagtttctgctgcctgttgctgtgaagctcttccccaacatgttgccatccacatttgagactcagtcactcaaggaggagaggctgaagaaggagcttcgggtcaagctggagctggccaagttcctccaggacaccatcgaggagatggccttgaagaacaaggcagccaagggcagcgccaccaaagacttctctgtgtttttccagaagatccgggaaacaggggagaggcccagcaatgaggaaatcatgcgtttttccaaattatttgaggatgagctgaccctggacaacctgacacggccgcagctggtggccctgtgcaagctgctggagctacagtccatcggcaccaacaacttcctgcgcttccagcttaccatgcggctgcgctccataaaggcagacgacaagctgattgctgaggaaggggtggacagcctgaatgtcaaggagctgcaggcagcgtgtcgggcacgaggcatgcgggccctgggcgtcacggaagaccgcctgaggggtcagctgaagcagtggctggacctgcacctgcatcaggagatccccacatcgctgctcatcctgtcccgggccatgtacctcccggacaccctctctccagccgaccagctcaagtccacactgcagaccctcccagagattgtggcaaaggaagcacaggtgaaagtggccgaggtggagggcgagcaggtggacaacaaggccaagctggaggccacgctgcaggaggaggcggccatccagcaggagcaccgtgagaaggagctgcagaagcgctcggaggtggcgaaggattttgagcccgaacgtgtggtagctgctccccaaaggccggggaccgagccacagccagaaatgcctgacacagtcctgcagtcagagaccttgaaggacactgccccggtgctggagggcttgaaggaggaagagatcacgaaggaggaaatcgacatcctcagcgatgcctgctctaagctgcaggagcagaagaagtcactcaccaaggagaaggaggagctggagctgctgaaggaggatgtgcaggactacagcgaggacttgcaggagatcaggaaggaactttcaaagactggtgaagaaaaatacgtggaagaatctaaagccagcaagagattgacaaaaagggtgcagcaaatgatcgggcagatcgatggcttgatctcgcagctggagatggaccagcaggctggcaagctggccccggccaacggcatgcccacgggggagaacgtcatcagtgtcgctgagctcatcaacgccatgaagcaagtcaagcacattcccgaaagcaagctcaccagcctggccgcagcactggatgaaaacaaggatggcaaggtcaacatcgacgacctcgtcaaggtgattgagctggtggacaaagaagatgttcacatctccaccagccaggtggctgagattgtagcaacactggaattagaggagaaggtggaggagaaggagaaggccaaagagaaggcagagaaggaggtcgcagaggtgaagagctagaaccactggcctgggcacctgtcctcctgctgtgccgtcaccctggcaagggccgtgagggcgattgctttgtggtgattctcagtggctcatctaatattttggctggaataaatcagagacttccataatcaagtaaattttaattttcatcattccatggagattcagtctgtctggaatcccggaacccctccacagaatcgtgtctggatccacactgtggtgtgcttgccacggcctcctggctccagaggcagctgggccgggccaaggcaggaaggcgcccccatgtgtgtggcctcagtctcagcatctgactgtgctgccctgtccccagggaagagaatgaggaccacgtggactccgcccacacagagctggctgctgtgcccaccctcaggggcgtcaggagacacagcctggcctcctcagggctgaagatgcctccattcgcctgtgggaccttgatttctagatttcagtgtcaatagacctgtcttcctggcacactttcagtcggatgtggggtcattgtgggagacagaggtgtctgccatctctgtggcctctggagagtgacgtctccctgctgggagtgctggttctcacgtgcggtttcccttgtgtatcggagctctttctcggctttctatttcccccagttctttaagcagtcaattggcacagagtttcccacgggggctgcagtggattcactgtgtcagggatgagcctggcttgggggttggtggggctctgaagcgcatttggggttctttgtagcttctaatgtgaggtttgagtccagtgcgcccacagcagcatgcccttctcaccccttgcagtgttgcaggctcaggcccctgggctccttcagcaagcaggctagtcaatgaggcatgaggatccggcacagggcatcccctggggcttcaagggcaatacccccgtgcttagggtttgccctgtgccctctgggtggggtggccctcccccgaactcggcaaaacatgcccaggctgncccagggcgtgggccaggtggtgtccctgtggcaacctccatcctcctgcccagccggctgtgtcacactcatctttttaaggtcaggttggttccctggcaaaaatgtacctcccaggggcctcccaagcataggatttggaagacaggaacggcacaggcgtcccaggaaagcagctgcactcagacaatgccttctccattacttgaagcttctttctgttcagccattaaagaaacttgacaaaataggaacaggagatatttctcaattgtaaacctttgtgcagggacagttggcttccagaggctttcagctttcagttatttgagaagtttgttttagatccttaactaatatttatgaattctctcaaaaaaaaaaaaaaaaa

SEQ ID NO: 157031 - DNA, 836 bp, Homo sapiens
ttggagatggagtctcactctgtcacccaggctggagtgcaatggcgtgatctaggctcactgcaacctccgcctcccaggttcgagcaatcctcctgcctcagcctcccaagcagctgggaccacaggcacacgccgccacgcctggctaagtgtttgctcttaaatacacaaaatgcactgaaccagcaaaaacaaagtcccaggtctgaggagctctgaggatgatgcctgtgatggcctctggccagctctccaggatactgagagagcaggtcaggggaggccttctccaggctgggcagtgggaaggccctctggaccgggggagtgagtattcaggggacaaaggcacttacccgggtctggagccgccacggagccagggcacagcctagtttgggggattcctctgtcactggggtaggatctcccaacaagaggcggctttatgttccactcacgaagaggccagagctctcagatcttccccaaaacctaatcaggcctctcaccagcgtgttggaggccactcctggccatcatctccaactctttaccccaacctggcaccttgtagggggctagaagggtgaggggaggtgtctttcacttatgcttaggtcactcttagaggactatcctcaaacttgaggtgacagggaactcttcacgggggcaggatttgatgttttgtttttagccatgtttgtcaatgacaatgtcaatttctagttccaatttgtacccttgtctcatttctacattaaaaacaaaaaacaatcatctgtcataaaagttcagagtaagctgggtgtggtggcacatctcgtgcc

SEQ ID NO: 157032 - DNA, 217 bp, Homo sapiens
accatgcggaacctggagaacgcctggagaaggcccagatgaaggcgcaggaggccgagcacattaccacgtgtacctgcagctcaaggcctatctaatggtagcagtacctagaggagaccttggttcgagagcgcaagaagcggaacgctacataagtgagtgcaagaagcgcgccgaggagaagaaactgggaactgagcgcattgagcgcaag

SEQ ID NO: 157033 - DNA, 896 bp, Homo sapiens
aagacaggcggatccatctgaaggtcaggaatttgagaccagcctcgcccaacatggtgaaaccccatctcgaatgcggccacggcttgggcgggactaaggctgggaacgagcccaccgattggttcagaactacgcggcgaatggcggagaagctgaggcgggtgctaaccaggggcggtgcggcctggtccggggaggagaacatgcctgccgccggaccgcctttgctgctgctcggtacaccaggatctggaaaaacagcgctgctatttgctgcggccctagaggcggcgggggagggccaaggcccagtcctcttcctgacacgaaggcctcttcaaagcatgccccgcgggaccggaacgactctagacccaatgcgactccagaagatccgcttccagtacccaccctcaacccgagagcttttccggctcctgtgctctgcccatgaggccccggggccagccccctcccttctgctgctcgacggcctagaagagtacctagcggaagacccagagccccaggaagccgcctacctcattgccttacttctagacacagctgcccacttcagccaccggcttgggcctggccgggattgtgggctcatggtggccctccagacccaggaggaagcaggtagtggggacgtcctgcacctggcactgctccagcggtattttcctgcccagtgctggctgcagccagatgcaccaggtccaggagagcacggcctccgagcctgcctggagccaggcgggctgggccccagaacagagtggtgggtgactttccgatcagatggagaaatgatgatcgctccgtggcccacccaggctggtgaccccagctcaggcaagggttcaagctctggaggccagccctga

SEQ ID NO: 157034 - DNA, 1850 bp, Homo sapiens
acttagaggcgcctggtcgggaagggcctggtcagctgcgtccggcggaggcagctgctgacccagctgtggactgtgccgggggcgggggacggaggggcaggagccctgggctccccgtggcgggggctgtatcatggaccacctcggggcgtccctctggccccaggtcggctccctttgtctcctgctcgctggggccgcctgggcgcccccgcctaacctcccggaccccaagttcgagagcaaagcggccttgctggcggcccgggggcccgaagagcttctgtgcttcaccgagcggttggaggacttggtgtgtttctgggaggaagcggcgagcgctggggtgggcccgggcaactacagcttctcctaccagctcgaggatgagccatggaagctgtgtcgcctgcaccaggctcccacggctcgtggtgcggtgcgcttctggtgttcgctgcctacagccgacacgtcgagcttcgtgcccctagagttgcgcgtcacaagcagcctccggcgctccgcgatatcaccgtgtcatccacatcaatgaagtagtgctcctagacgcccccgtggggctggtggcgcggttggctgacgagagcggccacgtagtgttgcgctggctcccgccgcctgagacacccatgacgtctcacatccgctacgaggtggacgtctcggccggcaacggcgcagggagcgtacagagggtggagatcctggagggccgcaccgagtgtgtgctgagcaacctgcggggccggacgcgctacaccttcgccgtccgcgcgcgtatggctgagccgagcttcggcggcttctggagcgcctggtcggagcctgtgtcgctgctgacgcctagcgacctggaccccctcatcctgacgctctccctcatcctcgtggtcatcctggtgctgctgaccgtgctcgcgctgctctcccaccgccgggctctgaagcagaagatctggcctggcatcccgagcccagagagcgagtttgaaggcctcttcaccacccacaagggtaacttccagctgtggctgtaccagaatgatggctgcctgtggtggagcccctgcacccccttcacggaggacccacctgcttccctggaagtcctctcagagcgctgctgggggacgatgcaggcagtggagccggggacagatgatgagggccccctgctggagccagtgggcagtgagcatgcccaggatacctatctggtgctggacaaatggttgctgccccggaacccgcccagtgaggacctcccagggcctggtggcagtgtggacatagtggccatggatgaaggctcagaagcatcctcctgctcatctgctttggcctcgaagcccagcccagagggagcctctgctgccagctttgagtacactatcctggaccccagctcccagctcttgcgtccatggacactgtgccctgagctgccccctaccccaccccacctaaagtacctgtaccttgtggtatctgactctggcatctcaactgactacagctcaggggactcccagggagcccaagggggcttatccgatggcccctactccaacccttatgagaacagccttatcccagccgctgagcctctgccccccagctatgtggcttgctcttaggacaccaggctgcagatgatcagggatccaatatgactcagagaaccagtgcagactcaagacttatggaacagggatggcgaggcctctctcaggagcaggggcattgctgattttgtctgcccaatccatcctgctcaggaaaccacaaccttgcagtatttttaaatatgtatagtttttttg

SEQ ID NO: 157035 - DNA, 1197 bp, Homo sapiens
tcagacccccatgcccttcctttgtcgcccctccccagcggccttgctggcggcccgggggcccgaagagcttctgtgcttcaccgagcggttggaggacttggtgtgtttcttgcgctccatgcgctcgttctccagtttcttctcctcggcgcgcttcttgcactcacttatgtagcgttcccgcttcttgcgctctcgaaccaaggtctgctctatgtactgcagctggttcttggcaatgtcccgggcattgagggcctcttggttcaccacgtgcagtgcctccagctcatgtttggtcctcaccacctcagcctccatggagtccagccggttctccaagttgaggctctcgtccattagataggccttgagctgcaggtacacgctggtaatgtgctcggcctcctgcgccttcatctgggccttctccaggcggttctccaggttccgcatggtcttggccacctccgtgtgtctgttttgccgctccgccatctccagaaggcgcaggctgtgctgcagctggagctcctccagccgcctctgccgcaacaccacctggctgcagccagcactgggcaggaaaataccgctggagcagtgccaggtgcaggacgtccccactacctgcttcctcctgggtctggagggccaccatgagcccacaatcccggccaggcccaagccggtggctgaagtgggcagctgtgtctagaagtaaggcaatgaggtaggcggcttcctggggctctgggttttccgataggtacttttatagaccgtcgagcaccagaaggaagggggctggccccgggtcctcatgggcagagcacaggaaccgaaaaagctcccgggttgagggtgggttctggaagcgcatcttctagaagcagaaacagaaggaaagggccggattcagcacaggaagccagactccttaaaagtaaccttgcctccttgcatactttcattggttccaggatgaaccagttcagagctgttaaatattcttatattcgcccgtttttccagcactcatcactgccgagtattagtcgagggcaagccatttttgcttgtttgtttttggaaaaatctctagcgcagtttttccacggaaaaccctcccccagcattctcggtctgaccccatcgaattccgccgcttggggacagactctagaagcgcgt

SEQ ID NO: 157036 - DNA, 872 bp, Homo sapiens
  misc_feature (1)...(872): n = a,t,c or g
cccgcccgaccctttgtggaaagtattgccacccagtatatgaccaacaagcaagaccatgacagaatggccagccagtggaccaaaggaatccgctccataaatgggggtttcacaattcttacatttttttgtcggtcacagaagagagctgcttatgattttgaaggggtcagggagggtgggagttggtaaagagtagggtatttctataacagatattattcagtcttatttcctaagattttgttgtaacttaaggtatcttgctacagtagacagaattggtaatagcaacttttaaaatggtccattagtccggcaatattagctgaaatgtagtaccagaaaagaatgtaccatttggacatttcgggttcagttgcttgtagtccggtaaatttaaaacgggcttaaatttgggtaccaggttaccacatatgggccatttatgtaaaagtccctctaagacctacatacttttttgtttaaaaacaaaattggaanaaaattgttttttcccccttctgtggaaggggaacattgatatttaaccagagttttttagagattgtcatcctcatatatatataaaatgggacaccgtgggctattaaaacacccttataaggagatgagtagttgcgtttttatttttattatggcccattctactttggtttaaaaaaggtctgaatcaggacttgtgaaaacctgtagtgaaataccttaagctgttaactaactgtaaggccgtggaataggagttgctcagtggattggttctatgttgtggactacttaagtctgcatttgttactgtgctaataaacaatatttaaaaccacctaataaacaaaaaaaaaaaaaaa

SEQ ID NO: 157037 - DNA, 491 bp, Homo sapiens; identical to SEQ ID NO: 156720
  misc_feature (1)...(491): n = a,t,c or g

SEQ ID NO: 157038 - DNA, 462 bp, Homo sapiens
  misc_feature (1)...(462): n = a,t,c or g
tccggaattcctgggtcgacccaccgcccgaagcagtggacaagaaggctgctggagctggcaaggtctccatgtctgcccagaaagctcagaaggctaaatgaagattatccctaatacctgccaccccactcttaatcagtggtggaagaacggtctcagaactgtttgtttcaattggccatttaagtttagtagtaaaagactggttaatgataacaatgcatcgtaaaaccttcagaaggaaaggagaatgttttgtggaccactttggttttcttttttgcgtgtggcagttttaagttattagtttttaaaatcagtactttttaatggaaacaacttgaccaaaaatttgtcacagaattttgagacccattaaaaaagttaaatgagnnnnnnnnnnnnnnggggcggccgttttaagggatccaagtttattaacccgtgcttgcaacgttn

SEQ ID NO: 157039 - DNA, 980 bp, Homo sapiens
cggttttcgtccgggcgacccacgcgtccgggagactggtgttctcaaacccggtatgttggtcacctttgctccagtcaacgttacagggggagtaaaatctgtcgaaatgcaccatgaagctttgagtgaagctcttcctggggacaatgtgggcttcaatgtcaagaatgtgtctgtcaaggatgttcgtcgtggcaacgttgctggtgacagcaaaaatgacccaccaatggaagcagctggcttcactgctcaggtgattatcctgaaccatccaggccaaataagcgccggctatgcccctgtattggattgccacacggctcacattgcatgcaagtttgctgagctgaaggaaaagattgatcgccgttctggtaaaaagctggaagatggccctaaattcttgaagtctggtgatgctgccattgttgatatggttcctggccaggcccatgtgtgttgagagcttctcagactatccacctttgggtcgctttgctgttcgtgatatgagacagattgttgcgtgtgggtgtcatcaaagcaggggacaagaaggctgctggagctggcaaggtcaccaagtctgcccagaaagctcagaaggctaaatgaatattatccctaatacctgccaccccactcttaatcagtggtggaagaacggtctcagaactgtttgtttcaattggccatttaagtttagtagtaaaagactggttaatgataacaatgcatcgtaaaaccttcagaaggaaaggagaatgttttgtggaccaactttggttttcttttttgcgtgtggcagtttttaagttattagtttttaaaatcagtactttttaatggaaacaactttgaccaaaaatttggcacaaaatttttggagacccctttaaaaaagttaaatgagaagacaagagatcaaaaccatgggggcggccgctttaaaggatccaagtttacgtacgcgg

SEQ ID NO: 157040 - DNA, 419 bp, Homo sapiens
tgagaagaaagtataagagaaaaggagaggataaagactgaaagaaaggggccagaagggaagaaaaaggagaggtgtggcacttcttacttatgcttgagtggatgagctgctgttcttggaagcgtacgaggaagttgaagcacatagaggaaactgccgtgctcagtgtccaagcagcagaggactccatgcctccatgcctctgttaacctgctgtcatcagtgcaaggtaaagacaccctcccctgaccagcatacaaatcacctgttcaaatctgttttgctttaggctgcccaaagacacgagactttaacaagcttgaacttagaaaagaaagctcgtctgaaagaggaagcagctatgaaggccaaaacagagtagcagaggtatccgtgttggctggattttgaaaatc

SEQ ID NO: 157041 - DNA, 769 bp, Homo sapiens
ccgtccccggcgaagttctgcgctggtcggcggagtagcaagtggccatggggaacctcagcggtctgcgcctggcagcaggaagctgttttaggttatgtgaaagagatgtttcctcatctcaaaggcttacccagaagctctgattggaaggggtataaatggattttgccacaaaacccacagggaaagtccccggagctcccatccccgcacttaccaacagagtgccctttaacacaaaaccgtacggattggccagaaaaaaagacccctcatatggtccaggtcgccttcaaaaatggaagatgaaatcccccagagacctgtccccgttggaagatgccttgaatgcctgccaaagaaccaagatgccgagtgaaagatccagcctatcccaatggatttgccccgacggtggtatggattgcatccttcatggttattgagggccagaagggctgccccaaagacacgatgactttacacaagcttgaaccttagaaaagaaagctcgtcttgaaagagggaagcagctatgaaggccaaaacagagtagccagaggtatccgtgttggctgggatttttgaaaatccaggaattatgttataacgtgcctgtattaaaaaaggatgtggtattgaaggatccatttcattaaagtatgattttgccccaaacctgtaccatttccgtatttctcctgtagaagtaagaaataaattttcttaaataaaaaaaaaaaaaaaaaactcgagggggggcccg

SEQ ID NO: 157042 - DNA, 398 bp, Homo sapiens
  misc_feature (1)...(398): n = a,t,c or g
tatgaaccatcctgtactcagaatgtgaatcatggtgtacttgtggttggctatggtgatcttaatgggaaagaatactggcttgtgaaaaacagctggggccacaactttggtgaagaaggatatattcggatggcaagaaataaaggaaatcattgtgggattgctagctttccctcttacccagaaatctagaggatctctcctttttataacaaatcaagaaatatgaagcactttctcttaacttaatttttcctgctgtatccagaagaaataattgtgtcatgattaatgtgtatttactgtactaattagaaaatatagtttgannnnnnnnnnnnnnnnnnnnnnnnnnnnnnnnnnnnnnnnnnnnnnnnnnnnnnnnnnnnnacttg

SEQ ID NO: 157043 - DNA, 1794 bp, Homo sapiens
ggggtacctcatgtgacaagttccaatttcttttcaagtcaattgaactgaaatctccttgttgctttgaaatcttagaagagagcccactaattcaaggactcttactgtaggagcaactgctggttctatcacaatgaaacggctggtttgtgtgctcttggtgtgctcctctgcagtggcacagttgcataaagatcctaccctggatcaccactggcatctctggaagaaaacctatggcaaacaatacaaggaaaagaatgaagaagcagtacgacgtctcatctgggaaaagaatctaaagtttgtgatgcttcacaacctggagcattcaatgggaatgcactcatacgatctgggcatgaaccacctgggagacatgaccagtgaagaagtgatgtctttgatgagttccctgagagttcccagccagtggcagagaaatatcacatataagtcaaaccctaatcggatattgcctgattctgtggactggagagagaaagggtgtgttactgaagtgaaatatcaaggttcttgtggtgcttgctgggctttcagtgctgtgggggccctggaagcacagctgaagctgaaaacaggaaagctggtgtctctcagtgcccagaacctggtggattgctcaactgaaaaatatggaaacaaaggctgcaatggtggcttcatgacaacggctttccagtacatcattgataacaagggcatcgactcagacgcttcctatccctacaaagccatggatctgaaatgtcaatatgactcaaaatatcgtgctgccacatgttcaaagtacactgaacttccttatggcagatatagatgtcctgaaagaagctgtggccaataaaggccccagtgtctgttgttgtaagatgcgcgtcaaccttccttccttcctctacaagaaagtggtgtctactatgacccatccttgtactcaagaatgtgaatcatggtgtacttgtggttggctatggtgatcttaatgggaaaagaatactggcttgtgtaaaacagctggggcccccaactttggtgaagaaggatatattcggtatgggcaagaaataaaggaaatcattgtggggattgctagctttccctcttacccagaaatctagaggatctctcctttttataacaaatcaagaaatatggaagcactttctcttaacttaattttttcctggctggaatccaggaagaattaattgtggcatgattaatgtgtatttactgtactaattagaaaatatagtttgaggccgggcactgtctggctcacgcctgtaatcccagtacttgggaggccaaggcaggcattatcaatcttgaggccagggagttaaagagcagcctggctaacgtggtgaagccccgtctctactaaaaataccaaaaaattagccgagcacggtggtgcattgctgtaattcccagctacttggggagggcttgaggcacgagattccttgaacccaagaggtttgaggctatgttgaggctgagatcacaccactgtactccagcctgggatgacagagtggagactctgtttcaaaaaaacagaaaagaaaatatagtttgattcttcatttttttaaatttgcaaatctcaggataaagtttgctaagtaaattagtaatgtactatagatataactgtacaaaaattgttcaacctaaaacaatctgtaattgcttattgttttattgtcccgaattcagttggtttaatatattgtcctctgtaatttcgatccttcttaa

SEQ ID NO: 157044 - DNA, 1494 bp, Homo sapiens
tgtcctgaaagagctgtggccaaataagggccagtgtctgtttggtgtagatgcgcgtcatcttcctttctttctctacagaagtggtgtctactatgaaccatcctgtactcagaatgtgaatcatggtgtacttgtggttggctatggtgatcttaatgggaaagaatactggcttgtgaaaaacagctggggccacaactttggtgaagaaggatatattcggatggcaagaaataaaggaaatcattgtgggattgctagctttccctcttacccagaaatctagaggatctctcctttttataacaaatcaagaaatatgaagcactttctcttaacttaatttttcctgctgtatccagaagaaataattgtgtcatgattaatgtgtatttactgtactaattagaaaatatagtttgaggcgtgagccactgagcccagcctacttttcagtttttaacataatttttgttttatccacaacttttcaagtattgaaagtagaataaaaacatgggttcttagtctttagctatctgttaaagcctatgaatgccttcttaaaatcatgtttttaaatgcactaaaatatatagggattacaaaggaatctaattatatcgaaatacagttattaaaatgttaaaagataagtttgttatatattacatatgcatgctttctttataaatgcattaaataagagttaatagctatcctaaatttgaaatagtgataagcataatgaaaatagatgcaaaaaactaatgtgatatgaaaatatctgggtttttcttttgatgatgaagtattgctaatattaccgtggtttatgaactatgttcagaattgaagaaaatcctaactttcagctagaggctaggtgacggggtttcaggacaccctacacaaaatacagcactttgacatatttgaatattttaagctgaaggcatttgaggaaattggcagaagcaggaaggtgactctgaccttctgtcctgctgtttctccccagaagcagccataaaacctgggaaggattttctgaccttccccatgaagtagatcataagactgtcatgtaagaggtgctctccctggcacccagagaaaaggagcatccttacctccaaaagcacagggacaccaaagaggaatctaaacaaacaggcctctcagtttcccccagtttattacatttagcttgttcacactttgccctatgacatttctacatcactggctgctcttcatcaaaacctactataaaaaacattcaagttcaacttgtttctttgggcctttatttccttatggagcccctcgtgtcgtgtaaaacttatattaaataaatgtgcatgcttttctcttgctaatctctcttttgttatagagatctcagccctaaacctaggatggatagaaggaaacatatgttctcccctacattagtaaaaataaaaatggaattttttacccataaaa

SEQ ID NO: 157045 - DNA, 316 bp, Homo sapiens
cccggatcagggccagtactgcatgaagaggatgcccgcctactcaggcccaggcactgcgcctggcgcactggattaccctgcgcactgtaccgcactctacggtgagagcgacttgagatgctgagctactggagacactcatcccatgagaatgctcttacagcggaagtgacagattggctcctggaaactttgacaagctgtattaagttgcgagatatataggggaaaaaaaaagacctttgaaaattcaaaaattgccagcaatataacacggctaaaatgaagtctttacagtatatgacatattgcg

SEQ ID NO: 157046 - DNA, 881 bp, Homo sapiens
ttttttgacagtcttgctctgtcgcccaggctggagtgcagtggcatgaactcggctcactgcaatccagtctaggcaagaagagcgaaactccatctcaaaaataaataaataaataaataaataaataaacaaaaagtaatcctcctaaaggaaagctactagaaaacactttagccaaatgacttcagatttataagcagggcaactggcaacagaatccaaatgaattctaacgttgtcaatcagaaatactttagcttaaaaaaaattaaaacacataaattcagcattttggttcaatctgaaagtctgataatttgaggttactataacccatgaaataaaataatgttaagaaaatgactcacattgtaggtgctaaaatgaacatatgcccaatactgacaatgctctctaagtaaaaaggtgaattttttattaatactaacagtcttgataatctcaagagacaatccagctttacaaatctagaacctggtatacaaagcaaaacgtacattttttaagtatctggggaaaaaaggaggtatctgggcaattcaggtcaagtaaactttgtggggaggagggaaagcaatatatataaattcaggattttgtgcttcaattacctataccagctttgctgatgtggtaagaaagcacacatgcagatacggttagatatttttcctaatttttttccactttcttatttcctacatagctaaagaatgcttaatagaatataattaaaagggtatataccatcttgcttaatcaggtgggttagatcaactttcaatcaggggaagaatttgacttgagccagcagctggagtaggctcagaactgaatttaatcaaccaaaaacataa

SEQ ID NO: 157047 - DNA, 2031 bp, Homo sapiens
gacccacgcgtccgactgcctctaccgagctgtcagcaagacggtgtatggggaccagagcctgcaccgggagttgagggagcagacggtgcactacatcgccgaccatctcgaccacttcagccccctgattgagggcgacgtgggggagtttatcatcgctgctgcccaagacggggcatgggccgggtacccggagttgctggccatggggcagatgctgaatgtgaatatccatttaactactggagggaggctggagagtcccacggtgtctaccatgattcattatttgggcccagaggattccctgaggcctagtatttggctcagttggctcagtaacggacactatgatgctgtatttgatcactcctatcctaacccagagtacgacaactggtgcaaacaaactcaagtgcaaaggaaacgcgacgaagaacttgccaaatctatggccatatccttgtctaaaatgtatattgaacaaaatgcatgctcttgaaatgtctcaaaaccttacaccctgggaataattgcatatataacttgtgtttggagaatcacatgaactttaatcagggtaatagcactttcaaacttgctagtagattttactgtaggtgtaatgccttaatcatctttttgaatgttttctcagagctggaggttgctgggcaccctaaatgatgtttcatgatagctttgggtgattttactgctatttataacttgcctgtataaaagtgagcattacttaatttgcaagctgatgtctcacagtggtaaattttggttcattcctgggtagtctattttctataaaaatgtatttttgcacaacatttttaaaaactgggtgtaccttcatctatgacgtgttcccattttgacaaacagctttccaggcgtaaaatccagaggaagtgcttttattatggaaatgtattattttgaacagagtttgtgatttggtagttattttatgttgttgaaatttgaatttcacaattcttagataattatttcaaatggatattgatgcattcttgttaccagatgtttggcccattccattttgatgaaacagagctgttgttttggaagtcattatttttctagaaatggcgaatcttttaaagaaaattacttaatggaaggttgtggggaaggtgtttttttgtgttttttttttggtttttgttttgtttttcctcttttaagggatagtaagcaggtcttacttgaatgaaagtctgatatttggctgatggcagaatgattattctggtaccctggttgatgtgtagagtagattgtctggtgctctcagttggtttttatttaccattggtccacgttgttgtaagggaaatgttaccatggtataaaactctgtgaccaggataagcctccggctttatataaccttcttgaatccagctaagagatttataaactaatgggcataaatgtcctggagccaacccttggcagttatagcaggagaacactggtcttaatatttcctttacattcctttcaaaaggcaaaataggattgccctgtattgatgtagaaatgtctggtaaccagagcttgtatggtttgctgggtcaaacaatgttttccaaccttaaaatcaatctcattgccactttaaactacttttagtcatatttattaagtaatgcagtttgtactttttttattttgtaacattttgtgatttttttgtacaaaactgtatttgtacaatagagcaattcccagctgatggaatgaatggattaaattcaaaatttatacttttacaatgcctttttggatagagtggtttttaaattgtgatgtttgtaggaaactttcttgcatgtatgcatgtacacaattttttttttccataaagatgccccagcaatagagaggtttcctaaattatcacatgaagaggataggctaatcatgagtaatttcaaaggataagtctgaataaaatataatttaaaagtggagtaaaaaaaaaaaaaa

SEQ ID NO: 157048 - DNA, 332 bp, Homo sapiens
  misc_feature (1)...(332): n = a,t,c or g
cgatgcagcagatacctttacaccctggtcatcactgacaaagagaaggcagagaaactgaagcagtccctgccccccggtttggcagtgaaggaactgaaatgaaccagacacactgattggaactgtattatattaaaatactaaaaatcctnnnnnnnnnnnnnnnnnnnnnnnnnnnnnnnnnnnnnnnnnnnnnnnnnnnnnnncnnnnnnnnnncactgtttgaataaagagcgagacggaattaatattggtttttcttttgaaaagaccatttgatttttatgttgctccagctaaggcattttttttgattaaaatttctata

SEQ ID NO: 157049 - DNA, 334 bp, Homo sapiens
  misc_feature (1)...(334): n = a,t,c or g
aaagttcgatgttgcagatacctttacaccctggtcatcactgacaaagagaaggcagagaaactgaagcagtccctgccccccggtttggcagtgaaggaactgaaatgaaccagacacactgattggaactgtattatattaaaatactaaaaatcctnnnnnnnnnnnnnnnnnnnnnnnnnntnnnnnnnnnnngnnnnnnnnnnnnnnnncaaattaaaaatgaaaaaatggcgaatacgatagatgggggagtgcacgcggcggtcgataagaagacaaaggagatgcttgggcgcagcctcattgagagaacaccctacacgctcag

SEQ ID NO: 157050 - DNA, 446 bp, Homo sapiens
  misc_feature (1)...(446): n = a,t,c or g
cccacgcgtccggttgctgcttgctgtgagtgtctctagggtgatacgtgggtgagaaaggtcctggtccgcgccagagcccagcgcgcctcgtcgccatgcctcggaaaattgaggaaatcaaggacttcctgctcacagcccgacgaaaggatgccaaatctgtcaagatcaagaaaaataaggacaacgtgaagtttaaagttcgatgcagcagatacctttacaccctggtcatcactgacaaagagaaggcagagaaactgaagcagtccctgccccnccgtttggcagtgaaggaactgaaatgaaccacacacactgattggaactgtattatattaaaaaactaaaaatcctnnnnnnnnnnnnnnnnngggcgccccgtttaaaagatcccttggggggcccaagcttaccccggcgtgccgaccgtttaatttttg

SEQ ID NO: 157051 - DNA, 705 bp, Homo sapiens
  misc_feature (1)...(705): n = a,t,c or g
gggtgagaaaggtaatctggggcaatccactgccaggtgaaatctggggaccccaggtccgcgtggagggtgtcggggaggagaaggggagtgcgatggggccgatatttcgggggagagcgggaaaacggggttcgctgccagcccccgcgccgtgttaacgccgaggactgtttcccgcaggtcctggtccgcgccatgagcccaggcgcgccatcgtcgccaatgccctcggtaaaattgtggaaatcaaaggacttccctgcgtcacaggccgacgaaaaggatgccaaattcttgtcaagatccaagaaaaataaggacactcgtgaagtttaaagttcgatgcagcagatacctttacaccctggtcatcactgacaaagagaaggcagagtaaactgaagcagtccctgccccccggtttggcagtgaaggaactgaaatgaaccagacacactggattggraactgtattatattaaaatactaaaaatcctaagtgtctttcgtctttgcggatgggaaagggaaaaatgctacctcgtagtggcttctgatgggaacaggacgcgggttctgttgctgccttcctgggncannnnnnnnnnnnnnnnnnnnnnnnnaaaacggagctttgttttggggttaatctggaacccaaggggggcaatataagttaattaccccctccgcctcgggggt

SEQ ID NO: 157052 - DNA, 332 bp, Homo sapiens; identical to SEQ ID NO: 157048
  misc_feature (1)...(332): n = a,t,c or g

SEQ ID NO: 157053 - DNA, 334 bp, Homo sapiens; identical to SEQ ID NO: 157049
  misc_feature (1)...(334): n = a,t,c or g

SEQ ID NO: 157054 - DNA, 446 bp, Homo sapiens; identical to SEQ ID NO: 157050
  misc_feature (1)...(446): n = a,t,c or g

SEQ ID NO: 157055 - DNA, 705 bp, Homo sapiens; identical to SEQ ID NO: 157051
  misc_feature (1)...(705): n = a,t,c or g

SEQ ID NO: 157056 - DNA, 508 bp, Homo sapiens
ttacgggccgacccacgcgtccggagccatgctgaggagctgcgccgcgcgcctccgcacgctgggggctctgtgcctgccgccagtaggccggcgcctgccgggaagcgagccgcgacccgagctgaggtcattttcttctgaggaagtcattcttaaggactgttctgtccccaaccccagctggaacaaggacctaagactgctctttgaccagtttatgaagaaatgtgaagacggctcctggaaacgtttgccttcatataaacgtacacctactgaatggattcaagacttcaaaacccatttttcttggtagaaacacgccactttcccattaatatatctgaggcatcaaaatataaagctaagaacagattgaagtactagttactacctgaaaaaaagaaagaatataatgcaggattatggttctatagtcaccaattttatagaccagaaatcacaataaattttgcagattggagagcataaaaaaaaaaaaaaa

SEQ ID NO: 157057 - DNA, 1231 bp, Homo sapiens
atgctgaggagctgcgccaggcgcctccgcacgctgggggccctttgccagccgccaccggtaggcaggcgcctgccgggtagtgagccgcaacccgcgctgaggtcattttcttctgaggaagtcattcttaaggactattctgtccccaaccccagctggaacaaggacctaagactgctctttgaccagtttatgaagaaatgtgaagacggctcctggaaacgtttgccttcatataaacgtacacctactgaaaggattcaagactttaaaacccattttctatagacccaaagcttatgaaagaagaacaaatgtcacaggcccagctcttcaccagaagctttgatgatggcctgggctttgaatacgtgatgttctacaatgacattgagaaaaggatggttatgcttatttcacggaggcccttacctgtaaggaccacctggattcattcatggaggagccattgcacccatgattgatgctactgttcggtatgtgtgcaatgatggctgggggaatcgtcatgactgccaatctcaacatcaattataaaagacctatccctctttgttatgttgttatgataaatagccaacttgataaaagtttgaaaggaaggaaattttttggtttcctgtaatgttccagaagtgttggatgaagaagaccctatactccagaggcgacaagcttaatttataaagccgaatcccggctaaaaagtctgacataaagagctgctggtgaactccatctcattctcgcccctccagaagaagcagttgtcccccaaatactgtgctccctcactgctgaatccctgtagggagaagcctgccaacagtgaccttccgaaacagccttctgaatacaaagaggattcagtttccatcttctcaactttttaacacagaaacacttcctgcgagcatatcgacaactctcgggccactacaccctggccttgttcatcttctaattaaatatcctttgaatgttttgtaataattttaatgttgacaataagagtttaaaaaataatttgattttggactgtatttagatttctctttaattttgctgtagaaatagtaaatgatttaaagtggttatgatgtgttttatgaaggcttactattttatattgtacttatttaatttgtatttgagtctgtctaattttaaataaaaggtttatacatttgaaaaaaaaaaaaaaaaa

SEQ ID NO: 157058 - DNA, 496 bp, Homo sapiens; identical to SEQ ID NO: 115160
  misc_feature (1)...(496): n = a,t,c or g

SEQ ID NO: 157059 - DNA, 444 bp, Homo sapiens
cggcccggaggaggctcatgcgggatttcaagcggttacaagaggacccacctgtgggtgtcagtggcgcaccatctgaaaacaacatcatgcagtggaatgcagttatatttggtgtatgctgatggtagcatatgtttagatatccttcagaatcgatggagtccaacatatgatgtatcttctatcttaacatcaattcagtctctgctggatgaaccgaatcctaacagtccagccaatagccaggcagcacagctttatcaggaaaacaaacgagaatatgagaaaagagtttcggccattgttgaacaaagctggaatgattcataatagacaactggtctgttaatctttttcatcattgttgtgtataatttacctctcattagaaaggctaacaaattttaaagtgcacagggttttaaggattctgcagaaaaa

SEQ ID NO: 157060 - DNA, 418 bp, Homo sapiens
  misc_feature (1)...(418): n = a,t,c or g
acgcgagcggccgctcgcgatctaaaactagtcgggacnnnnnnnnnnnaaaactgaccgcggggcaattgcggagcatgtcaaccccggcccggaggaggctcatgcggaatttcaagcggttacaaaaggacccacctgggggggtcaggggcgcaccatttgaaaacaacatcatgcaggggaatgcagttatatttggaccaaaagggacaccttttgaaaagggtacttttaaactagtaaaagaattttttgaaaaatatccaaataaaccaccacctgttaggtttttatccaaaaggtttcatccaaatgtgtatgctgagtggagcatatgtttaaatatccttcaaaatcgatggagcccaacatatgagggatcttctattttaacatcaattcagcctctgctgaa

SEQ ID NO: 157061 - DNA, 637 bp, Homo sapiens
cagagtgtgtaactaattttagtattgtctttgcagtgtatgctgatggtagcatatgtttagatatccttcagaatcgatggagtccaacatatgatgtatcttctatcttaacatcaattcaggtaagtgtgtgttaggatgtattataatttgtcagtattctgtaggatatagtcagctccttagcacacaggtaaccaatggcagagcttggacaagaatccatgcttttcagctaacttttctctttcagtagtgcctacttgggatccagtctgcagtccctttcctgattgtgtaagttacatgttctcacaggtcaaacctaatttgtgtccatgaagcatagccaagggttgtggaaaagaaaaaatggcttggaaaaaccataggaacctaaagaaactgccaagtgtagataagcattgagtatgttaccccatccaagaaattctattttaaaaaaagaaaggaaaactaatgtaaccatttgtcgaagcagtctggcagaatatttcagaatagatctttgaatgaaaatttaggaggggtggagtgaggggtgttccggttttgcggatttgagaggagcattactaatatgttggtttgtgatgtactttttaaagttttt

SEQ ID NO: 157062 - DNA, 1011 bp, Homo sapiens
  misc_feature (1)...(1011): n = a,t,c or g
cacagtgattcggccgccgcgccggggggtgggggggctgcgcgggacttttttttttttcagactgaccgtaggggcagctgcggagcatgttcgaccccggcccggaggagcgctcatgcgggatttcaagcggttacaagaggacccacctgtgggtgttcagtggcgcaccatctgaaaacaacatcatgcagtggaatgcagttatatttggacccgggagggacaccttttgaagatgggtaccttttaactaagtaatagaattttctgaagaatatccaaattaaaccacccaactgttagggtttttatccccaaaatgtttccatccccaaatgtgtatgcctgatgggtaggcatatgtttaagatatcccttcagaatcgatgggagtcccaacatatggatgtatccttcctatccttaacattcaattcagtctctggctgggatgaacccgantccctaacagtccagcccaatagcccaggcagcacagctttatcaggaaaacaaacgagaatattgagaaaagagtttcggccattgttgaacaaagctggaatgattcctaatagacaactgggtctgttaatccttttcatcattggttgggtataattttacctctcatttagaaagggctaacaaattttaagtgccacaggttttaaggattctgcagaaaaaaaagaaaaaagtccttcagtttagaacctacaaaagcttgtgtatcttgattaatgtactttttattgcatggtgtgaactaagttattgctgcataaatttgtaatatatcctgtttgtatttttttccaagtgtataatgttggtgtggagttttcatgacagaatatacacattttgtaaatctgtacttttttcaaatattgaatgccttatttttgaattctttagatttttaaattggagaaaagcacttaaagttttttatatatgaatattacatgtaaagctgttaaaatacataacttcagtgca

SEQ ID NO: 157063 - DNA, 669 bp, Homo sapiens; identical to SEQ ID NO: 122356

SEQ ID NO: 157064 - DNA, 519 bp, Homo sapiens
gcggccgctcccacctgtcgaatggtgaaaaaagaagtagaaatcgtggcccacctccctcttggggtcgtcgccctcgagatgattatcgtaggaggagtcctccacctcgtcgcaggtacttgagagaaagcttgttaagaggtattggtgtaatggagtagctagtaggagcaggtatttctcttaagtttgttggtgggttttaaactttggaagaatcggaggtttctgtgaaacatttgttgggtgtaatttggggtatgtgagttgtgctgagtgttggcttttgtctttaggtcactgttcatgttggtagtcagtaacttctatcttggatctgtcttctagttcatctttctagttgcatctttccaaatcttcccttatacttcagtttaggcctttttccatttcttggctccataatgacaaacattacattcaactctagctcttcacaaatttgtgttttctactattagcacaattgtaatatttatcaaacaggcagctgtt

SEQ ID NO: 157065 - DNA, 1046 bp, Homo sapiens
atatttttggtatttttcattacagaaatgcatcgtgattcctgtccattggactgtaaggtttatgtaggcaatcttggaaacaatggcaacaagacggaattggaacgggcttttggctactatggaccactccgaagtgtgtgggttgctagaaacccacccggctttgcttttgttgaatttgaagatccccgagatgcagcttaagtttaatatctttgccccctcagaacactatgtggctgccgtgtaagagtggaactgtcgaatggtgaaaaaagaagtagaaatcgtggcccacctccctcttggggtcgtcgccctcgagatgattatcggttcccgagcatgctgttttctctcagccttctctccaaccttaaccaaatcggcagcagccacctcgaccgcccacacattcctggccaatcagctcagctgtttatttaccaaatgtcttcacaacaactacagcagcagccttcggctaacaaaaaagcaggaaaaatccacaacacccccttcgccaaccaactaaatccaacggcaacatctgggcaaaaccttttcaggcaaattcttcctgggccgtcagtccgggcaggcctcaccttcaccatttctagcttgttgaaacccaaaactaatctccaagaaggagaagcttctctcgcagccggagcaggtccctttctagagataggagaagagagagatcgctgtctcgggagagaaatcacaagccgtcccgatccttctctaggtctcgtagtcgatctaggtcaaatgaaaggaaatagaagacagtttgcaagagaagtggtgtacaggaaattacttcatttgacaggagtatgtacagaaaatttcaagttttgtttgagacttcataagcttggtgcatttttaagatgttttagctgttcaaatctgtttgtctcttgaaacagagacacaaaggtgtaattctctatggtttgaaatggatcatacgaggcatgtaataccaagaattgttactttacaatgttcccttaagcaaa

SEQ ID NO: 157066 - DNA, 1407 bp, Homo sapiens
  misc_feature (1)...(1407): n = a,t,c or g
ccactccgaagtgtgtgggttgctagaaacccacccggctttgcttttgttgaatttgaagatccccgagatgcagctgatgcagtccgagagctagatggaagaacactatgtggctgccgtgtaagagtggaactgtcgaatggtgaaaaaagaagtagaaatcgtggcccacctccctcttggggtcgtcgccctcgagatgattatcgtaggaggagtcctccacctcgtcgcagagtcaccatcatgtctcttctcaccaccctctcgaatctgcattagccagtcaactagccctttcagcgtcatgtgaccagcgcgccccattcagcttggctggtcgtcgtttcacatgacccaggctggccagtcgtcaggttgcaccgccctttggttcccgagcatgctgttttctctcagccttctctccaaccttaaccaaatcggcagcagccacctcgaccgcccacacaattcctgggccaatcagctcagctgtttatttaccaaatgtcttcacaacaaactacagcagcagccttcggctaacaaaaaaagcaggaaaaatccacaacaccccctttcgccaaccaactaaatccaacggcaacatctgggcaaaaaccttttcagcaaattcttcctgggccgtcagtccggcagcctcacctcaccatttctaggcttgttgaaacccaaaactagtaagtttttcctgcttatacagtttactgctggttaaaataaggagtaagcggcttaaagtaattcttttttctggatcaaaggctggctgtgcataattgaatggtaacgtacatatatattgcttgaaaaacttttaagggtgatagggaactcgtaatgtaactaggccttcaagtgaaacttatttgcatgtgcaagatgccaaactaaaaattttaatatctctaacagattagcttttctggcaaaaatttgttgaatcctatcacctttaaatggttttactaacagtttcaaaatttaaaattttggggttgaagtgtgggccaagctaaggtaattttggtaagcctaaacacactcttaaatgtgacgatcacaaatgcagttctaatgtagcacttaatggcatcaatatttacacctaccgcgttttcacaaaattacactatccacctggtacctaagtcttgtcatggacttacaggtttgcatgggttccaaatactggtttatggtactgtttttggaactactbgtgggacnatattttggtgtggtgtttgggtagtgaagttagtttgacatgragttttgcattggacagatctgctgtgaagcattctttgttaaagtgaatccatggttggaatacctgcttttcacttgagctttttgattcttaatccttctgtg

SEQ ID NO: 157067 - DNA, 990 bp, Homo sapiens
cccacgcgtccgatttcgtggacgccgggtgagtgagagagttggttggtgttgggccggaggaaagcgggaagactcatcggagcgtgtggatttgagccgccgcattttttaacccctagatctcgaaatgcatcgtgattcctgtccattgggactgtaaggtttatgtaggcaatcttggaaacaatggcaacaagaccggaattggaacgggcttttggctactatggaccactccgaaagtgtgtgggttgctagaaacccaccccggcctttggcttttgttgaatttgaagatcccccgaggatgcagctggatgcagtcccgagaagctaagatggaaagaacactaatgtggcttgcccgtgtaaagagtgggaacttgtccgaatgggtgaaaaaaagaagtaggaaatcgtggcccacctccctctttgggggtcgtcgcccttcgagatggatttattcgtagggagggagttcctcccaccttgttcggcagatctccaaggaagggaggaaggtttcttttcgcagcccggagcaggtccctttcttaggagatagggagaaagagagagatcgctgttttcggggagagaaaatcacaagccgtcccgatccttctctaggtctcgtagtccgatctagggtcaaatgaaaggaaatagaagaccagtttgcaagagaagttggtgtccaggaaatttcttccttttgccaggagtaggtacagaaaattcaagttttgtttgagacttcataagcttggtgcatttttaaaatgttttagctgttcaaatctgtttgtctcttgaaacagtgacacaaaggtgtaattctctatggtttgaaatggatcatacgaggcatgtaatacccaagaattgttactttacaatgttccctttaaccaaaattgaatttgctttgaacatttagttatgcacagactgataataaacctctaaacctgcaaaaaaaaa

SEQ ID NO: 157068 - DNA, 555 bp, Homo sapiens
  misc_feature (1)...(555): n = a,t,c or g
ttttaatataacccactatataatagtgaactaaatatgtttgtttcatagaaacaacttacatttgccaatataaggcaaatggtctatgtacagatacatcaggactgcctaactgacagtgagtgttgctagccaggctccaagctaatggagctaatacggtggagctctctgctgaatggactttcccttcaggatacgtcggatctgttctcccacagggccatcgggaaccaaatgcactggcttgtcgttctccaagttccgagtacttgggtctgctcccttcctcatcaacaggcggacagcatctaattgtgtcaaccgatactgcaggctggcagcaacatggagggcagtgttgccattgtaagccttcgcttccaccgctgctcccatttgaattangcacttaatggtatcaaccagactcttattctttagtaaaagctcctgaacttcaggtgaatgaagctgttgatttctttggagttcatggaccacaacattgtgggctatgactgcacagtggaagggagtcagcccatcata

SEQ ID NO: 157069 - DNA, 801 bp, Homo sapiens; identical to SEQ ID NO: 141535

SEQ ID NO: 157070 - DNA, 445 bp, Homo sapiens
tgtttactttcttgaactcaaagattattataagagatctgaaataagctttaaaaggagtttagtatttttaaaagtcacctcaaaatcttgagaaatattgtgtgtatttcttcgtatacttacaagttaataggagtagtgtagatggtataagaaaggaatgaaactcagaaggaaatacaccacattggccataagaaataaacctcacaaattttatttgtttctcttccagatccgacgtatcctgaagggaaagtccattcagcagagagctccaccgtattagctccattagcttggagcctggctagcaacactcactgtcagttaggcagtcctgatgtatctgtacatagaccatttgccttatattggcaaatgtaagttgtttctatgaaacaaacatatttagttcactattatatagtgggttatatta

SEQ ID NO: 157071 - DNA, 3688 bp, Homo sapiens
  misc_feature (1)...(3688): n = a,t,c or g
atgaagcttccagaggaaggagcaggcagcaacatttgctgttctgcaatttttgctgttttgcagcctcctctggtgatacccaggcaaacagtgtctggagtggacctccagcaaactccaacagacctgcagctgagggtcctgactcttagaaggaaaactagcaagcagaaaggacatacacaccaaaaccccatctgtatgtcaccatcatcaaggaccaaaggtagacagagggataaattggaagaaatcttgcggggattaactccaaggaaaaatgatattggagatgcaatggttttctgtcttaataatgctgaagctgctgaagaaatagtggattgcattactgagtcgttgtccatcttaaagacaccccttcctaaaaaggcgtgcgcgccccgagtagtcagcggtgcggggccggcgggtacctggctggcgctcggcgcgggcgccgcctttcgaccgggactccacggcgccgcgggaggacacccgccaggcagaggagaagtcggaggagtccggacccggcgaacccggcccccgagggccccagaccgagcaactggcgtctcaagccccccggggccggcgtccgccggcaaccccccaaaaagttatagggtacatgtgcacaaggtgcaggtttgctacataggtatacatgtgccatgttggtttgctgcagccgtcaaattgtcatgtacattagatatttgtcctaatgctatggtgtcggcagcgcgccaggtcccaacaggagccggcacccccgtgaggagacaggaaggcagcattgaggtttatgaagatgctggctcccattacctctgcctgctgaaagccggacccagggacagtgggacatacagctgcactgcttccaacgcccaaggccagctgtcctgtagctggaccctccaagtggaaacgcaccctagtttcctaattccccatctgagcctaagaccaagcgcaacccggaaccctgggtttcggttttccagcttcagccaccgtccgaggcctttgcccctcgcacttggccctcgcactcgccacgtgcccctttccagcctaacccttcaggtttgcttcaggtggggtcgtgggcgccaggttctttctccagctggggggctctgtgtgcccagggcgctcctgcgctgggatctgcgaggagatacccagagccctgaaaagctgtatatgccaaaaacaattaaagaaacttctctgagtacttaccatgtaccaggaattacactgaatgaccgcagtataataaacaaaatagatcctggtgtagaagagagtcccttggatcttcatgtttgtcatggaaataactatgtggatgaaaaaccagcactactgctgctgagcgggaagcttggatgcccctccctcacctcttgctacagcaactgcctcagctatggaaaccgctgtcgactattgcaggaacttgtagtcaaccagcatgtagagcagcagccacactacacccacaaaccaactctggaatacagtccttttcccatacctccccagtcccccgcttatgaaccaaacctctttgatggtccagaatcacagttttgcccaaaccaaagcttagtttcccttcttggtgatcaaagggaatctgagaatattgctaatcccatgcagacttcctccagtggtcaagcagcaaaatgatgctcacttgcacagctttaacatgaagcccacaagcgcctgtgaaggcatggtggggcacgagatggcctctgactcttcaaacacttcactgccattctcaaacatgggaaatccaatgaacaccacacagttagggaaatcactttttcagtggcaggtggagcaggaagaaagcaaattggcaaatatttcccaagaccagtttctttcaaaggatgcagatggtgacacgttccttcatattgctgttgcccaagggagaaggttcactttcctatgttcttgcaagaaagatgaatgcacttcacatgctggatattaaagagcacaatggacaggatatccacagagtgcctttcaggtggcagtggctgccaatcagcatctcattgtgcaggatctggtgaacatcggggcacaggtgaacaccacagactgctggggaagaacacctctgcatgtgtgtgctgagaagggccactcccaggtgcttcaggcgattcagaagggagcagtgggaagtaatcagtttgtgggatcttgaggcaactaactatgatggcctgacttccccttcactgtgcagtcatactcccacaatgctgtgggccatgaacttgagagaaatgaacagcctcattcacctgaagttcaggagcttttactgaataataatagtctggttgataccattaagtgcctaattcaaatgggagcagcggtggaagcgaaggatcgcaaaagtggccgcacagcccttgcatttggcagctgaagaagcaaatctggaactcattcgcctctttttggagctgccccagttgcctgtcttttgtgaatgcaaaggcttacaatggcaacactgcccctccatgttgcctgccagcctgcagtatcgggttgaccacaattaagatgctgtcccgccctgttgatgaggaagggagcagaccccaagtactcggaacttggagaacgaacagccagtgcatttggttcccgatggccctgtgggagaacagatcccgacgtatcctgaagggaaagtccattcaagcagagagctccaccgtatttagctcccattaagcttggagcctggctagcaacactcactgtcagttaggcagtcctgatgtatctgtacatagaccatttgccttatattggcaaatgtaagttgtttctatgaaacaaacatatttaagttcactattatatagtgggttatattaaaagaaaagaagaaaaatatctaatttctcttggcagatttgcatatttcatacccaggtatctgggatctagacatctgaatttgatctcaatggtaacattgccttcaattaacagtagctttcgagtaggaaaggactttgatttgtggcacaaaacattattaatatagctattgacagtttcaaagcaggtaaattgtaaatgtttctttaagaaaaagcattgtgaaaggaaaaaggtaaatacagcattgaggcttcatttggccttagtccctgggagttactggcgttggacaggcttcagtcattggactagatgaaaggtgtccatggttagaatttgatctttgcaaactgtatataattgtcatttttgtccttaaaaatattgtacatacttggttgttaacatggtcatatttgaaatgtataagtccataaaatagaaaagaacaagtgaattgttgctatttaaaaaaattttacaattcttactaaggagtttttattgtgtaatcactaagtctttgtagataaagcagatggggagttacggagttgttcctttactggctgaaagatatattcgaattgtaaagatgcttttcctcatgcattgaaattatacattatttgtagggaattgcatgcnnnnnnnnnnnnnnnncccaaaaaaggtttttgttttggccccaaggctgaaaaacaggggcataattttggttact

SEQ ID NO: 157072 - DNA, 792 bp, Homo sapiens; identical to SEQ ID NO: 126056

SEQ ID NO: 157073 - DNA, 6481 bp, Homo sapiens
  misc_feature (1)...(6481): n = a,t,c or g
tcccctgagatggagtctcatcctatcacccaggctggagtacagtggcacaatcatagctcactacagcctgaaattcctgggctcaagcaatcctcccacctcagccttcctagtagctgggatcacagataagagccactgcacttggcccaaaaacatatttaaaatgttaatactttagattggtttcagtcatgttatagggaataatggaacgtatttataccagagtattaacaatgtagaaggacccttgaaacgaagccaaaaagataggagctgtggcaattaaggagacttccaagaagtctaatactaagtagggcatccctgcttaatcaataacacttcatttcgtgaccatgagacaagaaaactacagagacttcatccctaacatccttcagctccagaaccaatgccaaatcacctaactccaggttatatgacaaaaaaaaacatctgtttaggacattctttagtgggatttgtttttctggtcacagtcacaatgacggatttaaaaaaaaaagagtatctcaacttcctattgggagtacatgttttcccctgattttaaactcatgggacaaaaagaaagtgttgactggcatctggcaagataattaaatatctgaaacaccctgaaggaaacaaagagggtactgtggtcaagagtaaggtggacaggataccatagaagatatatccagtgtatataatgataactgctaaaacaccctcaaaactcactagcagaatgtaatcaagtttattttcttgttcaaagtccaatatggatgtttttggtcaagtagctattatgccctaaatagtaactcaggtattcagacttcttctatgctatgactccatcaccgtcaaaacatgtgcttcaaggttaccttgaagaggaaggaggaagagaataatggaaatggctcagccaccctttaactgccttggtctagtattgaaacatcacttccactcattttccactgttgagaactactcacataggcctagatgcatggagctgggaaatgcagtttacctgtgtccagaaagaggacatttgggtgagcatctggccagtttcttccacagaagcaaaggtaatagtggtatgaattcaggaagatgaaaatgagctcactggggaaagagtattcaaggaagatggagcatgtgcaaagactctcagtacaaacagtttggaaagcttgaggaataaaaagcaagtctgtgtggctggagttttgtgaaaggggaggagtgggttaagatgcagatggtgatggtgacggaggcctgggcaagatcacacggggcctgaaaagtttgtcttttgttctcgaggcagtgagaatccattgaaggattttaagcagagaagtgacataagctgatttacattttaaaaagatcacatggctgtgtggaaaattaattgctttagggacacgagtagaagcaattagaccaccagtaaggcagttactgcaggagttgggtatcctaaaaccagatggctggtcagagaattcacctgggaaggaggatgaccaggggatgaaaggttctaattactggtctctgtgaaaagctgtagagagttttgtgcagttacataaatggttgggtttggagctgagcggtgtctctgccaagatcatgttgtttcttttagaactgtgttcccttaggactggactatattatgggaacagaagctggagcacaccaataactgcagaagcagtaactatttatttggagaactctcaaagggatgctgaacaagcatgaggcacggataaccaaacccaattttattcttgtctcttaccaccctccaaattttattcactgggaggtactctccctgctatggagaaaagctgcagcgaggttgtgatgttcttaatagatagtcctgtgatcagtttaaggaacaaacataatctcaattaattagaatgtctaatcctgtgtaacaataatctgcacctgttgcagttttaaatccctttttcctctcccagctctgccccagctaagtctaggagcctgcactgggaaagggaggagtgattggtatgctcttccctctcctcggctcctctctacctaatcactgctgattgctctgggcccaagtgatgaggagaggtaaacagataaatcattttgccctgactgggtatttctatgcactgtgggcctggaagatatttcctctcccctattctcactctcaaatgataaactggcttcctgctcccctgaaaaaaaatcaaagcaatcagaaatgaacttctggggccctatcaggaactctggaagagggctttcataatggagcaacctcttaccactgccatttacctcaaacaggccctccacattactcagcaatccttaccccactgcattctgagttctctctcatctcaatagcactcgacagctaacaacctgcccatcctcccataaaaaaaaaaaaaaaaaaaaaaacactggctgggcgcggtggctcatgcctgtaatcccagcactttgggaggccaaggcaggacagatcgtctgaggtcgggagttcaagaccagcctgaccaacatggagaaaccccatctctacttaaaaaacaaaacaaaacaaaaaacaaantttangccagtgcgcatgcctattaatcccagcttacttcaggaggatgaggcaggagaatcactttgaagctggggaggcagaggttgcagtgagccgagatcacgccactgcactgcagcctggggcaaccaaggagcaaaactctgtcttaaaaaaaaaaaaaaaaaaaaattaactctcctggttttactcctacatctctgggtgaaccttctcctcttccatcaccttcactgcttcattttcctttacccatccatgacatgctcctcagttctattctgagccattttctcttctcattatcttaccctgaatatctcatctattctgactttaattaccacctctaggctgctgattcccagacccccagcacagatttcacgcatgtcccacttcctaaaatccaacactttgaatggcatcaccagcctacccacagttgagcaacctggaacttacttcagattcctctcttaccaacctcaacatcccaccaattctacctaatgaagttctcctgtctgcctacttcttccatcatgactagtcaacagtgccctcatcttgtgccctagtacctgggtttctataacacccctgttctcatctatcccactcaactggaccctgtcattccttatctctccctaggtgaataagtacactggctatatctcaaatgacaagctccgggaatacaaagataaacatggcttgagaaaacaacagccaaatgcacaaaggaatcacaatgcaatatttagaagctgaagtagcactcttcacatagtactttgagagtacagatgaagaactgattttgctttgggagtagaataggaaacaactaggctgttcggaaagatgagcaaactgccagtccgatgaatatccagcagaaagaacagtacgtgtagaggcactgtgtagtgcctgcctaatgattcacagcccagcctccaaacatgccctctggactacagcctgtttcaaaacctccatccccttattagaggcatccaactggctcagggcatagaacctatgatctcccaatgggtactgtcaggtattcctggaaacaagtacaagaggccatatctttatacctgggcacatggcagataccttttgggggaggcctagaatctatcattcaaactcaccttccctcagcaccttgcctatagctttcccaggacatgctgatctgagtccactgcaaggcagagatagtggacagactcttccgccaatgaacagcccaatgcccccaagcccacatggcatcaacaagttgtttatgaacagagacccagctccctcactacccctccaaggacagaagctcagaatctattaaaagtcattaaatagcctatgaagcaggcctgttgaaaggtctagcctctcccagaggcttccttagtcaacaaatccattctttacccctcagcctccaaccagcctagggaagatcttcaaaaaacaataaggcttacaacacataatagtcatagctagtttactgagcacctcctatgttcccagccctggctacagatttctccagttaacccacacaaccaccctgcaagacaaaaattctaccattttccaaatgaggaatgtgatatacagagattaaatgactttaagtgcctctgggtagcaggccaagaattaaatccaggtctacctgattccaaaatctgtgctctcagctatatacatcccaaagtcccacaggacaataggtgttgggagtggcttgatgctatatggttccaaaaatggagatgaggggagaggggaaagataaaccactagaaatgctcggtatggggacaaccaaacagtctcaagttggtggctcagactgatgtcttgagccaagatgttggtggacaaccagttgcctcagagtcaaacagcaacagctgcctgtctgcaaccttgaaggcctgggcaaactgaagctgaaggagcagaagctatgggtgagcagaggaagctgatctgtagacagatcagatgacagcagagtggagatggcaggacaggaaggccatgtggcttcttagttggaaagaagagcaaaacctaaagatgccttgaattccaaaccatctagttttcataacacctgaagtgtcatgagacagatatccccatgttctcacaataaactctttattgtttagctagccccagtgactttatgcatcttataaccaagaagccttcagtagagcaagtctgagccagaggttttatcacactttgtcctcagggtccaccaggaaccaggtcttggctcacagccaggctggaaacagtcttcacagttctgagcctggagtttgagatctgcctcccctttcaaggaagatccagaggtcacctgcgcttgtagagacatggctgaagctgcaggcctgaaagctgagccttgggccctaccagagggggcccagtcttttggaaatcaaacaagaagaaatggctgttggtcaggtccttggagacaatcttgaagcctagcttggtcacagcccgcagaaaggttcgaacatcctcaaagcggctgctgacctcagccactttcaggagaccccctggcttcagtactctatttgcctcctctaggaagtccctgatgttggttcccatcagtgaaaggcaaaacacagccacatccacagactcatcctccagaggaacctgggccatgtcacacacagtgaccctagggtccagagaagccaagtcaaagcaatgcacagggttccggatacttgaagccaagcggcaatccccacagccgaagtcagccaccactagggatgcaggccgctggcgaagatccctggcgatgcggtccactggctgcagtggccacttcttcacttggctctggaagccgcggtggtagagaagaaaagcctcagggtcttcctggaagagacgctgtgcagcactgctgggccctgagtacaactgttcattgaggtagcgaaatcgggccccatccagccgctgtgccatgcgggctcgcaaagcccctgcccgagcctcatggctgtctgtcctgggaacaggagacacctctgtcttctctgtgggggcctcagctggggcctggtctggcacctgaggtggctgaaacttgttcttacatcttctcttgttcttttgccggttccgccactgcttgcggcttaatgtatgagggggtttaggggaagtggacccagggctttgctttggtggatcatttgtagtactacccttccaggctttgggacctgtttggtcaacattgtccaggtgctgggctgaatttataggggcatgtttctggcatttcctctttcttttctcatcttcagcagagtcactgccaacaagagcctgtttgtggcatttcttcttcctttctacttcttcctcagagtcactgcaaggtgggccctgtttttgacatttcttcttccctttcttccctacttcagcagaggcactggcaaatgatgcctttttggggcatttcttcttcctttcctcctcctcctcctcagagtcacttatacataggctggggggatgctgggaaagagatgctgcctctagggcccgtaatgtggccaagagctggcggcgcttggagcccttgttttgcgaggaggccgcaggcggaggtcgtgagattacgggcccaaggcccgcggctactggggccgcctcggcccactcaggctcttcgaacatgagggtcgggagggcagggtcgcc

SEQ ID NO: 157074 - DNA, 906 bp, Homo sapiens
  misc_feature (1)...(906): n = a,t,c or g
ggtctcactttgccacctaggctggggtgccatgccacgatcacggctcactacagcctcaaccttccaggctcaagcaatcctcccacctcggcttcccaagtagctgggactactcactctaggccatgtcctgagattacccaaacagctctacagagaggtcccacaggattaacaactaaggcttcccggccaaaagccagaagaggaagtaaagtctcctggacaatagccatcctcccaccccaaagngggccttcagatgacttcagccttgccaacatcttgcctacaatgttatgaggaatccctgaggccaggaacaactctgcttaaggtgggctccttaaattttctggatggcacaaaactatgtgaggataataggattaaatgtttcattgttttaaggctgctaaggtttagggggtagtttgttatacaggcaataggataaaaatttaaggtatctctcaattattaaatttctcacattgtttgcacctcaacttttttcctttcccaacattcatcagaatcttgaggagcaaggcagctattaattagaaaaggtatctccacatgatcgtcacacccttccctgattggacagtcaccccataaagaacataattagcctgaaaataaatgaggtgcccctttagatgttaagtacagtaagaaagagaggcactgacaaacttagcactattacttactggtttgacttatttaaacctcagggggattccctctactctctcttttatatttgccctgtggaaaggctttcattgggagcagggcaagagccctaaccagaatttttatgaaaacctaataaccctaaagtacctaatcacatatcagacaaattttcaaaactttgttagacagtgagtt

SEQ ID NO: 157075 - DNA, 1977 bp, Homo sapiens
atggagcggttagagacaatcaacatcctcacattggaaaaggcagacttgaagaccaccctttaccatactaaacgtgctgcccgacacttcgaagaagagtccaaggatctggctggccgcctgcaatactccttacagcgtattcaagaattggagcgggctctctgtgctgtgtctacacagcagcaggaagaggacagggggcactgcctgagctccccagatcaaaacttctcactcttcaccatccagtcctcgagctgcagagaagcggtcctccaccggcggttacagcagaccataaaggagcgggcgctgctgaacgcacacgtgacacaggtgacagagtcactaaaacaagtccagctagagcgagacgaatatgctaaacacataaaaggagagagggcccggtggcaggagaggatgtggaaaatgtcggtggaggctcgaacattgaaggaagagaagaagcgtgacatacatcggatacaggagctggagaggagcttgtccgaactcaaaaaccagatgggtaagatggggctgctacaagatgaggccaaacacctgaggcaggaggtggaaggtctggagggaaagctccaatcccaggtggaaaacaatcaggccttgagtctccttagcaaggaacaaaagcagagactccaggagcaggaggagatgctccgagagcaggaggtgcagagagtgcgggagcaggagagactgtgtgaacaaaacgagaggcttcgggagcagcagaagacgctacaggagcagggtgagaggctgcgaaagcaggagcagaggctacgcaaacaggaggagaggctgcgaaaggaggaggagaggctgcaaaagcaggaaaagaggctgtgggaccaggaggagaggctgtggaagaaggaggagaggctacaaaagcaggaggagaggctcgcgctctcccagaaccacaagctcgacaagcagctggccgagccacagtgcagcttcgaggatctgaacaacgagaaaaagagcgcactgcagttggagcagcaagtaaaggagctgcaggagaagctagacgaggtgaaggagatgcagtacgtggccacctatcagcagctgacctctgagaaggaggcgctgcacaggcagttactgctgcagacccagctcgtggaccagctgcagcagcaggaagcttggggcaaagcggagcacctagaagctgccagccagcagaaccaacagctagagacccagctaagcctcgtggctctcccgggagaagacccccttatgctcttggtttcccaccttctgattgctctggcccctcaccccttccgggagccagtggtcagacactttgtcacctgtgaccaacagctcggcatttaccagaaggcatttgaacatcttggcaatgcactgacttatgaccctaccaactacaaggccatcagctgcctgaaacgagccaactacttggcaccctttgattggaagattctgtataatttgggccttgtccatttgaccatgcagcagtatgcatcagcttttcattttctcagtgcggccatcaacttccagccaaagatgggggagctctacatgctcttggcaggtctgcttagcacgtgtaaccctttagtaaacctgaactatgctgtgctgctgtacaaccagggcgagaagaagaacgccctggcccaatatcaggagatggagaagaaagtcagcctactcaaggacaatagctctctggaatttgactctgaggtatgtcttttattagctcccaagagtcataaccagagcaatcagacaagagaaagaaagggcatccagatcagtaaagaagaagtaaaactgtcgctgtttgctgatgacatgatcgtatacctagaaaaccttaaagactcatccaaaaagctcctagaactgtatctaagtgaatattggagcttttctgtgtaa

SEQ ID NO: 157076 - DNA, 320 bp, Homo sapiens
gtctgcttagcacgtgtaaccctttagtaaacctgaactatgctgtgctgctgtacaaccagggcgagaagaagaacgccctggcccaatatcaggagatggagaagaaagtcagcctactcaaggacaatagctctctggaatttgactctgaggtatgtcttttattagctcccaagagtcataaccagagcaatcagacaagagaaagaaagggcatccagatcagtaaagaagaagtaaaactgtcgctgtttgctgatgacatgatcgtatacctagaaaaccttaaagactcatccaaaaagctcctagaactg

SEQ ID NO: 157077 - DNA, 497 bp, Homo sapiens
gttcacatatcccctcaattttcttagtttctcacggttgtaaaggaaacagatacacttactccactgctttcttgtagacttcaatggcccttgtccaagtctccctccagcaagtggatcttccccagcattatataagtcagatcgtgccctattaagaattcagggcattgtgccaactggttcttgtgccttgttgaactgcttcaggtatatgtagcaaactcctaggttatggctgatctcccaatctttctggttgagtttagctgcttcattatatacttcaatggcagctttatgttttcccaaaagaaataaagatctggccacctgcttgaggttatcagcactctgaggactaagaactgcacatgtctggaagagttctagggattcttggatatttccttctaggcgaaatatcaatgcttggacatagatagcatattcacacaatccctgagtctcttgaagctgttctttgatacaca

SEQ ID NO: 157078 - DNA, 2195 bp, Homo sapiens
  misc_feature (1)...(2195): n = a,t,c or g
atgcagggctttgtatataatcaccaggtgaacttggaaaccactaaggttctaacttcgacaggttctaccttgcagaccagtggttctcaaaaggaggttctcagacctacaggatcaaccaggaaacttgctggaaaggcacaagaccagttgcacaatgccctgaatcttaataggcacgatctgacttatataatgctggggaagatccacttgctggagggagacttggacaaggccattgaagtctacaagaaagcagtggagttctcaccagaaaatacagagcttcttacaactttaggattactctacttacagctcggcatttaccagaaggcatttgaacatcttggcaatgcactgacttatgaccctaccaactacaaggccatcttggcagcaggcagcatgatgcagacccacggggactttgatgttgccctcaccaaatacagagttgtggcttgtgctgttccagaaagtcctccactctggaataacattggaatgtgtttctttggcaagaagaaatatgtggcggccatcagctgcctgaaacgagccaactacttggcaccctttgattggaagattctgtataatttgggccttgtccatttgaccatgcagcagtatgcatcagcttttcattttctcagtgcggccatcaacttccagccaaagatgggggagctctacatgctcttggcagtggctctgaccaatctggaagatatagaaaatgccaagagagcctacgcagaagcagtccacctggataagtgtaaccctttagtaaacctgaactatgctgtgctgctgtacaaccagggcgagaagaagaacgccctggcccaatatcaggagatggagaagaaagtcagcctactcaaggacaatagctctctggaatttgactctgagatggtggagatggctcagaagttgggagctgctctccaggttggggaggcactggtctggaccaaaccagttaaagatcccaaatcaaagcaccagaccactttcaaccagcaaacctggccagtttccagcagcctctgggctctaatcaagctctaggacaggcaatgtcttcaagcaagctgcatacaggacgctcccctcaggtgctggagggaacatcccagttcacaaagcccccatctcttcctcagcatcccgatgtctgcggtggaatcaagtccaactgaaacatcagaacaaataagagagaaataagaatagaatgaatgaccccaaaatagggttttcttgggcgaggatgtgctggattaggaaaggtgacatgacacaggcagagcagagtggcacccaccacagaatacagtgtgtgttattacgaggagccagcagttgagcctaaggtccttcgtacctacctggtattggcatttgaggtcggaaaccctctactgccccccataagccagggaaaagtgaaaagagaacaccagttccttttaagaactgggcagcaaaggcttgagggcttattgtatgtagctgagtcagcaaggtacatggatgcttgtctgcttttcaaaagggacttttcttttcctaggctggactgactccttccttagtttcaagggaacagctgagacagacctctgctgagtagctctgtgatgacaaagccttggtttaactgaggtgntccctcaggttgtgaggtttattagtccccaaggcaaacacaaatattagattaataatccaactttaatagtatacatttaaaagaaaaaaaaacaaaagccctggaagttgagcccaagccctgcctgagtaattgcagcctgcattttggccccaaagggaatcccagaacaagtcccctcccctgtattttgttccttgagaggggtcagtcctagaagctagatccctatcaggatgaggagcagcagccccagggcttgtctggatcagcaccaacggattttaaagaaaaaaggaagagtttcttagatgagtaattgttattgaagatagtcagtgataaccactgaccagatgctatcaatacactatgtgtcctttttagaataaagggttacatatcatcattcctttggggaaaattgttattcaggtataaaaacaagagatcataataaaaacctaaaagaacctatgaaaaaaaaaaaaaaagtcgacgc

SEQ ID NO: 157079 - DNA, 368 bp, Homo sapiens
ggcacgagcctgaagcaagaggaagccttccgcagctactttgagatcttcaatggtcctggtgaggtggatgcacagagcctgaagaatatcctgctcctaatgggcttctctgtgacgctggcccaggtggaggacgccctgatgagtgctgatgtcaatggagatggtcgtgaggacttcaaagacttcttggctgtgatgacagacaccacgcgcttcttctgctttgcggaacagaacgccctgtccgacatggctctttccaacccacacactctactctttgagatactgcacctgccgctatacatgctggccttaccaaatgctcgcctatgcgatattcctgactgcatcctcatacg

SEQ ID NO: 157080 - DNA, 358 bp, Homo sapiens
ggcacgagcggaacgagtatttccgaagtgaggacttaaaactacaaatcagcactgagaccatcaccctgagccatggttctagcacattctccttgtcctggtccgacacggctcaagtcacgaatcagagggtgcagatctcagtgaagaaagaaaaagtggtaactatcaccctggataaagagatgtcctttactgttgtacttactcgtgtttggaatcacgcaatctttatatgatgactctctcagaattcaactatcctactacatactagaatctgattcctactcctatgtatggcttaaccagatcatgcacatactcgtaaattacatgtccgatatgagtacgg

SEQ ID NO: 157081 - DNA, 709 bp, Homo sapiens
ataatatgtgtctgaaaagatgagttttagaaattaagaaaaaagagatcattcccacttcaactccttactctactctacccccattgaaaacagaccttcctccgctttacccacaggttcctccaccaagccaatgccagactcctgcaatccataggatggcaacaccacctctaaagccacagaactttaaggctttgcttcggaagtggcaccatggtctcttcattttccctttcttcaagggaaaatccttgaagaaatttccttcagaaaactcctgaagctgttaggagttttagtgttaagttccttccgaggatgttaattaggcttcaaactgttttgttctgagaaataaaaactaaactccagtcattcaagctaacagttgaggtgttctatggcttcaaaatcaagtaagatttgtaaatgaattgctaggtgcaaccattacttattatatgcccacaccaaaccagtggagaaaattatggacaccgccatccaagtgattgagattattaattttaggtagcaggccaattcagacatgtccacttatcctcaatggcagggggcctctcacatcccctccctgtaacccagttcaatacttctgtctaaagtctagaatttcaatgttgaaaggagagcgtggttagtgagagaaaatccacaaagtttatcctgatgatccttttct

SEQ ID NO: 157082 - DNA, 466 bp, Homo sapiens
  misc_feature (1)...(466): n = a,t,c or g
cccggatcgacccacgcgtccggctgtgccgatgagccccagcagccactccccagaggggaggcctccacctctgctgcctgggggtccagtgtgtaaggcagctgcatctgcaccgagctccctcctggaccagccgtgcctctgccccgcaccctctgtccgcaccgctgttgccctgacaacgccggatatcacattggttctgccccctgacgtcatccaacaggaagcgtcagccctgagggaggagacagaagcctgggccaggtgaacagtggtatagcagccactccagcctctgctgcagcagccaccctggatgtggctgttcggagaggcctgtcccacggagcccagaggctgctgtgcgtggccctgggacagctggaccggcctccaaacctcgcccatgacgggaggagtctgtggctgaacatcangggcaaggaggcggctgccctat

SEQ ID NO: 157083 - DNA, 5160 bp, Homo sapiens
ggcgcggggcgcggggctgggcccgggcggagcggcggctgctccggacatgtcgggccctcgcgccggcttctaccggcaggagctgaacaagaccgtgtgggaggtgccgcagcggccgccctcggacccctcccggcgccgcctcactcgcccgccttccagttcggcctacgacgcccggctgcgccagaaggtggcggtgaagaagctgtcgcgccccttccagtcgctgatccacgcgcgacgacagccgggggttcgtcgcccggccctgacgccccccgccacctaggtcatcgggctcgcggtggggcggtggggccctgtcctgaccccctgaccccgccccaggtacttggtgaccaccctgatgggcgccgacctgaacaacatcgtcaagtgccaggcgctgaggggggcgggcgggccgggcccggcgctcacgcagggctccgtcccagcctcctgtgctcacgctccgcgtgacctgcaggacctgaagcccagcaacgtggctgtgaacgaggactgtgagctcagggtgaggcccgtgggcaggggtgggcagggcggcggcggagcccgtgcggagcttgagaacaccacgtggtcgccccagatcctggattttgggctggcgcgccaggcggacgaggagatgaccggctatgtggccacgcgctggagggacgtggggtgggcacactgatggaggtcccctcgccctcgcacagtggatatctggtccgtgggctgcatcatggctgagctgctctgccccccatgctatgctactttgggctggccatcctcacctataggagagcgggctctgggcagcgccccaaagttttgggtctgggggcccaggaggggtctgtggctggcccgtgggtgtttcctgagtgacacagacattgaccagctgaagcgcatcatggaagtgggaggcagagagtgagcagcctccccaggtgttcttgtgtgcccccaggcccggacatatatccagtccctgccccccgccctggatgtacagctgacccccctccccaccactggcttccctgcagccatagacctccttggaaggatgctggtgctggacagtgaccagagggtcagtgcagctgaggcactggcccacgcctacttcagccagtaccacgaccccgaggatgagccagaggccgagccagggccgggctgtgggaggcacaagctcaccctttcccttcacctcctagagctcacttaccaggaagtcctcagctgggacgaagctgcggggcggcgctcccctccccctgcgcttccccccaggctccggccctccccaggctccggccctcccccggcggcggccgcctcgggtttccggaggtgggcagctcccgggcctgccatgagctctccgccgcccgcccgcagtggcttttaccgccaggaggtgaccaagacggcctgggaggtgcgcgccggggcctgcgcggggtgcccggccttcccgctaagcggtccgccccgcagctcggccgtggacggccgcaccggcgctaaggtggccatcaagaagctgtatcggcctttccagtccgagctgttcgccaacccagcccgtgtcctctgctgcattctcaaccctatgtggcccccccaggtgatcgggcatgcagaggctggctctgtccgctgacagcgctccggcccctcccacagttacctggtgatgccgttcatgggcaccgacctgggcaagctcatgaaacatgagaagctaggggctctgagagggtgcgctgaagcctgccaccatgcttgggagggtggggcacagtggccacctttcctctgcccccaccgctccttgggagtcccctagaacccacctccccaattcttcccacagatcctggacttcggcctggccaggcaggcagacagtgagatgactgggtacgtggtgacccggtggtctcatcctgtccccctgcccacggagctgaccagggcttctatctcagtggacatctggtctgtgggctgcatcatggcggagatgatcacaggcaagacgctgtgctcctgcccaggtgggggcagtgggggccctgatctctggcccccgagctgtgttcctgacctcggtgcagacctggaccagctgaaggagatcatgaaggtggcggacctgggccttggtgttggcccctcaccctttcttcccacacaggccaagaactacatgaagggcctccccgaatggagtgtggggcctcccgtggtctggcctgatgcaccttcccccgcagctgtgaacctcctggagaagatgctggtgctggacgcggagcagcgggtgacggcaggcgaggcgctggcccatccctacttcgagtccctgcacgacacggaagatgagccccaggtccagaaggccacgacagatgggccttctctgcccagcgaccctcatgcctctccagggcatccgggcctgggggacgtgatcgccatcagttccggagccacgctgacttgtggcatggctgctgtccacactgggcccaaagtgtgggcccataggtggcctgaggactggggcgtggcctttgccctgcagacccctcgcccccctcgcctttcaccccaggtcttcctgcgcccgggccgggtgggccttggggctgcgctggaccctgacccagggtggggtgcggggagggacctctgaactgagctcctcatctgccccagccccgagtgcgagatcgagcgtcctgagcgcctgaccgcagccctggatcgcctgcggcagcgcggcctggaacagaggtgtctgcctgctcctgctggtgaccctgcctctcctgcctgcccatctgcatgcagcccagagtatgtatccctggtcagggagacccaggtcctaggcaaggaaagggcagcagggaaggcagggggctcatctgcgcccctgcgcccacagagtacctttcactgcgcgcggctggccgcaggggctggactgcagctggggggccagggcgaccctgacgtgacccaaatcctactctcacgccgtaggcctcccgggcaccatggccagagggcggctgccaacgggttctgtgtgttcaacatggaggtgggaggccctgcccctttgccaccagcgctgtctgtacccaggatcctcgtcgtggactgggtgttgagggtcctgacctttgacctctggccctggctggctgttggcagcgtcctttacttctcctggcaccgctatgagcatgggcgcttctggcctttcctgcgagagtcagatgcagacgcagtggggcggggacagggcctcggggctccagcccctctctgtcgaccctccccactccggcctggcctgtagtttgaccctgactggggtcctggggcccaggtcccccatcacacatggctctggttccaggggcaaatgcaggccacgccagagtgcttcgcccacctcacccatcccagtgatatctctgccccaatcatgtctccaccctcctcccagggcggctaccacctggagtcactggcggagtcagtgtgcatgacagtacagacgctgctgggtgacccgggggccggggtgtgagaccaggtgtcacgactgttgtgtctccctcacagtgccctagagtccatccagtcccacctcgggctcctgtgcagtggctatgactccgaactgtccctagatgtgaccgctgtgccgatgagccccagcagccactccccagaggggaggcctccacctctgctgcctgggggtccagtgtgtaaggcagctgcatctgcaccgagctccctcctggaccagccgtgcctctgccccgcaccctctgtccgcaccgctgttgccctgacaacgccggatatcacattggttctgccccctgacgtcaacctgcggtcactccgtgtctgtgtgtccctctggtctgtccaccacaggccacacgagtccctggcccgggaggaggccctcaccttgggagttggttggtgcctcattctccactgtttattcatcccacaggtgaacagtggtatagcagccactccagcctctgctgcagcaggtgacgggtgggtggggcactgtgtggtactgaatggagccttcctcagctggggtgtgggagaagggctgctggaggcaatgccaggtgggtctccagcacagaggctcagcagtcacagcacccctgcccatggagccagcaggtgtccgtagatgaggagctgggctctgctgtccccacagatgaccggtggtttcctgagctgcatcttgggcttggtgctgcccctggcctatggcttccagcctgacctggtgctggtggcgctggggcctggccatggcctgcagggcccccacgctgcactcctggctgcggacgagggaaaggaccagtgactgcttccgtcttcgcccctggtccagaactccacaccccagctagcagggatcctggcccgggtgctgaatggagaggcacctcctagcctaggcccttcctctgtggcctccccagaggacgtccaggcctcacctcgcccccgccccacccatcgcgccccggcccgtcccatcgaggcccatgcaacccacgctcggtcccgttccggcccctgcgccccgctgcgcttcgctccccgcccttgcgccgttagtaaacatcgctcaaacgaaacgctggctctgcctcctttactgagcacgctcggcctcggtctctcacccgcggtgccggactcaggccggaagtatgccgcggcccaggcctcaccaacttcacgcgctgccggcgttcccgtgacgtatttccggcgcgcccgccctagtgctcttcacactggcgcggctgtgacgcgacggaggcggcgagagcggcagccgtgggcactttccacgggtgaggcctggagaacgggtggacgtgcaggccagaacccgggacccacccggctgagcccccagactctccgctgcccacgaccctcggagtggcaccctctcctggccgtctcctctcgtgggtcccgaagaacgggtgcaaagccgagttcgtccgctgtactgcgcgggcgcgcgtttcgttc

SEQ ID NO: 157084 - DNA, 229 bp, Homo sapiens
ggtgggcagctcccgggcctgccatgagctctccgccgcccgcccgcagtggcttttaccgccaggaggtgaccaagacggcctgggaggtgcgcgccggggcctgcgcggggtgcccggccttcccgctaagcggtccgccccgcagctcggccgtggacggccgcaccggcgctaaggtggccatcaagaagctgtatcggcctttccagtccgagctgttcgccaa

SEQ ID NO: 157085 - DNA, 142 bp, Homo sapiens
atgcagaggctggctctgtccgctgacagcgctccggcccctcccacagttacctggtgatgccgttcatgggcaccgacctgggcaagctcatgaaacatgagaagctaggggctctgagagggtgcgctgaagcctgcca

SEQ ID NO: 157086 - DNA, 708 bp, Homo sapiens
gaacgaaacgcgcgcccgcgcagtacagcggacgaactcggctttgcacccgttcttcgggacccacgagaggagacggccaggagagggtgccactccgagggtcgtgggcagcggagagtctgggggctcagccgggtgggtcccgggttctggcctgcacgtccacccgttctccaggcctcacccgtggaaagtgcccacggctgccgctctcgccgcctccgtcgcgtcacagccgcgccagtgtgaagagcactagggcgggcgcgccggaaatacgtcacgggaacgccggcagcgcgtgaagttggtgaggcctgggccgcggcatacttccggcctgagtccggcaccgcgggtgagagaccgaggccgagcgtgctcagtaaaggaggcagagccagcgtttcgtttgagcgatgtttactaacggcgcaagggcggggagcgaagcgcagcggggcgcaggggccggaacgggaccgagcgtgggttgcatgggcctcgatgggacgggccggggcgcgatgggtggggcgggggcgaggtgaggcctggacgtcctctggggaggccacagaggaagggcctaggctaggaggtgcctctccattcagcacccgggccaggatccctgctagctggggtgtggagttctggaccaggggcgaagacggaagcagtcactggtcctttccctcgtcc

SEQ ID NO: 157087 - DNA, 914 bp, Homo sapiens
cagtcactggtccttcccctcgtcccaccccgcagcacctccaccctgcccagcttacctcctccaggagggccaggactcggccccctgccagcccccgaagcattgcagccaggagtgcagcgtgggggccctgcaggccatggccaggccccagcgccaccagcaccaggtcaggctggaagccataggccaggggcagcaccaagcccaagatgcagctcaggaaaccaccggtcatctgtggggacagcagagcccagctcctcatctacggacacctgctggctccatgggcaggggtgctgtgactgctgagcctctgtgctggagacccacctggcattgcctccagcagcccttctcccacaccccagctgaggaaggctccattcagtaccacacagtgccccacccacccgtcaccctggggcccaggcacacgtccatcacatgcccgtccacatgcatggctggacatatgcaagacctgagagtcctacccgtcatgggcgaggtctggaggccggtccagctgtcccagggccacgcacagcagcctggaagaagagctggcctcaggacaggtgttcatgttgtccagagtccattcccagaactctctgtgcttggccagccaggataggggtgcccacaggtcctgccgtcagaggctcaggatggccaagtgaggcttacctctgggctccgtgggacaggcctctccgaacagccacatccagggtggctgctgcagcagaggctggagtggctgctataccactgttcacctgtgggatgaataaacagtggagaatgaggcaccaaccaactcccaagccaggtaaacagatccacagttcccttcattcggtgtgtctctgcggctactgtcagccacacgtcttcttaca

SEQ ID NO: 157088 - DNA, 2006 bp, Homo sapiens
tggttaacgccagggttttcccagtcacgaacgttgtaaaacgacggccagtgccaagctaaaattaaccttcactaaagggaataagcttgcggccgcttcgggtttccggaggggccggagggcgggcgagggcgtcacgtgcgcgccgcccgcgggccggttggtccccgggcgggggaggggccgtgcgcagcctgggtcggggtcgggccggggtcggcacctgggacatccctgagggaagggccgggagcgggagcgccccagcggccggcgggcgggcgggcgagcggacgagcggcgcggagccggcccgaggcgcgcgccgagggagccccgtccccggtcgtgggggcaccgcccgcaggctctgcggggtgggcagctcccgggcctgccatgagctctccgccgcccgcccgcagtggcttttaccgccaggaggtgaccaagacggcctgggaggtgcgcgccgtgtaccgggacctgcagcccgtgggctcgggcgcctacggcgcggtgtgctcggccgtggacggccgcaccggcgctaaggtggccatcaagaagctgtatcggcccttccagtccgagctgttcgccaagcgcgcctaccgcgagctgcgcctgctcaagcacatgcgccacgagaacgtgatcgggctgctggacgtattcactcctgatgagaccctggatgacttcacggacttttacctggtgatgccgttcatgggcaccgacctgggcaagctcatgaaacatgagaagctaggcgaggaccggatccagttcctcgtgtaccagatgctgaaggggctgaggtatatccacgctgccggcatcatccacagagacctgaagcccggcaacctggctgtgaacgaagactgtgagctgaagatcctggacttcggcctggccaggcaggcagacagtgagatgactgggtacgtggtgacccggtggtaccgggctcccgaggtcatcttgaattggatgcgctacacgcagacggtggacatctggtccgtgggctgcatcatggcggagatgatcacaggcaagacgctgttcaagggcagcgaccacctggaccagctgaaggagatcatgaaggtgacggggacgcctccggctgagtttgtgcagcggctgcagagcgatgaggccaagaacaacatgaagggcctccccgaattggagaagaaggattttgcctctatcctgaccaatgcaagccctctggctgtgaacctcctggagaagatgctggtgctggacgcggagcagcgggtgacggcaggcgaggcgctggcccatccctacttcgagtccctgcacgacacggaagatgagccccaggtccagaagtatgatgactcctttgacgacgttgaccgcacactggatgaatggaagccgtgttacttacaaagaggtgctcagcttcaagcctccccggcagctgggggccagggtctccaaggagacgcctctgtgaagatctctgggctccggggtggcagtgaggaccaccttcaccttccacctgagaggggactctcgttgccaccttgaccttggctggggcttgcatcccaaggcatccatcagagcagacgcccgggttccatggaccctcctccccacggccatgcctctgctcttgggcgcccatcatggaggagcacctgaactttctggacaagacctctggccgacctggggatggcctctgatccctggagcagtggaacacaaaaaacaatactctcagaaacctcagagctggtggggctccagatcaggccttggcctctgagccctgcctgctctgggccatgcagaggaaggacagagggtgggcgcagggcaccaactcagggacatcccctctcctgggcgacgtcagtggaccttcctgcacccccagcctggaatgtaaatcagctgtgtggtgcccgcgtggctggaaggaaatagacccttttgtagctccc

SEQ ID NO: 157089 - DNA, 3002 bp, Homo sapiens
  misc_feature (1)...(3002): n = a,t,c or g
ccatgcttgggagggtggggcacagtggccacctttcctctgcccccaccgctccttgggagtcccctagaacccacctccccaattcttcccacagatcctggacttcggcctggccaggcaggcagacagtgagatgactgggtacgtggtgacccggtggtctcatcctgtccccctgcccacggagctgaccagggcttctatctcagtggacatctggtctgtgggctgcatcatggcggagatgatcacaggcaagacgctgtgctcctgcccaggtgggggcagtgggggccctgatctctggcccccgagctgtgttcctgacctcggtgcagacctggaccagctgaaggagatcatgaaggtggcggacctgggccttggtgttggcccctcaccctttcttcccacacaggccaagaactacatgaagggcctccccgaatggagtgtggggcctcccgtggtctggcctgatgcaccttcccccgcagctgtgaacctcctggagaagatgctggtgctggacgcggagcagcgggtgacggcaggcgaggcgctggcccatccctacttcgagtccctgcacgacacggaagatgagccccaggtccagaaggccacgacagatgggccttctctgcccagcgaccctcatgcctctccagggcatccgggcctgggggacgtgatcgccatcagttccggagccacgctgacttgtggcatggctgctgtccacactgggcccaaagtgtgggcccataggtggcctgaggactggggcgtggcctttgccctgcagacccctcgcccccctcgcctttcaccccaggtcttcctgcgcccgggccgggtgggccttggggctgcgctggaccctgacccagggtggggtgcggggagggacctctgaactgagctcctcatctgccccagccccgagtgcgagatcgagcgtcctgagcgcctgaccgcagccctggatcgcctgcggcagcgcggcctggaacagaggtgtctgcctgctcctgctggtgaccctgcctctcctgcctgcccatctgcatgcagcccagagtatgtatccctggtcagggagacccaggtcctaggcaaggaaagggcagcagggaaggcagggggctcatctgcgcccctgcgcccacagagtacctttcactgcgcgcggctggccgcaggggctggactgcagctggggggccagggcgaccctgacgtgacccaaatcctactctcacgccgtaggcctcccgggcaccatggccagagggcggctgccaacgggttctgtgtgttcaacatggaggtgggaggccctgcccctttgccaccagcgctgtctgtacccaggatcctcgtcgtggactgggtgttgagggtcctgacctttgacctctggccctggctggctgttggcagcgtcctttacttctcctggcaccgctatgagcatgggcgcttctggcctttcctgcgagagtcagatgcagacgcagtggggcggggacagggcctcggggctccagcccctctctgtcgaccctccccactccggcctggcctgtagtttgaccctgactggggtcctggggcccaggtcccccatcacacatggctctggttccaggggcaaatgcaggccacgccagagtgcttcgcccacctcacacagctgctgcatgtgctggccggcggccgggtctgtgccgtgctggagggcggctaccacctggagtcactggcggagtcagtgtgcatgacagtacagacgctgctgggtgacccgggggccggggtgtgagaccaggtgtcacgactgttgtgtctccctcacagtgccctagagtccatccagtcccacctcgggctcctgtgcagtggctatgactccgaactgtccctagatgtgaccgctgtgccgatgagccccagcagccactccccagaggggaggcctccacctctgctgcctgggggtccagtgtgtaaggcagctgcatctgcaccgagctccctcctggaccagccgtgcctctgccccgcaccctctgtccgcaccgctgttgcccctnaccaacgccggatatcacattggttctgccccctgacgtcatccaacaggaaagcgtcagccctgaagggaggagacagaagcctgggccaggccacacgagtccctggcccgggaggaggccctcactgcacttgggaagctcctgtacctcttagatgggatgctggatgggcaggtgaacagtggtatagcagccactccagcctctgctgcagcagccaccctggatgtggctgttcggagaggcctgtcccacggagcccagaggcttgctgtgcgtggtcccgggacagctggaccggcctccagacctcgcccatgacgggaggagtctgtggctgaacatcaggggccaaaggaagcggctgcccttatccaatgttccatgtctccaacgccacttgcaagtgatgaccggtggtttcctgagctgccatcttgggcttggtggcttcccctggcctaatggcttcccagcctgaccctggtgctggtggcgcttggggccttgcccatggcctgcagggcccccacgctgcactccctggctgcaatgcttcgggggctggcaggggggccgagtccctggccctcctggaggagaactccccncaccccagctagcagggatcctggccccggtgcctaattgagaagcaccttcctagcctaggcccctcctctgtggcctccccagaggacgtccaggccctgatgtacctgagagggcagctggagcctcagtggaagatgttgcagtgccatcctcacctggtggcttgaaatcggccaaggtgggagcatttacaccgcagaaatgacaccgcacgccagcgccccgcggccgcgatccggaccccaagcccacggctccctcgactctggggcacggaacccc

SEQ ID NO: 157090 - DNA, 816 bp, Homo sapiens
tggagacaaagtggctcactctgttaccaaggttggagtgcagtggcacaaccattgctcaccacaacctcgaccttctgggctcaagcgatcctctagcctcagtctccaaagcagctgggaccacagacgcatgccaccgtgcctggctcattttttaattttttgtagagacggagtcttgctagggctgcccagactgggtgtcgcactcctgggcctcaagcgatcctcccacctcgggcttcccaaagtgctgaggattacggggagtgaggccacaatacttgggcctcaaggattttcttaatgggaaattatgtttatctccctcaagttcgggaaagtgaggctgccgtactattctggtatcattacaatattacttttaaaatcaaatagttcctttataaatagttcttaattctaagtctaagcaaaaactgggaggtaacctgatgtaaaatgttccttcctatttaatccaaaagttgtctttttccccacaatacaaatatatcattttcattcccaattcctaatttggctacttcagtttgttttctgttttttgtcatcctttcttgaagcataacctggagcaagttctgctgtaaaactttaaaaaactgtgaaacttgtacacatttctttggaaaatttattgttgactttaactgtctgttggcctctaatatcaatactgggtgacattattggtaatgccacaacatgtattttaaaattaattttaaatgtaatcccctcataaaacagaaagactaccccttccaagtatctacctgttaagtgtct

SEQ ID NO: 157091 - DNA, 6567 bp, Homo sapiens
gagatcagcgctgggacggaacccgggttcctctcgaaccgggattgtgacgcttttggcctggctggccgctgttttctgtcccactttttactcgggcctgcgtccgctgccgccgtccctcagtttgcccccggaggaggcagggcggccgtgccttctgccgtgcgcccgcgtggctgccaccgcccctccgaatcctccggggccgcagaggggttcgctacggagggaggtgggggccttcgggaggaggaggcggaggaggcggaggaggagggaaggaagatggcggccgtggaactagagtggatcccagagactctctataacaccgccatctccgctgtcgtggacaactacatccgctcccgccgagacatccgctccttgcccgagaacatccagtttgatgtttactacaagctttaccaacagggacgcttatgtcaactgggcagtgaattttgtgaattggaagtttttgctaaagtactgagagctttggataaaagacatttgcttcatcattgttttcaggctttgatggatcatggtgttaaagttgcttcagtcttggcctactcattcagtaggcggtgctcttatatagcagaatcagatgctgcagtaaaggaaaaagccattcaggttggctttgttttaggtggctttctttcagatgcaggctggtacagtgatgctgagaaagtttttctgtcctgccttcagttgtgtactctacacgatgagatgcttcattggtttcgtgcagtagaatgttgtgtgaggttgcttcatgtgcgaaatggaaactgcaaatatcatttgggtgaagaaacatttaaattagctcagacatatatggataaactatcaaaacatggccagcaagcaaataaagctgcactctatggagaactgtgtgcactcctatttgcaaaaagtcactatgatgaggcatacaaatggtgcatcgaggcaatgaaagaaattacagcaggcttaccagtgaaagttgtgtgtggatgtcttaagacaagcttctaaggcttgtgtagtaaaacgtgaatttaagaaggcagaacagttaattaaacatgcagtgtatttggcacgggatcattttggatccaaacacccaaaatattctgatacactgctagattatgggttctacttactcaatgtagataatatctgtcagtctgttgcaatttatcaggcagcccttgacattagacagtcagtgtttggtggcaaaaatatccacgtagcaacagctcatgaagatttggcctactcttcctatgtccaccagtatagctctgggaaatttgacaatgcactatttcatgcagaaagagctattggtatcattacccacatcctacctgaagatcatcttcttttgggcttcttcaaagagggtgaaagcacttattttagaggagattgcaattgattgtcataataaggaaactgaacagaggctgcttcaagaagctcatgatttgcacctgtcttcactccaactagctaaaaaagcttttgggggaatttaatgtacagactgcaaaacactatgggaaaccttggaagactttatcagtcaatgagaaaatttaaggaagctgaagaaatgcacatcaaaagcaattcagattaaagaacaacttcttggtcaagaagattatgaagtagccctttcagtgggacatctggcttctttatataattatgacatgaatcagtatgaaaatgctgagaaactttatttgccgatctatagcaatttgggaagaaactttttggtgagggctacagtggactagaatatgattatcgaggtctcattaaactttacaactccattggaaattacgagaaagtggtttgaatatcacaatgttctgtctaactggaaccggttgcggagatcggcaatattcagtgacagatgctcttgaagatgtccagcacccagcccccgagtcccactgaagaagtggtgccagtcccttccctgatttcctcagaatgtccgagggacccgagctgcctgagggaaggacctcagttaacccaattacccttttcccggattccagggaattcatactgtgaaatcaaaaccatgttgttttggggggctggaatcttgcattgaaacactggtccagtcgattgaagaccctattttgggtgatccctatcgtgcagaatgtctgtaggaataagcatatgttcaggtatatgcagcatgtaccgcatgtgtaagtagtctggcccacattgtcaacctgagtagaacaaacaacaggaaatcttttttttgttgtttttaaaaaattcattttgcagaaagcctgaaagaaaaaaaatacccctaaataaaactatttaagagtttaaaagagttgcattcttattatgtaaggatgattttaacaactttttaatatgtaattcttccatgtgggaggtattcaatactgtagtgtaaaggaaattttatgcgggaaaatctttatatggcagtataggaaaagttaacacaagtacttaattaaaggggggacatccccgacttacgtttttctaccttgcccagataagtggatacaaccactctatattacaaggaaaggactgtcagattcatctgaactggaccagtgttgatctgtaatgtaatagaaaatctgatagaccagcacttctgacttttttttttttggtacaacaatgcaagatgccctgatagcatttgctaacaggaccaggaggatctaaaaaggaccagcctaatgtagaaggtggttatttggaccagaggctttagattattattttagatcctacatatacttttatcagtagaatgatttcatttagatgtataatgaaaaaggataatgcaaaaattatgtaatagataccaaattagggaagtttggcaatttcaatggcatatttttagtcaaggtacacagatggcagtgccataagcaagtctataaatatcggctgcagccatccccctcattttaaatgttgccctaataatcaatgcagttaacaagtatattggctgtgtgtcatgaaatagttcatgttcagatggaaatgttaggttactgtatggtttatggagattaatgaaaatgaatgcccaaaaataagtcttagaaaatcctccatttttatggtaaatagtaatacaactaggtcatttcatttgaaatctaggagtcaaatggaaagatcccctaataatacacctatttgcactgaacttgtctttgctgtttattgggttttgatttgattttttgtaagccagtcaggttatttaatgatgaggtaataatcaaatttaagaatttgtgacatgtagcaattcaagaaacaaaaaggtattttgctgttacctcaattcttactgtagtagcccatctgatgacttctatagttaagaatctgggttccccccctattttcaggggttcatgacttggctgttaaagatgttgctcctagctaatgcttggagtagtctgtgggtgaatggatgtgtgttgaattttagttttcttttaacatgcatgttgggtgagaggggaaaaaaatctaagctgtctgccacatggagtacagaaaagtggtagatttcaaattttattaatattttaggcactttttggaacttcccaaccttgttggaagctgttatttgcagtcctattagttttgagcccattgcatttaagttccctaggagggggttggttgggggatgtactgaaagagatgaagcaaacccacacccttaagatggtaactgtgtgatttagaaacctgagtttactcctcaaatcggaattattttctttttaaattttggaaagagtaaattgaccgtacttgcagtttatgaagctgccccccacccctcagttaattgtcagtcctaatgtcaagaggcacttctttattaattaccaaatagtactttgtgacccaaggactaacatttttaagttactcagctctatcctcatgggccctatatatttaatacctccaaagatattttcaggataggctttgtatacttttattggttatttagaatccagtggtatgtttgtggtataggaatgtcatggtaaattgtttttcaataaatattttgaaacatgtttccatatgaagtttttttttcaatctgtattttttggttttgtgcacatacagcatttcctaggataaaaataaacaaatgacttacagcctcatcctccctaactccatttgaactcaacttagctcacactcagtgataaaacaacatggtatgtagaagcctaggatcacagggtgataatgtcaattggcagccagttgtgtttttttgaaacatcattattggcagtttctccttatcaccactgctttaatgtagtttttttgtaaatccatatactttaatgcatacactctagcttaagaaaacattgccattttggttagggatatgacttaatgtgctattatttctggttctaatgaagaataataccctatgactttaagtgtaagattcatcctttaagtagggatgtttaggataagttagatgtgtgccactatgatttattgggtttcttaaaaatcttgaagaaaataataaaatttatctcacaataagttaacttgcgcaaactttttacatatggtgaggtgcgtaaggaagccctggccaacttaaagatttttctggaggttcagcaaagttatgttaaattaggggcctttggtctcatccttctctgactcttctacccagtcttttcctaaagttcggtgctactccagttgggtgcatcagggagctccgtcagcactcgcatgtgtcgctcaggtggccactcatgcctgcattccatttaatagagtcaattggaatttttagagcataatctttatggaccctcaaagctgactttgccaaagggattgagacccttactaccatcaaatctctgtctctgcttggttaaaaattggctcactattgctttgtagtaacccctgcccaggtattttttcacttgtgaaaataatttgagaaagacctttgttcctagcctgttgggaaaagtttataattttatgaaaattaagtacagaggctgcgatcttagaaataatgaaggtgccatttggctgctccttaatagtgcagacagaaaactgcagtgaacacatgccaaaacatgattgaagcctttggctgaaactttatacatagaaataatgatttgctcataacaggtatcattaactgccactttttatgttttccctagaatttgtagccttgctgcttgcttttcttctgggtggcaaagttactactggaaaaacactataagtacaaagtttttggggttttatctttgctttagaagtgggtgtgtacttcacctcttggctgtggaggaccttagttgccaggaaatttttttttttttttttcagacggagtttcgctcttgttgcccaggctgggagggcaatggcaccatcttggctcactgcaacctccgcctcccgggttccagcgattctcctgcctcagccttccgagtagctgggattacaggctcctgccaccacgcctggctaggaaattttttgttgttaatatgacatttggattaatctccagcttcaacagtacttcttttgtccataaatctcaggaatgttttaggcagaaaactggttttaccctgttgataatcagaaggagtgtgctttagggatttattgcataatactattctttaattgcaatcctagggtatgtataggcatgagtgggccttagtgagtttgttgaagtgcacatgtttttcaagagtaaaatttaagattaaaaatatatcctatatatagatatctagaaaacttggtttgtggtgcacagttaagtgttggatcactaaataaccattgcaggtaccgtttgtgtaacattactcatttctgtatattccttttatgggaagatattttgccatggtaactaaaacttttcagttctacttttatgatgtgaatgaatgctacgttttattaaatattaccaggtcagtactatttctatactctattaagccaacaggggattttaggtttaataggctcaaaataaaaagttccttaatggaacagttaaaaacaaaacacctaacaatcctttaccgtgaaaatccccccactaatagtggcccacaataatttcctatagaaatatcctaaggtcattcaaatagatttttgaagacggttccttcattgtgtcaggatgacctttcatatcattctcaccaacttgtagtgcccaccgttatttgtaactattaaaccatactaagtatgtttgtaaccagcattgtgatatattctgtacttgtattgctaaaaatgaattattgacctaataaatatagtgttcctgcaaaaaaaaaaaaaaaaaaaaaaaaaaagtcgagc

SEQ ID NO: 157092 - DNA, 681 bp, Homo sapiens; identical to SEQ ID NO: 144895

SEQ ID NO: 157093 - DNA, 1338 bp, Homo sapiens
atgtctcacagaaagttctccgctcccagacatgggtccctcggcttcctgcctcggaagcgcagcagcaggcatcgtgggaaggtgaagagcttccctaaggatgacccatccaagccggtccacctcacagccttcctgggatacaaggctggcatgactcacatcgtgcgggaagtcgacaggccgggatccaaggtgaacaagaaggaggtggtggaggctgtgaccattgtagagacaccacccatggtggttgtgggcattgtgggctacgtggaaacccctcgaggcctccggaccttcaagactgtctttgctgagcacatcagtgatgaatgcaagaggcgtttctataagaattggcataaatctaagaagaaggcctttaccaagtactgcaagaaatggcaggatgaggatggcaagaagcagctggagaaggacttcagcagcatgaagaagtactgccaagtcatccgtgtcattgcccacacccagatgcgcctgcttcctctgcgccagaataaggcccatcctaatgtagattcaggtgaacggaggccactgtggcccgagaagctgggactggcccccgcgagagggcttgaagcagcaaggtactgttgacccaagtgttttgggcaggaataaaatgatcgacgtcatcgggggtgacccaagggccaaaaggttacaaagggggtcacccagtcgtttggcacacccaagaaagctgcccccgcaaagaccccacccgagggcctgccgcaagggtggccatgtattgggggcatgggcatcctgcttcgtgtagccttctctgtggcacgcgctgggccagaaaggcttaccatcaccgcactgagatcacaaagaaagattttataagattgggccaggactttcccctcttttcaggacggcaaaagtgatcaaaggaacaattgcttccactgactatgacctattctgacaagaagcatcaacccctcctggtggctttgtccactaatggtgaaagtgacaaatgactttgtcatgctgaaaggctgtgtggtgggaaccaagaagcgggtgctcaccctccgcaagtccttgctggtgcagacgaagcggcgggctctggagaagattgaccttaaagttcattgacaccacctccaagtttggccatggccgcttccagaccatggaggagaagaaagcattcatgggaccactgaagaaagaccgaattgcaaaggaagaaggagcttaatgccaggaacagattttgcagttggtggggtctcaataaaagttattttccactgaaaaaaacaaaaaaaaaaaaaa

SEQ ID NO: 157094 - DNA, 420 bp, Homo sapiens; identical to SEQ ID NO: 126503
  misc_feature (1)...(420): n = a,t,c or g

SEQ ID NO: 157095 - DNA, 528 bp, Homo sapiens
attcactttgcacggagctcccaccatcatcatcggcattctcctcctcctcctcctcccccgcattccctccattttggtcgtcctcatcgtccatatctagggctagcacctcctcctcctcctcctcgccatcctcctggtctccactctgtacttcattccagccattagataaggcggcccgggatcgtgcctcatgaaagtcatctacctgatcttggtagtagctggtgtcccctggtgagggtggcaatcctaaatcatctccattttcgtcggtgagcgtgggacctgccttggctcgcacagctgcccacttagctgctccgcgccgccgggatctccccaccatggctcacaatctcaggttttacagcgactccggactttcggccaccactgacttcggcgcaggaatcaggcgctccggtaactcgtggctctaaacagcagcgcgctcccctaccaccggagtttgcagactcctgatcggctactggaatttcctcttccttccggacgaaa

SEQ ID NO: 157096 - DNA, 829 bp, Homo sapiens; identical to SEQ ID NO: 126505
  misc_feature (1)...(829): n = a,t,c or g

SEQ ID NO: 157097 - DNA, 2044 bp, Homo sapiens
  misc_feature (1)...(2044): n = a,t,c or g
atgaagacagtgctacagagacctgctacacttatgacagaaacaagtgctacacagctgtggtcccactcgtatatggtgcactttggccccggcgatggaggcgccggcttcggagtgtgccggccgccgcagcagcagggctcttggaggaccccgcggtccccgggctcacggctgcccttcctgctgttgagctacccgagcggcggcggcggcagcagcggcagcggcaagcaccgggacaccagctactaccaagatcaggtagatgactttcatgaggcacgatcccgggccgccttagctaagggctggaatgaagtacagagtggagacgaggaggatggcgaggaggaggaggaggaggtgctagccctagatatggacgatgaggacgacgaagatggagggaatgcgggggaggaggaggaggaggagaatgccgatgatgatgganaaaaactttactatgacacggactatggttccaagtcccgaggccggcagagtcaacaggaggcagaggaggaggaaagagaggaggaggaggaggcacagatcattcagcggcgcctagcccaagcgctgcaagaggatgattttggtgtcgcctgggttgaggcctttgcaaaaccagtgcctcaggtagatgaggctgagacaccgggtcgtgaaggatttggctaaagttttccagtgaaagagaagctgaaaatgttgccgaaagggaatcacccagaactcattggagctgattagaagacctttaaagtcaagttagacagacgttaaggatgtacctggagcccattttaagagtttggtggaacaagggatcattccacccggaaaaaggaagccaaatacattgaggaccaagtacaaacctcatacattgaattattgctcagaacatcaagtttttatttttgatcctgaaagctaggagagtcccaagcacattggacatcctgtcatagaaaggcttgttacctacccgaaatttgatcaacaagctgtccgttgtggatcagaagctgtcctcagaaaattcgtcatctgttgacacttaaggatgatgctgtaaagaaagaactgattccaaaagcaaaatccaccaagcccaaaccaaagtctgtttcaaagacttctgctgctgcctgtgctgttacagatctttctgatgattgtgcctcctgatgaaaaaagcaaaactgaagtactataaagaaatagaatacaggcaaaagctaaagagaaagaaagaagaaaatagcactgaagaacaggctcttgaagatcaaaatgcaaagagagctattacctatcaaattgctaaaaataggggaccttactcctaggaagaaagaagattgatcgcaatcccagagtgaaacacagagagaagttcagaagagccaaaattagaaagaagaggccaggttcgtgaagtatcgtaaagaagagcaacgttataagtggtgacttatctggcattcggtgcaggagttaaaaagagcattaagccttaaatgaagtttttgcttagccataaggtttttggcagttttggatcaataaatttttacttttaactaaagtcattgtattaatatataatactttaaattttaaaaattcttgtccacaaggaaatttgtctgggttattggacaatttataagaactatggggagcaatatgaaggtgcttgagaaaagagatgatgttgaagttttccaatattctgttgaagttttccaatattaagtatttaggcctaggggaaattttcacagttcattgtggagtgttaaacttagaacatgtgtaacttttcacataaagagaatgcatctttggacagttatcttatttgtaaggcagcctataaaatagttctgaagtattttatttacctaactataattattgggccagatacttgttaataaatgggcttaatgttaacatggatttcatatgttctgtgtggtttaaaagcataggaatgaaactttggttaaaagcagaaaaagga

SEQ ID NO: 157098 - DNA, 1348 bp, Homo sapiens
ttttttttttgtatttttagtagagacggagttttaccttgttggccaggctagtctcgaactcgtgacctcaggtgatccggctgcctcagcatcccaaagtgctgggattacaggcgttagccacgcatgcagcccctttcaagccttttaacatcatgtcaccttcacaatgagcagttgctcccattacccagtgaactcaccttctgatgggacagttaccctagttggggcttctcagccttgagagatgtgcagagcaggggacctgtccaggggcagagcaggccagacagcgtgggaaataatccaaacaggaggaaaggcatttcaagaacttgggcctctgggtttgactttaacacactactttcaagtattatgggcaggtctgtattaattaaactcctgcctgtctagtctttcagcctcattaggaaagcaagaaagcaggtgggctttttttgcagaacaattcttgggtagaacaaggggacatttgatggtttgggtttttcagtaagaaagatgaagtcctggagtatagggtagagtggtacagtggaaaatatttcagcttgggggttagaaaaataaacatgccgattcttgctttgccataaatgatgtcacttaacttgtgtgaccctgttttctcatcccctaaaatgatttgataagtttaagattaggctatttttaaatgtatgggaaggaaattgggtgttacccttcttggaaagacattttccctggcaagtatgggcaggctgtatctttcagtgtaacaaagttctattaaaggtcataactgctgccctgtaacttttgccttattctagaaacttctactccttgaatgacatgtgttggtacatgtttcttctctttcagatagaatggttaattttgacttgttgcttctgcgcacgtgtcctggaaataaaagtttcttccctctacttatcgctgatttctttcataggaagtcttaaggaaagaggcaaaaaacgggcctcatgggtcccttgaagttggaaaattctgtggagattgccaaaggagactcacttatgagcatctgttctcagtgtaaccttcaaatctgtggaaacataactaggcccattttatgattatttagaatgttaataaattgctctgagtttcctcaagtccattttgtaagatcagcccataggtgggtgttgtttcttttaagtgcgtgtactgtgtccaatgttacatttttagaagtgttcacgctttttgtaaaaaaaaatagttttaagcacattaaaggtcgtttgagtattgtcatgtcttttaaaaaaaaaaaaaaaaa

SEQ ID NO: 157099 - DNA, 939 bp, Homo sapiens; identical to SEQ ID NO: 126917

SEQ ID NO: 157100 - DNA, 1026 bp, Homo sapiens; identical to SEQ ID NO: 126918

SEQ ID NO: 157101 - DNA, 480 bp, Homo sapiens
  misc_feature (1)...(480): n = a,t,c or g
caaagaaacaaaaccctttatggttctaggtacatggcgttagtgagaagggaaccaatatttattgagctcttaccatgtttcagacactgttccaagtactttcacatacactaccccatttagtgacctgtgtaatccttgagatgggtatacattattctaattttacaggttagaaaatagactggataggccaggcgcagtggctcacgcctgtaatcccaatcctctcttaaaaaagtgatagctcagaaacatttgtaaaagcaaggtttttatttcattttggctctgtcattttcagaggcaaagaagttggcctgtaaaatagagtgctaggagctcttacgcccctccccttcttcccaacttcctacttcctaggcccttttattcaactcctaggaatagttaaagagagacacatctaggtgggggtggaaaggtgcccntaggcgggggaaactgaaccaaggg

SEQ ID NO: 157102 - DNA, 1275 bp, Homo sapiens; identical to SEQ ID NO: 122183

SEQ ID NO: 157103 - DNA, 6294 bp, Homo sapiens; identical to SEQ ID NO: 131479

SEQ ID NO: 157104 - DNA, 1725 bp, Homo sapiens
atgacgcgatctcggctcactgcaacctccacctcccgggttcaagtgattctcctgcctcagactcccaagcccacaagtacagaggtgctgtgttccttccccgtggctgctggaacaaatgatcacagcctggggggcttcgatccacagaaattgaatcgtcacagttctggagcccagaagcccagaatcaagggccaggcctgccgacacctgcttcacctggccattcagcggcacccccacttccgtggcctgttcaatctctccattccagtgctgctgtggggggacctcttcaccccagcgctctgggaccgcctgagccaacacaaagccccgtatggctggcgggggctctctcaccaagtcatcgcctccaccctgagccttctgaacggctcagagagtgccaagctgtttgccccgcccagggacacccctccaaagtgtatccggtgtgccgtggtgggcaacggaggcattctgaatgggtcccgccagggtcccaacatcgatgcccatgactatgtattcagactcaatggagctgtgatcaaaggcttcgagcgcgatgtgggcaccaagacttccttctatggtttcactgtgaacacgatgaagaactccctcgtctcctactggaatctgggcttcacctccgtgccacaaggacaggacctgcagtatatcttcatcccctcagacatccgcgactatgtgatgctgagatcggccattctgggcgtgcctgtccctgagggcctagataaaggggacagatcagcaatttgtgctgggatcagcttccttctgctctggcttggggttacccatgcagctgccgacattctgcagccctcacatctgagactcgactcctggccaaagggctacttccgcaaattatcagctctctctgatcgcaaaggggacacacgaaggggcagaacaacctggaagaacaggttctttgtgaacttcccctcggccaagcagtacttcagccagttcaagcacatggaggatcccctggagatggagcggagcccccagctgcggaagcacgcctgccgagtcatgggggccctcaacactgtcgtggagaacctgcatgaccccgacaaggtgtcctctgtgctcgcccttgtggggaaagcccacgccctcaagcacaaggtggaaccggtgtacttcaagatcctctctggggtcattctggaggtggtcgccgaggaatttgccagtgacttcccacctgagacgcagagagcctgggccaagctgcgtggcctcatctacagccacgtgaccgctgcctacaaggaagtgggctgggtgcagcagagccagggagagctcagagcacccaaagccacagctgcccaggcagagaggcgccagaggctcctggcgcccaccggccacactgccctcttcggggccgtaggacccctaactccacccccctccctggcagcacctcgagcagaaggccgagttctgaagaccctccttgacgctccatttctgggtgccaaggaagctggaggaatccctgactcaacttccccgaaggaggcctctgtggcggccagggtccccccctggagctgctgggaggcggcgctggctgcctggatgctgaccccagcgcggcgggcagagcggggcccactcttcttagcttttctactcactgttagagagagacctagctga

SEQ ID NO: 157105 - DNA, 3383 bp, Homo sapiens
  misc_feature (1)...(3383): n = a,t,c or g
gcggcggttagctcccagttcggcctctgaggaaaacgggcgttcgcctgcggttggtccgactgttagcaacatgagcggcctggatggggtcaagaggaccactcccctccaaacccacagcatcattatttctgaccaagtcccgagcgaccaggacgcacaccagtacctgaggctccgcgaccaaagcgaggcgacacaggtgatggcggagccgggtgagggaggctcggagaccgtcgcgctcccgcctccaccgccttcagaggaggggggcgtaccccaggatgccgcgggccgtggcggtactccccagatccgagttgttgggggtcgcggtcatgtggcgatcaaagccgggcaggaagagggccagcctcccgccgaaggcctggcagccgcttctgtggtgatggcagccgaccgcagcctgaaaaagggcgttcagggtggagagaaggccctagaaatctgtggcgcccagagatccgcgtctgagctgacggcgggggcggaggctgaggcggaggaggtgaagacaggaaagtgcgccaccgtctcagcagccgtggctgagagggagagcgctgaggtggtgaaggaaggcctggcggagaaggaggtaatggaggagcagatggaggtagaggagcagccgccagaaggtgaagaaatagaagtggcggaggaggatagattggaggaggaggcgagggaggaagaagggccctggcctttgcatgaggctctccgcatggaccctctggaggccatccagctggaactggacactgtgaatgctcaggccgacagggccttccaacagctggagcacaagtttgggcggatgcgtcgacactacctggagcggaggaactacatcattcagaatatcccgggcttctggatgactgcttttcgaaaccacccccagttgtccgccatgattaggggccaagatgcagagatgttaaggtacataaccaatttagaggtgaaggaactcagacaccctagaaccggttgcaagttcaagttcttctttagaagaaacccctacttcagaaacaagctgattgtcaaggaatatgaggtaagatcctccggccgagtggtgtctctttctactccaattatatggcgcagggggcatgaaccccagtccttcattcgcagaaaccaagacctcatctgcagcttcttcacttggttttcagaccacagccttccagagtccgacaaaattgctgagattattaaagaggatctgtggccaaatccactgcaatactacctgttgcgtgaaggagtccgtagagcccgacgtcgcccgctaagggagcctgtagagatccccaggccctttgggttccagtctggttaacatttgcccttgggaatactcctgcacaaggtctcctaccaccttctgctggacctgtgcttgggcatcagcaatgagtatgccttctattgtgctttgtttttgctgacttttctgcaccctgtttcctttggatattcagttctctcaacctcaagattgagacggtggtgggtatgcttctccacttccatatgaccttcatgctgttctggaatatcacatgctacgaggtcatccttcacactacttgtaagccaagcaaatgatactgtagattgtactgcctttatctgcactgcttggaccctgtttattcccagggcctctgaactggttgctgtcacttggatttctagctttgggagcctgttccacctactcagctctgcattgagcagtatgggcacatgccctgtggacagttactggacgttaatgaactcagaggagaaaagcagtgagccacttgttctgtgtgatttatggtacttcattgctcttccttcacctctagtcactttctattgctacctgccctacattggctcctgccaaggtccctctctctccctgttttccttttttttttttttttttttttttttgagacggaggacggagtcttgctctgtcgcccaggttggagtgcagtggcgcgatctcggctcactgcaacctccacctcccgggttcaagcgattctcctgcctcagcctcccgagtagctgggactacaggcgcgcgccgccacgcccggctaatttttatatttttagtagagacggggtttcaccatgctggccaggctggtctcgaaccccgatctcgtgatccgccctccttagcctcccaatcctctcttaaaaaaagtgatagctcagaaacatttgtaaaagcaaggtttttatttcattttgggctctgtcaattttcagagggcaaagaagttgggcctgtaaaataggagtgctaggagctcttacggcccctcccttcttcccaacttcctacttcctagcccttttatgcaactcctaggaatagttaaagagagacacatctaggatgggatgaaaggtgtccctaagcaggagaaaactgaacaaaaggctagagggcatgggccaggttaaaaattggggcctagagtgaagactgtgctgtcgttaagagctttcgaggaaggagtacttactccccaatgatgatgaatggaaaaatacttttcagggagaattgaacggggttaaagtgttaaatatgttgcctagacaagggttctttaaagaaagaccagccgcaactttgaatgctttctttacttgttttgtgacctaattttatgtggaagattggttattcaattaggatttaagtaaaattttttttttctgatttctaaacttattgtgaaaattgagctgtacagatattccttttggatttccaattggggaacatttggaagaccaacagtctttacttgccctgtacaatatagagacatatgaatagtcgataacagttttcaacttgttcttgtttcctgttaaactatattccctagggaacatagtttgaacaacttgggtctttgttagggcttgtccaaattgaccttcatgggaaaaataatctacaaaagtatggtttaattgattgtccttacatggatnaattttccctgggtaacaacttaggtaagggatatatcttttttcctaaattgcttaaatactgtggaaattgactctgacaaattgggaagtgtacccttgggcatatttgtcttccctttttatgcatgatggtaaaataaaagcatgttgttctgctagatttcttatttttcaccttacccataaatgtaatgcttgaatgaagttgttcatattaattaaaaattatggaatcattaaagtcctttaatccattaaagttcttaatggattaaaatcattaaagttcttaatggattaaaatcaaaaaaaaa

SEQ ID NO: 157106 - DNA, 487 bp, Homo sapiens
actgtggcgtggggctccatgaccgcccttggcttccgagaaaccgctgctctcctgcgtccgccctccgctcagcttgtgtggtgaactcccctcgtgcgcgaggtgccctgtggccagagtctgcatgtgcctctacttacccaaatcccaggggcctctcgctgggagctgcccccacccagtcagccccgggaccctctggtctgtgctgcagcctctgcgttgggcagcctctctcctgtttgctctggcaccatccaggccacagtctccgtgctccccactctccagcccggctcccctcttgctgcactcagagtcctggggctggggcaggttcagatctgcaaggcgggactccaggccctgccccctgctccacggctgctccttccggcccccatgcctggcgctgggcctgtatccacattccctgaagctgtgcattttctctctcccccgctgtcccatacggcgccagcta

SEQ ID NO: 157107 - DNA, 493 bp, Homo sapiens
agttttgctaccttgctcaggctggtctcaaattcctggcctcaaatgatcctcctgcctaggtctcccaaggtgctgggattacaggcgtgagccactacagtatgcaggaacctaaaatatcttcccagccctgggcgacaggagcgagactcctgtctcaaaacaaacaaacaaacaaaagacccaatctgagtcttatcgttgtactgatagaagggtcagatatccccacatggagttgagtgggagaaagagattcactagagaataactccttagagaccaatgtctgtagcaggtgtacaagcatccttgtgaaaagttatgggagcatgaaaaagacttgaagggccaaggacagtttgccatgggctgagtttattaccagcttagaccaggaattagaacaaaagaattctatacctcaggatttcgaaaaagtttagcaacttgagaggccagtgctgagcaacccagtacccaggaaatg

SEQ ID NO: 157108 - DNA, 318 bp, Homo sapiens
tttctttgagatggaatcttgctgtgatgcccaggctagagtgcaatggcatgagctcagctcactgaaacctctgctttgttcccccggttcaagagatttttctgcctcagcctctcaagtagctgggactacaggtatgcaccgccatgcccagttaatctttgtatttcgtgtgtgtgtgtgttttggaatcattgttttagaaaaacagattaaatattagattaaaaaataggttaaaacccccaaaacttaaatctaatcttagtgatgtttacatttatggccatctgcctcagtttcatgacgtcgacg

SEQ ID NO: 157109 - DNA, 410 bp, Homo sapiens
  misc_feature (1)...(410): n = a,t,c or g
aagaaatgggcaaaggtatagacagcctatttaatgaaataatagctgaaaacttcccaggtcttgctagagacatagacatttggaagctggaaactcaaggagtcccaaatagattcaatctaaagaggtcttcccagagacaaatgatagtcaaactgtcaaaagtcaaaaacagagaattctaaaaacagcaaaagannnnnnnnnnnnnnnnnnnnnnnnnnnnnnnnnnnnnnnnnnnnnnnnnnnnnnnnnnnnnnnnnnnnnnnnnnnnnnnnnnnnnnnnnnnnnnnnnnnnnnnnnnnnnnnnnnnnnnnnnnnnnnnnnnnnnnnnnnnnnnnnnnnnnnnnnnnnnnnnnnnnnnnnnnnnnnnnnnnnnnnnnnnnnnnnnnnnnnnnnnnnnnnnn

SEQ ID NO: 157110 - DNA, 286 bp, Homo sapiens
  misc_feature (1)...(286): n = a,t,c or g
gggagaagaggggaggacacagaagggagagagaaacggaggggggggcagcgagaggaaggagggggaggagcacgaggcgaggcggacgggccggggagaggggggaggaggagaagccaaagggcggccccgaagtgcacggaggcgaggacgggggagcaggggcagcaagagccagactccgtcccgccacctccccgcgcacatnnnnnnnnnnnnnnnnnnnnnnnnnnnnnaatctctacacgtcacccataagtgtgtgttcccgcccacgcgtccg

SEQ ID NO: 157111 - DNA, 705 bp, Homo sapiens
tttcgtctcagttccctccgttctcctcgggctccagttttggcggagcgaacgggaccggcccggcttcagagcgcgaggtggagggtggaacgcgggcgcctgaaggagttgttgtctcggcagcgcccgcggagacgtgaagaggtggttgtgggaagagaagtttgcagaactgaaatggaggtcagagcttcattacagaagatagtttctaatggtgatgaacaattggaaaaagccatggaagagattttgagagatttcgagaaaaggccaagcagtcttcttgttgattgtcaaagttccagtgagatttcagaccattcgtttggagatattccagccagccaaacaaataagccatctcttcagttaattttggatccgtctaacacagaaatttctacacccagaccatcttctccaggtggactacctgaagaagatagtgttttatttaataaactgacctacttaggatgtatgaaggtttcttccccacgtaatgaagtagaggctttacgggcaatggcaaccatgaaatcttccagtcaatacccctttcctgttaccctgtatgtaccaaatgttccagaaggttctgtgagacacatattaagtcttttgggtggtggtgaagatgttatagcatcatcaggtgtagaacttactgtgaactcacactgtagacatgcagagtaa

SEQ ID NO: 157112 - DNA, 497 bp, Homo sapiens; identical to SEQ ID NO: 126246

SEQ ID NO: 157113 - DNA, 416 bp, Homo sapiens
cgtcgactttttttttttgtagttttaatagacatggggtttcaccatgttggccaggctggtctcaaactcctgtcctcaagtgatccgcccaccttggcctcccaaagtgctgagattacaagcatgagccaccgtgcccggcctcaatgttctccaagcacattacattgtatagaaaaattaataaatacgttgggtgacaagttaacttattacctttaagggcttattaccgtttatcacttttcctcccacttttattaaggttataattaaaaaataaaaattgtatatatttacaatatacatggtttgatgtacatagacctcgtgaaattaaatctagctaattaacatacccacctcgcacttatttgtggtgagaacatttgagagctaatctcttgtcgagc

SEQ ID NO: 157114 - DNA, 792 bp, Homo sapiens; identical to SEQ ID NO: 126056

SEQ ID NO: 157115 - DNA, 7503 bp, Homo sapiens
atgctcttcctgaatcttgccactgcccatcaagagatagaatacatttcccctccccttgaacatggaagcaaccaagctttaagaagcacagctttggagacactccatgagtctgcactgctttcaggggaactagcacttaagaccttgtgtaacaaaatggacactggggacacagctctaggacaaaaagctacctcaaggtctggagaaactgataaagcatcaggtagatggagacaggaacaatcagctgttattaagatgagcacttttggcagtcatgaaggacagcggcaaccacaaatagagcctgagcaaatcggaaacacagcatcagcacaactgtttggttctgggaaactggcctcccctagtgaagtggtgcagcaagtcgcagagaagcaatatccaccgcatcgtccgagtccttactcatgccaacactcactctctttccctcagcactcattgccacagggggtcatgcacagcaccaagccacatcagagcctcgaaggtcctccgtggcttttccctggccctttgccatccgttgcctctgaggacttatttccttttcctatacatggccacagtggtggttatcctagaaaaaagatttcaagtctgaaccctgcttatagccaatactcccagaaaagtattgaacaggcagaagaggctcacaagaaagagcacaaacccaaaaagcctggcaagtacatttgcccttactgcagcagagcgtgtgccaaacctagtgtactgaaaaaacacatcaggtcccatactggggagcggccatatccatgtataccttgtggtttctctttcaagacaaagagcaatttgtacaagcacaggaagtcacatgcccatgcaattaaggcaggattagtacctttcacagagtcagctgtatctaaattggacctagaggctggttttattgatgtagaagcagaaatacattcagatggtgaacagagtacagacacagatgaggagagttctttatttgccgaggcttctgacaaaatgagtcctggtccacccatcccactggacattgccagcagaggcggctatcatgggtcattggaagaatcattgggaggtccaatgaaggtgccgattttgattatccctaaaagtgggattcctctccctaatgaaagctctcagtatattggccctgatatgctaccaaatccatctttaaatactaaggctgatgattcgcacacagtcaaacagaaacttgcactaagactgtcagagaaaaaaggacaagattctgagccatcgctcaaccttctgagcccgcacagtaaaggaagcactgattctggttacttttctcgctcagaaagtgctgagcagcaaataagccctcccaacacaaatgcaaagtcttatgaagaaatcatctttggaaaatactgtcggcttagtccgagaaatgcactcagtgttacaaccacaagtcaggagcgtgccgcaatgggtaggaagggcataatggaaccattacctcacgttaacaccaggttagatgtcaagatgtttgaagatcctgtttcacagctgatcccaagcaagggagatgtcgaccccagtcaaacgagcatgctgaaatccactaagttcaacagtgagtccagacaaccccagattattccatcatctatcaggaacgaaggaaaactttatccagcaaacttccaaggcagcaacccggttctcttagaagctcctgtagactcttcaccccttattagaagcaactcagtgccaacttcttcagcaactaatctaactattcctccttctttgagaggaagtcactcatttgatgaaaggatgactggttccgacgatgtattctatccagggaccgtgggcataccccctcagcgcatgctaagaagacaagcggcatttgagctgccttcggtacaggagggccacgtggaagtcgagcaccatggcaggatgttgaagggtatcagcagttcatccctgaaggaaaagaaattgtctcctggggacagggttgggtatgactatgatgtctgtcggaaaccctataagaagtgggaggactctgaaacaccaaagcaaaactacagggacatttcctgcttgagttctttaaagcatggtggagaatatttcatggatcccgtggtgccattgcagggagtaccaagcatgtttggaactacctgtgaaaacaggaaacgccggaaagagaagagcgtaggggatgaagaggacacgcccatgatctgcagcagcattgtaagcactcctgtgggcatcatggcttccgattatgaccccaaactgcagatgcaggaaggagtcaggagtggatttgccatggctggacacgaaaacctttctcatggtcacacggaacgctttgacccatgtcggccccaactgcagcctggaagtccatctcttgtgtcagaggagtcaccttcagccattgattcagacaagatgtcagacctagggggcaggaaacctcctggaaatgtgatttctgtgattcagcacaccaactcactgagccgacccaattcatttgaaaggtctgagtcagccgaacttgtggcttgcacacaggataaagccccttccccttcagagacttgtgacagtgagatttcagaagccccagtgagtcctgagtgggctccacctggggatggtgcagaaagtggggggaaaccctctccatctcagcaggtgcagcagcagtcctatcacacacagcccaggctagttcggcaacacaacatccaggttcctgagattcgagtgaccgaggagcctgataaacctgagaaggagaaggaagcccagagcaaagagccagagaagcctgtggaagaatttcagtggccccagagaagtgagaccctttcccagctccccgcggagaagttgcctcccaaaaagaagcgtctgcgacttgcagatatggagcactcctcaggggagtccagctttgaatccacaggcacaggcctctcccgcagccccagccaagaaagcaacttgtcccacagctccagtttctccatgtcttttgaaagagaagaaaccagtaagctttctgcacttcctaagcaggatgagtttgggaagcattcagagtttctgactgtccctgctggttcatactcattgtctgtcccaggccatcaccaccagaaagagatgcgacgctgctcatcagagcagatgccttgtcctcacccagcggaagtcccagaagttcggagcaaatcatttgattatgggaatctgtcccatgctcctgtgtcgggagcagcagcctccacggtatcaccgtccagggagaggaagaaatgctttctggtgcggcaagcttccttcagtggctccccagaaatctcccagggcgaggttggcatggatcagagcgtgaagcaagagcagctggagcacctgcatgctggcctccggtccgggtggcaccatggcccgcctgctgtgctgcctcctcttcagcaagaggacccagggaagcaggtggcgggtccttgtcccccgctgagctcggggccactgcacctggcccagccacagatcatgcacatggacagtcaggaatctttgagaaatcccttgatccaaccaacatcctatatgacaagcaagcacttacctgaacagccacacttatttccacatcaagagacaattccattttctccaatccagaatgccttgtttcagtttcagtatcctacagtttgtatggttcatttaccagctcagcagcctccctggtggcaggcacatttcccacatccctttgctcagcaccctcagaagagctatggcaagccctcttttcagacagaaatccattcgagctatcccttagagcatgtggcagagcacactggaaagaaacctgctgagtatgcacacacgaaagagcagacctacccatgttattcaggagcatcagggctacacccaaagaaccttcttccaaagtttccatcagaccagagcagtaagtcaactgaaacgccctctgagcaggttcttcaagaagattttgcctcggcaaatgctgggtctttgcagtccctcccaggaacagtggttcctgttcggatccagacgcacgtaccatcctatggaagtgtcatgtacacaagcatttctcagatacttgggcagaatagccctgccattgtcatatgcaaagtcgatgagaatatgacccaaaggacactggtcaccaacgcagccatgcaagggataggattcaacattgcccaggtgctggggcagcatgcgggcttggagaagtaccccatttggaaagcacctcagactttgcccctcggcttagaatcctccatccccttgtgtttaccttccacctctgacagcgtggccaccctgggaggtagcaagcgaatgctttctccagccagtagcttggagctcttcatggaaaccaagcagcagaaaagggtcaaagaagaaaagatgtacggacagattgtggaggagcttagtgctgtggagctgaccaactcagacatcaaaaaggacctctcccgcccccagaaaccccagctggttcgacaaggatgtgcttctgagccaaaagatggcttgcagtcagggtcatcttccttctcctcgctgtcgccctcctcatctcaagactatccttctgttagcccgtcttccagggagccattcccgcccagcaaggagatgctttccggttcccgggcaccacttccggggcagaagtccagtgggccttctgaaagcaaagaatcttcagatgaattagatatcgatgagacggcatcggacatgagcatgagcccacagagttcttcattaccagcaggagatggtcagctggaagaggaagggaagggccacaagcggcctgttggcatgctggtccgcatggcctctgcccccagcgggaacgtggcagactcaactcttcttctcacggacatggcagatttccagcagattcttcagttccccagtctgcggacaacaactactgtgagttggtgcttcttgaattatacaaaacccaattatgtgcaacaggccaccttcaaatcctcggtttatgcttcatggtgcattagttcctgtaatccaaacccatcaggattgaacaccaagaccacgctggctcttctgaggtccaagcaaaaaatcactgcagaaatttatactctggctgctatgcataggcctggaaccggcaagcttacatcatcaagtgcttggaagcagtttactcagatgaaacctgatgcgtcctttttatttggcagcaaactagaaaggaaactagtgggaaatatcttaaaggaaagagggaaaggagatattcatggagataaagatattggatccaaacaaactgagccaatccgaattaaaatatttgaaggagggtacaaatcgaatgaagattatgtatatgtcagaggacgtggccggggaaagtacatttgtgaagaatgtgggattcgctgtaagaagccaagcatgctcaaaaaacacatccgtacccatactgatgttcggccttatgtatgcaagttatgtaactttgccttcaaaacgaaaggaaacctaacgaagcatatgaaatctaaagcacacatgaaaaaatgcctggaattgggagtctcaatgacatcggtggatgatacagaaactgaggaagcagaaaatttggaagatttgcacaaagcagcagagaagcatagcatgtccagcatttcaactgatcatcagttctccgatgctgaggaatcagatggtgaggatggagatgataatgatgatgatgatgaagatgaagatgactttgacgaccagggagatttaacaccaaaaacaagatcaagaagcaccagtcctcagcctcctagattctcctccttgcctgtgaatgttggcgccgtaccccacggggttccttcagatagttccctgggacattcttcgttgatcagctatttggttactttgccaagtattcgagttactcagcttatgacacccagtgattcatgtgaagatacccagatgacagaataccagaggctattccagagcaaaagtacggactcagaaccagacaaagacagattggacatacctagttgtatggatgaggagtgcatgctaccttcagagccaagctcctctcccagggacttctcaccctcaagccaccattcctctccaggatatgattcttcaccctgtcgagataattcaccaaagaggtatctgatacccaaaggagatttatctcccaggagacatttatcacctaggagagatctgtcacccatgagacatctttcaccaacaaaggaagctgcattgagaagagagatgtcccaaagagatgtttcaccaagaaggcatttgtctccaaggaggccagtgtctcctgggaaagatatcacagcaagaagagacctctcccctagaagagagagaagatacatgaccacaataagagcgccatctcccagaagggctttataccataacccaccattgtccatgggacagtatttgcaagcagagccaattgtattggggcctcctaatttaagaagaggattacctcaggttccttacttcagtctctatggagaccaagaaggtgcttatgaacatccaggctccagccttttccctgagggtcctaatgactatgtcttcagtcatcttccactccactctcagcaacaagtgcgagcccctatccccatggtgcccgttggtgggatccagatggttcactccatgccgccagccctttccagtttacatccttcacccacattgcccctgccaatggagggctttgaggagaagaaaggcgcgtcaggggagtccttctccaaggacccctatgtgctttctaagcagcatgagaagcgaggtcctcacgctttgcagtcatctggtccgcctagcactccctcctctcctcggctgttgatgaaacagagcacttcggaagacagcctaaacgcaacagagcgggaacaggaggaaaatatacagacttgtacaaaagccattgcctctctccggattgccacggaagaggcagctctgctcgggccagatcagccagcgcgggtgcaggagccccaccagaaccccctgggaagtgcacatgttagcattagacactttagtagacctgagccaggtcagccctgtacctcagccacccaccctgacttgcatgatggtgaaaaggacaattttggtacatcacagactccattagctcactccacgttttacagcaagagttgtgtggatgacaagcagttggactttcacagcagcaaggaattatcttcaagcacagaggaaagcaaagatccttcatcagaaaagagtcagctacattga

SEQ ID NO: 157116 - DNA, 8178 bp, Homo sapiens
atgaagaaagagaatgtgagccaaggaataaagacagcttctggaagccagaaaaggcaagagaatgattgtcccctagagcctctggaaagaaggcagccctccagtcaccttgcttttaccccagtgagagctgtgtggggcttccgacatctagaactgatgttggttcgtcaaatcctggttgcctcagtctctttccaatgccttcaaacttaccgttcctgtgggaatttccgggtgcttttcccctctcaaagtgcaacttctgtcatcatcatcatcacagtcaaattcgatgttagggagaaaattgcccatggaaatttgcacttagcttttggatggacgtttctacaatggagagaactgtgttatagccctggtccaaggacattactagctaatgcccatcgactgtggtgtgcgtgtggaaggttccaaagagaaggagcaatcagcaagtttgcagacaccctggaacatggaagcaaccaagctttaagaagcacagctttggagacactccatgagtctgcactgctttcaggggaactagcacttaagaccttgtgtaacaaaatggacactggggacacagctctaggacaaaaagctacctcaaggtctggagaaactgataaagcatcaggtagatggagacaggaacaatcagctgttattaagatgagcacttttggcagtcatgaaggacagcggcaaccacaaatagagcctgagcaaatcggaaacacagcatcagcacaactgtttggttctgggaaactggcctcccctagtgaagtggtgcagcaagtcgcagagaagcaatatccaccgcatcgtccgagtccttactcatgccaacactcactctctttccctcagcactcattgccacagggggtcatgcacagcaccaagccacatcagagcctcgaaggtcctccgtggcttttccctggccctttgccatccgttgcctctgaggacttatttccttttcctatacatggccacagtggtggttatcctagaaaaaagatttcaagtctgaaccctgcttatagccaatactcccagaaaagtattgaacaggcagaagaggctcacaagaaagagcacaaacccaaaaagcctggcaagtacatttgcccttactgcagcagagcgtgtgccaaacctagtgtactgaaaaaacacatcaggtcccatactggggagcggccatatccatgtataccttgtggtttctctttcaagacaaagagcaatttgtacaagcacaggaagtcacatgcccatgcaattaaggcaggattagtacctttcacagagtcagctgtatctaaattggacctagaggctggttttattgatgtagaagcagaaatacattcagatggtgaacagagtacagacacagatgaggagagttctttatttgccgaggcttctgacaaaatgagtcctggtccacccatcccactggacattgccagcagaggcggctatcatgggtcattggaagaatcattgggaggtccaatgaaggtgccgattttgattatccctaaaagtgggattcctctccctaatgaaagctctcagtatattggccctgatatgctaccaaatccatctttaaatactaaggctgatgattcgcacacagtcaaacagaaacttgcactaagactgtcagagaaaaaaggacaagattctgagccatcgctcaaccttctgagcccgcacagtaaaggaagcactgattctggttacttttctcgctcagaaagtgctgagcagcaaataagccctcccaacacaaatgcaaagtcttatgaagaaatcatctttggaaaatactgtcggcttagtccgagaaatgcactcagtgttacaaccacaagtcaggagcgtgccgcaatgggtaggaagggcataatggaaccattacctcacgttaacaccaggttagatgtcaagatgtttgaagatcctgtttcacagctgatcccaagcaagggagatgtcgaccccagtcaaacgagcatgctgaaatccactaagttcaacagtgagtccagacaaccccagattattccatcatctatcaggaacgaaggaaaactttatccagcaaacttccaaggcagcaacccggttctcttagaagctcctgtagactcttcaccccttattagaagcaactcagtgccaacttcttcagcaactaatctaactattcctccttctttgagaggaagtcactcatttgatgaaaggatgactggttccgacgatgtattctatccagggaccgtgggcataccccctcagcgcatgctaagaagacaagcggcatttgagctgccttcggtacaggagggccacgtggaagtcgagcaccatggcaggatgttgaagggtatcagcagttcatccctgaaggaaaagaaattgtctcctggggacagggttgggtatgactatgatgtctgtcggaaaccctataagaagtgggaggactctgaaacaccaaagcaaaactacagggacatttcctgcttgagttctttaaagcatggtggagaatatttcatggatcccgtggtgccattgcagggagtaccaagcatgtttggaactacctgtgaaaacaggaaacgccggaaagagaagagcgtaggggatgaagaggacacgcccatgatctgcagcagcattgtaagcactcctgtgggcatcatggcttccgattatgaccccaaactgcagatgcaggaaggagtcaggagtggatttgccatggctggacacgaaaacctttctcatggtcacacggaacgctttgacccatgtcggccccaactgcagcctggaagtccatctcttgtgtcagaggagtcaccttcagccattgattcagacaagatgtcagacctagggggcaggaaacctcctggaaatgtgatttctgtgattcagcacaccaactcactgagccgacccaattcatttgaaaggtctgagtcagccgaacttgtggcttgcacacaggataaagccccttccccttcagagacttgtgacagtgagatttcagaagccccagtgagtcctgagtgggctccacctggggatggtgcagaaagtggggggaaaccctctccatctcagcaggtgcagcagcagtcctatcacacacagcccaggctagttcggcaacacaacatccaggttcctgagattcgagtgaccgaggagcctgataaacctgagaaggagaaggaagcccagagcaaagagccagagaagcctgtggaagaatttcagtggccccagagaagtgagaccctttcccagctccccgcggagaagttgccacccaaaaagaagcgtctgcgacttgcagatatggagcactcctcaggggagtccagctttgaatccacaggcacaggcctctcccgcagccccagccaagaaagcaacttgtcccacagctccagtttctccatgtcttttgaaagagaagaaaccagtaagctttctgcacttcctaagcaggatgagtttgggaagcattcagagtttctgactgtccctgctggttcatactcattgtctgtcccaggccatcaccaccagaaagagatgcgacgctgctcatcagagcagatgccttgtcctcacccagcggaagtcccagaagttcggagcaaatcatttgattatgggaatctgtcccatgctcctgtgtcgggagcagcagcctccacggtatcaccgtccagggagaggaagaaatgctttctggtgcggcaagcttccttcagtggctccccagaaatctcccagggcgaggttggcatggatcagagcgtgaagcaagagcagctggagcacctgcatgctggcctccggtccgggtggcaccatggcccgcctgctgtgctgcctcctcttcagcaagaggacccagggaagcaggtggcgggtccttgtcccccgctgagctcggggccactgcacctggcccagccacagatcatgcacatggacagtcaggaatctttgagaaatcccttgatccaaccaacatcctatatgacaagcaagcacttacctgaacagccacacttatttccacatcaagagacaattccattttctccaatccagaatgccttgtttcagtttcagtatcctacagtttgtatggttcatttaccagctcagcagcctccctggtggcaggcacatttcccacatccctttgctcagcaccctcagaagagctatggcaagccctcttttcagacagaaatccattcgagctatcccttagagcatgtggcagagcacactggaaagaaacctgctgagtatgcacacacgaaagagcagacctacccatgttattcaggagcatcagggctacacccaaagaaccttcttccaaagtttccatcagaccagagcagtaagtcaactgaaacgccctctgagcaggttcttcaagaagattttgcctcggcaaatgctgggtctttgcagtccctcccaggaacagtggttcctgttcggatccagacgcacgtaccatcctatggaagtgtcatgtacacaagcatttctcagatacttgggcagaatagccctgccattgtcatatgcaaagtcgatgagaatatgacccaaaggacactggtcaccaacgcagccatgcaagggataggattcaacattgcccaggtgctggggcagcatgcgggcttggagaagtaccccatttggaaagcacctcagactttgcccctcggcttagaatcctccatccccttgtgtttaccttccacctctgacagcgtggccaccctgggaggtagcaagcgaatgctttctccagccagtagcttggagctcttcatggaaaccaagcagcagaaaagggtcaaagaagaaaagatgtacggacagattgtggaggagcttagtgctgtggagctgaccaactcagacatcaaaaaggacctctcccgcccccagaaaccccagctggttcgacaaggatgtgcttctgagccaaaagatggcttgcagtcagggtcatcttccttctcctcgctgtcgccctcctcatctcaagactatccttctgttagcccgtcttccagggagccattcccgcccagcaaggagatgctttccggttcccgggcaccacttccggggcagaagtccagtgggccttctgaaagcaaagaatcttcagatgaattagatatcgatgagacggcatcggacatgagcatgagcccacagagttcttcattaccagcaggagatggtcagctggaagaggaagggaagggccacaagcggcctgttggcatgctggtccgcatggcctctgcccccagcgggaacgtggcagactcaactcttcttctcacggacatggcagatttccagcagattcttcagttccccagtctgcggacaacaactactgtgagttggtgcttcttgaattatacaaaacccaattatgtgcaacaggccaccttcaaatcctcggtttatgcttcatggtgcattagttcctgtaatccaaacccatcaggattgaacaccaagaccacgctggctcttctgaggtccaagcaaaaaatcactgcagaaatttatactctggctgctatgcataggcctggaaccggcaagcttacatcatcaagtgcttggaagcagtttactcagatgaaacctgatgcgtcctttttatttggcagcaaactagaaaggaaactagtgggaaatatcttaaaggaaagagggaaaggagatattcatggagataaagatattggatccaaacaaactgagccaatccgaattaaaatatttgaaggagggtacaaatcgaatgaagattatgtatatgtcagaggacgtggccggggaaagtacatttgtgaagaatgtgggattcgctgtaagaagccaagcatgctcaaaaaacacatccgtacccatactgatgttcggccttatgtatgcaagttatgtaactttgccttcaaaacgaaaggaaacctaacgaagcatatgaaatctaaagcacacatgaaaaaatgcctggaattgggagtctcaatgacatcggtggatgatacagaaactgaggaagcagaaaatttggaagatttgcacaaagcagcagagaagcatagcatgtccagcatttcaactgatcatcagttctccgatgctgaggaatcagatggtgaggatggagatgataatgatgatgatgatgaagatgaagatgactttgacgaccagggagatttaacaccaaaaacaagatcaagaagcaccagtcctcagcctcctagattctcctccttgcctgtgaatgttggcgccgtaccccacggggttccttcagatagttccctgggacattcttcgttgatcagctatttggttactttgccaagtattcgagttactcagcttatgacacccagtgattcatgtgaagatacccagatgacagaataccagaggctattccagagcaaaagtacggactcagaaccagacaaagacagattggacatacctagttgtatggatgaggagtgcatgctaccttcagagccaagctcctctcccagggacttctcaccctcaagccaccattcctctccaggatatgattcttcaccctgtcgagataattcaccaaagaggtatctgatacccaaaggagatttatctcccaggagacatttatcacctaggagagatctgtcacccatgagacatctttcaccaagaaaggaagctgcattgagaagagagatgtcccaaagagatgtttcaccaagaaggcatttgtctccaaggaggccagtgtctcctgggaaagatatcacagcaagaagagacctctctcctagaagagagagaagatacatgaccacaataagagcgccatctcccagaagggctttataccataacccaccattgtccatgggacagtatttgcaagcagagccaattgtattggggcctcctatcgttactgtaggcattacaggtcttcctcccaaactggtgtttgatgaaggagacgtgccttttccaaacctgattaaatacaagggggattttgtctatgtgcagaatttaaatgattctcataccgtaaaattcccacctttcccagcttatgaggtcgtggtaacgatagtgttaatgattgcaccgtttcactcacactttcaggagaatccatgtttccagcttgcatatgatatatcacagagaaggaatttaagaagaggattacctcaggttccttacttcagtctctatggagaccaagaaggtgcttatgaacatccaggctccagccttttccctgagggtcctaatgactatgtcttcagtcatcttccactccactctcagcaacaagtgcgagcccctatccccatggtgcccgttggtgggatccagatggttcactccatgccgccagccctttccagtttacatccttcacccacattgcccctgccaatggagggctttgaggagaagaaaggcgcgtcaggggagtccttctccaaggacccctatgtgctttctaagcagcatgagaagcgaggtcctcacgctttgcagtcatctggtccgcctagcactccctcctctcctcggctgttgatgaaacagagcacttcggaagacagcctaaacgcaacagagcgggaacaggaggaaaatatacagacttgtacaaaagccattgcctctctccggattgccacggaagaggcagctctgctcgggccagatcagccagcgcgggtgcaggagccccaccagaaccccctgggaagtgcacatgttagcattagacactttagtagacctgagccaggtcagccctgtacctcagccacccaccctgacttgcatgatggtgaaaaggacaattttggtacatcacagactccattagctcactccacgttttacagcaagagttgtgtggatgacaagcagttggactttcacagcagcaaggaattatcttcaagcacagaggaaagcaaagatccttcatcagaaaagagtcagctacattga

SEQ ID NO: 157117 - DNA, 1035 bp, Homo sapiens
tccagtgtggtggaattcgggctactacgatggcgatgagtttcgagtggccgtggcagttatcgcttcccacccttctttacgttacaaccgaatgtggacactcggcagaagcagctggccgcctggtgctcgctggtcctgtccttctgccgcctgcacaaacagtccagcatgacggtgatggaagctcaggagagcccgctcttcaacaacgtcaagctacagcgagaacgttcctgtggagtcgatccagattgtattagaggaactgaggaagaaagggaacctcgagtggttggataagagcaagtccagcttcctgatcatgtggcggaggcccgaagaatgggggaaactcatctatcagtgggtttccaggagtggccagaacaactccgtctttaccctgtatgaactgactaatggggaagacacagaggatgaggagttccacgggctggatgaagccacttttactgcgggctctgcaggcccttacagcagggagcacaaggccgagattcatcattgttcaggcgatggccgaggcgttcaagttcttctaggcagggacctgtctccctttacttcttgacctcccaccttttccaggggttttcaaaaagggagacagaccccagtgttcccccaaagactggttctgtgaactccaccagactcaaaaggactccagtcctgaaggctgggacctggggatgggtttctcacaccccatcctagactgtccttgagccagggtctgtaaacctgacactttatatgtgttcacacatgtaagtacatacacacatgcgcctgcagcacatgcttctgtctcctcctcctcccacccctttagctgctgttgcctcccttctcaggctggtgctggatccttcctaggggatgggggaagccctggctgcaggcagccttccaggcaatatgaagataggaggcccacgggcctggcagtgagaggtgtggccccacaacgatttatgatattaaaatctcaactcccaaaaaaaa

SEQ ID NO: 157118 - DNA, 769 bp, Homo sapiens
  misc_feature (1)...(769): n = a,t,c or g
gagtggccagaacaactccgtctttaccctgtatgaactgactaatggggaagacacagaggatgaggagttccacgggctggatgaagccactctactgcgggctctgcaggccctacagcaggagcacaaggccgagatcatcactgtcaagcgatggccgaggcgttcaagttcttctagcagggacctgtctcccctttacttcttacctcccacctttccagggctttcaaagggagaccagaccccagtgtcccccaaaagactggaatctgtgactccaccagaacttaaaaaggactccagtcctgaaggctggggaccctggggaatgggtttcctcaaacccccataatgtctgtccccttgggaatagggtgaaggctgaaagncaccccagggaagaaaaaatatgtgccttcttcctcgcccctaacctccctttcccccatccctaagactgtcccttgaagcccagggtttgtaaaacctgaccctttaatatgtgttcacacatgtaaggtacatacaacacatgcgcctgcagaacatgcttctgtctcctcctcctcccacccctttagctgctgttgcctcccttatcaggctggtggtggatccttcctaggggatgggggaagccctgggtgcaggcagccttcctggcaatataagcataggagggccacgggcctggcagttaatagatgtggccccaccccgatttatgatattaaaatttcaactcccaaaaaaaaaaaaaaaa

SEQ ID NO: 157119 - DNA, 968 bp, Homo sapiens
gttttgcaatgttggccaggctggtctcaaactcctgacctcaagtgatctgcctgcctcggcctctcaaattgctggaattacagttgtgatccaccacacctggcttgaatgtagattttaataattgaatttattctgccgtgttgatagaataactgaatatcagtaaattgtgtaacattggtggatactgttgcataagatgagctcctgaagagtgaagctaattctttggtcaatgttcttttcccctcagtgtctagtttaaggcttttagaagattgatctgtagcaattatttaatgaattgaatatttaaaaaattttttatttgctgtctttggtaattatctctctgcttgaaattaaatgcactataagttaatataacaagtaaaatacattgtcttttgaaaatagtttctttttaaaggaatactaattaattgtaacttgtaaaaccaaaagttctaatggtttttaaaaaccagtgttgagtggaaaagtgtttctttagtttggaaagacctggtgaagtatcctagtcagggaaagaacctgttttctggaagaatgtaagttgctatatgtggaggggcatgtaggacaggggttctaattactgtctgtgagagttactactttgtaacttatggtttctgcttcagtattgtgttggttctgtattataaattgcaccttcatagacccaaaatctctatacagcactgatctccttgaatattgtgtgttaactgctatatcctctagaggcaaaaggtttaaatgtgttcaaatggttatactgcctcctttttaaacaaattacagagttgtaaatactagtgtagatctctttcgtttaccacagcaaatactgattttatgattgttaagcatttcatcattttaatttaaattggattcaaccacaataaagaaaatgagaaaagctttaaaaaaaa

SEQ ID NO: 157120 - DNA, 1147 bp, Homo sapiens
gcactaggagcatttccactttaaaagcagagacagtggaatggagttagaccatggaggaggcgcactttatctatgtctaaagccagttgtggttgtgagatggaataatgaggggtgtgtgtatgtgtgcatgcgcacagagaagtgcctggtatgagcacctcctccctgtgccacacaaacagcacctcatcaacatggtcagcattccagagatgcacttcttcgatttgggtgtcattgtgaaattctcctgttttcctctgcagggatctacgtgcaggagatggctgacatgagcatggccaagctgtactcagggctgctgggggtgggcgatgagatcctcgaggtgaacggggccaaggtggcagggctgggcttggctcacattaaggagctcctggcccactcagagagcttgtcaatccgtgtcctgaggcagagacctgtcccacggtgacccagaagtgccgctgccctcactgtcacggcctcggaagccctgaagcactcagggtggttggcaggaacgtgctgcacagagctgctctgtggcggaaacagatcctggcagcatctaaccccttgggctgtggcagggcttctgtggtgggctgcctttgggagacgcaaggagcctgtttgcatattttgtttaaggccatttatccagaactagaaaaagaaaaaaatgggtctccttccatgtctgagggggtgtcaacatctacttgtacctttgttggcagggggagaagggagattcagtggatcctttggttgatgcctgagagccggcctcacctcctggtcccatgcctggtcaaaggctacagcctccaacactgtggaaccaaagaaagcacatgtccatattggccttgacccttccctatttcagccacgtttcctccctactccattcactgcccttgccctttatccagaaatgggcaaagtgtcccggagtaccagccttacagccattgaccatatatgccaaaccaaaatcagaacgtgtggtctggcaggagttttatgccccttcggggtgtgggaattctgggagatgttatctggtagccagaatattaaaaatttctaggaaaatttttttatacataaagttgaaaacaacaac

SEQ ID NO: 157121 - DNA, 372 bp, Homo sapiens
  misc_feature (1)...(372): n = a,t,c or g
gtcactcagctcctcgacatttccacacccagacccaaagtttgcaacaatcagtcaggtacctctctctgttttgccttttctagaattgagatagaaattaatactatagttaatgaaaacacattatgatactgatgaggaattcttcgnnnnnnnnnnnnngggaaacaaagtttggttttgtaatccaggttggagtccaagggcgcgacctgggttaattgannnnnnnnnnnnnnnnnnnnnnnnnnnnnnnnnnnnnnnnnnnnnnnnnnnnnnnnnnnnnnnnnnnnnnnnnnnnnnnnnnnnnnnnnnnnnnnnnnnnnnnnnnnnnnnnnnnnnnnnnnnnnnnnnnnnnnngggctcttt

SEQ ID NO: 157122 - DNA, 368 bp, Homo sapiens
  misc_feature (1)...(368): n = a,t,c or g
gtcactcagctcctcgacatttccacacccagacccaaagtttgcaacaatcagtcaggtacctctctctgttttgccttttctagaattgagatagaaattaatactatagttaatgaaaacacattatgatactgatgaggaattcttcgnnnnnnnnnnnnngggaaacaaagtttggttttgacatcctggctgaataacatgggcccaatttgggttaattgaaacttcaacttccaaggttaaagcatttttctggcctaaccctcttgattacctggaactaagggccccgtctcctttccccagtaaatttttggtattttaaataaagagggggttccccctttttaaacaggatggcg

SEQ ID NO: 157123 - DNA, 350 bp, Homo sapiens
  misc_feature (1)...(350): n = a,t,c or g
aagacttgctgagagcctttatgatgaccggatgtttgacattatgagggcactggacctgaccttgaagcatcacatcttgcctaaagagctgcgtaccgaatatgaggaggaatatttctaccttgaaccgtatctgaaacaggatattcgggaaggaattgaaagagaagaatgggcaaagaagtggtcatgtaagtgaagactgtggatgcagctgttatgacgatggttatgcttgtggctaaccatgttacgaactatttggtctgaagatgggtcactttatgtaaaagtctattgtaatggctattgtaatggcnnnnnnnnnnnnnnnnnnnnnnnnnnnn

SEQ ID NO: 157124 - DNA, 476 bp, Homo sapiens
gctgtgagccggccagctaaggcagccgagtctcggctccttacgagccccgagagcctgagccgtgacctggatgcaccagaggttcaggagagctacaggcagcaggtgccaccttgaagcagaatagggatggtctagtgggaggggttgggctagggtccctcttccctggatcccttcagcgatgaactggtcagcctggtgcgtaccatttgttttcccctttggcatctgggaaggcttgacagtgccaccccgggctatttgacagtgtgcttggggggggaaatggtagcttctgatggatggccatgtgtgcttgctgagatcatggtgacttggccaccgattctacaatctgcatacttatcttctatagctccggactgacttacaatctcgactgcttgtaaaccccaactacagtccctagcgtcttcccatgcccatggtgcctttgctgatgatacttg

SEQ ID NO: 157125 - DNA, 3520 bp, Homo sapiens
atggagcctaatgatagtaccagtaccgctgtggaggagcctgacagcttggaggtgttggtgaagaccttggactctcaaactcgtacctttattgtgggggcccagatgaatgtaaaagagtttaaggagcacattcgtgcctctgtcagcatcccatctgaaaaacaacggctcatttaccagggacgagttctgcaagatgataagaagcttcaggaatacaatgttgggggaaaggttatccacctggtggaacgggctcctcctcagactcacctcccttctggggcatcttctgggacggggtctgcctcagccactcatggtgggggatccccccctggtactcgggggcctggggcctctgttcatgaccggaatgccaacagctatgtcatggttggaaccttcaatcttcctagtgacggctctgctgtggatgttcacatcaacatggaacaggccccgattcagagtgagccccgggtacggctggtgatggctcagcacatgatcagggatatacagaccttactatcccggatggagactctcccctaccttcagtgtcgaggagggccccaaccgcagcacagtcagccgcccccgcagccaccggctgtgaccccggagccagtagccttgagctctcaaacatcagaaccagttgaaagtgaagcacctccccgggagcccatggaggcagaagaagtggaggagcgtgccccagcccagaacccggagctcactcctggcccagccccagcgggcccaacacctgccccggaaacaaatgcacccaaccatccttcccctgcggagtatgtcgaggtgctccaggagctacagcggctggagagtcgcctccagcccttcttgcagcgctactacgaggttctgggtgctgctgccaccacggactacaataacaatcacgagggccgggaggaggatcagcggttgatcaacttggtaggggagagcctgcgactgctgggcaacacctttgttgcactgtctgacctgcgctgcaatctggcctgcacgcccccacgacacctgcatgtggtccggcctatgtctcactacaccacccccatggtgctccagcaggcagccattcccatacagatcaatgtgggaaccactgtgaccatgacaggaaatgggactcggccccccccaactcccaatgcagaggcacctccccctggtcctgggcaggcctcatccgtggctccgtcttctaccaatgtcgagtcctcagctgagggggctcccccgccaggtccagctcccccgccagccaccagccacccgagggtcatccggatttcccaccagagtgtggaacccgtggtcatgatgcacatgaacattcaagattctggcacacagcctggtggtgttccgagtgctcccactggccccctgggaccccctggtcatggccaaaccctgggacagcaggtgccaggcttcccaacagctccaacccgggtggtgattgcccggcccactcctccacaggctcggccttcccatcctggagggcccccagtctctgggacactgcagggcgccggtctgggtaccaatgcctcgttggcccagatggtgagcggccttgtggggcagcttcttatgcagccagtccttgtggctcaggggaccccaggtatggctccaccgccagcccctgccactgcttctgccagtgctggcaccaccaacacagctaccacagctggccccgctcctggggggcctgcccagcctccacccacccctcaaccctccatggctgatcttcagttctctcagcttctggggaacctgctagggcctgcagggccaggggctggagggcctggtgtggcttctcccaccatcactgtggcgatgcctggtgtccctgcctttctccaaggcatgactgacttcttgcaggcaacacagacagcccctccaccacccccacctcctccacccccaccacctgccccagagcagcagaccatgcccccaccaggctccccttctggtggcgcagggagtcctggaggcctgggtcttgagagcctgtcaccggagttttttacctcagtggtgcagggtgtgctcagctccctgctgggctccctgggggctcgggctggcagcagtgaaagtattgctgccttcatacaacgcctcagtggatccagcaacatctttgagcctggagctgatggggcccttggattctttggggccttgctttctcttctgtgccagaacttctctatggtggacgtagtgatgcttctccatgggcatttccagccactacaacggctccagccccagctgcgatccttcttccaccagcactacctgggtggtcaggagcccacacccagtaacatccggatggcaacccacacattgatcacggggctagaagagtatgtgcgggagagtttttccttggtgcaggttcagccaggtgtggacatcatccggacaaacctggaatttctccaagagcagtttaatagcattgctgcgcatgtgctgcattgcacagatagtggatttggggcccggttgctggagttgtgtaaccaaggcctgtttgaatgcctggccctaaacctgcactgcttggggggacagcagatggagcttgctgctgttatcaatggccgaattcgtcgtatgtctcgtggggtgaatccctccttggtgagctggctgaccactatgatgggactgaggcttcaggtggtactggagcacatgcctgtaggccctgatgccattctcagatacgttcgcagggttggtgatcccccccagccacttcctgaggagccaatggaagttcagggagcaaaaagagcttcccctgagcctcagcgggagaatgcttccccagcccctggaacaacagcagaagaggccatgtcccgagggtcccactcttgctcctgaggggggcttcccgggatgaaacaggatggagcttcagctgagacagaacctttgggcagctgcaagtccccccagaatgggtccctattatccagcaggacattcagaagccagcggaagttgaaaccgcagccccctctggagtgatgcctacctcaagtggtatgcctgcccaagagacgcaagacgatgccagggtgagggcccccaagctgcttctctacagaggctgtgagccgggcagctaaggcagccggagctcggcccctgacgagccccgagagcctgagccgggacctggaggcaccaggaggttcaggagagctacaggcagcagctccggtctgatatacaaaaacgactgcaggaagaccccaactacagtccccagcggttttcccaatgcccagcgggcctttgctgatgatccttagctctttctttgctctatggcccttcctcatcaggggaccgtttcccccctcttccttcacagtatttaagaaataaaagtcggatttttctggcaaaaaaaaaaaaa

SEQ ID NO: 157126 - DNA, 954 bp, Homo sapiens
cggaagtccttccagaaggagcttgggatggccctactgaagaaggactgccagggcctggtggtcagactcatccaggactttgtgctcctgaccacggctgtagaggtggcccatcgctggcgggagctggctgagaagctggccaatgtctccaagcagcagatggacgcctacgagtctccccatcgggacaggaacggggttgtggacagcgaggccatgcggaagcctgcgtatgacttcttactcacctggagccatcagatcggggacagctatcgggatgtcatccaggagctgcacctgggcctggacaacatgaaaaaccccatcaccaagcgctggaagcacctcactgggactctgatcttggtgaactccctggacgttctgagagcagccgccttcagccctgcggaccaggacgacttcgagatttgaatgggtcccctcccctcctgctgctctggagtgcaagccctcttctgccctgcgtgccctgctgtcaccgcggagctgaagagggaggaaggggcggctgctcagacagatttagggcccgccagctaggctacacccatcatgcgccgccctcctccatcgagggagaggcctgaagggactgcctactgcagctcgttgccaatcacatagctttctatttgttaagtataaacttaaatttaaaatcacttttttaacgaatggggggaagggatctatgagaaaggtggtatctaatttttttatggaccatacaggtttaaaagaaaatacgggcacaggctgttgagggtttaatgtagatatagactctttttaacttatgtcttagatgtgtataggtactcaaaggtgactgggatcattcccgacatctggtaccacttttgattatatcatctagtcctgaactatcctctatccgactgttatccaccttttctcgcg

SEQ ID NO: 157127 - DNA, 2591 bp, Homo sapiens
tgatgtgtgggtgaatgaaagtgaacgacatcagttaaaaactaaagtagttcatttatcaaagctacccaaagatactgccttgcttttggacccaaacatatacagaacaatgccgcagaagaggttgaagagaactctgataagaaaagtgttcaatttgtatttaagcaaacagtgaacgacgtttgcaatcaactaaaaattcgtctatcgaattagggctgaaaattactgttaaagagtgttgcagtatgtctggtggctcccttttcaggactagggctttctcatggagtacagtatgttaatatttacctatataactaatctgttaacggtttttgaaaaacctttcaaattatttgaataatcttcatattttcatttaacctatatgactctaattttttttctgaggaaatcatttggtttttgagttgttttttcttaatgtaagaaaaattgtattttttttacaagtatcttcaaactgaatcttttatgcaccaaagttggtcttgaaaaggaaaataaaatcactttcttgcttggtaagcaagaagccatatcgattttttttaacttacagaaatggaaatatgtgtaacttgttagtattgtattaaacaaatgttgcatagagataatagaacattgcttgtaaataattcagcagatttgtaatatatttttatattttgaaatgtacctgtagatgttttctagaggcatgaaagttaaatgtatatattatgggtaggaaataatattgaagggtattgtacttcactagtgctgccagagggaattgttaataaaagcaccttctttaacaataaatgtctttcacagacttaagggactatgtactactgttaatatctcgtaagaacaaaacacattgaacatccttccagaaagtctttgagggaggacctgtacccataatagaattatggcactcatttctgacagtgatcaagaaatcagttatttccttactgttggaaggacattgtaaagtatgtggttatatgcagtgaaactgcagaaaatactcctggttgaggagttttcactttactacagtgatataaaaaccagcagtttttacactaaattttttaaagaaatattagacaaaaatatagaattaaaaggcgttgggttccaaaatgggaaaggttccacgatacataaatcatttctcatttgctttaaaaaaatttaaaagtgtaaaaattatgagagactttattcgttaacaatgggggtaaagagctatatacatgaaaatgagtcttataaaattaagtgaagtgcaaataaaagcactgctactataagacattctggaatggttgtttaataagggtattatccatttgatctatagcaatgtgattttatttttaaaaagaaaagcagtgtgttttctttttttgttgttttcttttgcttaagcacttcatccaattgctttattctgtatctgcgaagtaatctgcaatctcttttgttctttttaaaatttgatttgttataaaattgccaaatagaagtgtcttcagatacataggttttgtacctgtatttttattttattgcctcatgttcttgtaagtcattcttaattgaccaatgattgtagaccttgcttgagtattttttctaataaaacaaagcaaatcacatttagcttcaaattgtaacaattcaattgaattttaaaatgacacctgaaaagatacatctgatattttctatataggggcacagtaaataaggtttttcattgtgtaggaaatacttaggatgtcaaaaccagatttcgtgatccttgtattaacttctgagtactcaatcaatccataatccttttgctgcttatctggatgttggtttggatactgttaacacaccaaaaaggaatatgggaattggaaatgaggctaggctttataacttgtatgtatacatattattacacataacatccaattatggactggggtaataagtgtgaaaattttaatttgtggttttcatttattaatgtctgcccatctgtattgttgctcctaccttcaaatatgacaccctgaaataataagtctgtggtcccaggaatttatgtattgttcagcatcaagcaaactacagctccacaagcatacccatttatatgttgtctatgcctgctttctccctgcagtggcagaattgagtggtgagaccttaggtcctgcaagcccccaatttttactacaggttggcaatccctaatccaaaaatcctgaccataaaaaatgcccccaaagttcaaaactttcctgagtgctgacatcatgctgcaagtggaaaattccacgcctgacctcatgtgactggtcatagtcaaaacaattaagactttgtttcatgcacaaaattattaaaactgttgtataaaattaccttcagtctatgtgtataaggtgtttgtgagatataaatgaactttatggttagcctttggatcgcatttctgagtctcattatgtatatgcagatactcaaaaatctgaaaaaaaaaaaaaaagtcgacg

SEQ ID NO: 157128 - DNA, 350 bp, Homo sapiens
gaggtgcaggaagtccaaggtaaaaaggtggccagagttgccaaccccgggctggataccttcagcagagaaatcttccggaatgagaagctaaagaagtgccggcgcttcttggatgaactagatgcggttaagatggactgagcttggatgcttctgaggcaagctgaagctttgggttctgactgacccaccctacaggactgctgaacagagagcccagtgtgactagggatcctgagttttctgggacaattccagctttaatcaatacattttgttaaatgtgccataaaatgagactttttacgcctttataaggccttagatgtaaataaactcacccaaac

SEQ ID NO: 157129 - DNA, 1282 bp, Homo sapiens
gagtctcgtggagagattgaagatggcggcttctcaggcggtggaggaaatgcggagccgcgtggttctgggggagtttggggttcgcaatgtccatactactgactttcccggtaactattccggttatgatgatgcctgggaccaggaccgcttcgagaagaatttccgtgtggatgtagtacacatggatgaaaactcactggagtttgacatggtgggaattgacgcagccattgccaatgcttttcgacgaattctgctagctgaggtgccaactatggctgtggagaaggtcctggtgtacaataatacatccattgttcaggatgagattcttgctcaccgtctggggctcattcccattcatgctgatccccgtctttttgagtatcggaaccaaggagatgaagaaggcacggagatagatactctacagtttcgtctccaggtcagatgcactcggaacccccatgctgctaaagattcctctgaccccaacgaactgtacgtgaaccacaaagtgtataccaggcatatgacatggatccccctggggaaccaggctgatctctttccagagggcactatccgaccagtgcatgatgatatcctcatcgctcagctgcggcctggccaagaaattgacctgctcatgcactgtgtcaagggcattggcaaagatcatgcccaagttttcaccagtggcaacagccagttacaggctcctgccagacatcaccctgcttgagcccgtggaaggggaggcagctgaggagttgagcaggtgcttctcacctggtgttattgaggtgcaggaagtccaaggtaaaaaggtggcccagagttgcccaaccccccggctggatacccttcagccagagaaatcttccggaatgagaagctaaagaaggttgtgaggcttgcccgggttcggagatcattatatcttctctgttgagtcaaacgggggtgttgccaccagatgtgctggtgagtgaagccatcaaagtactgatggggaagtgccggcgcttcttggatgaactagatgcggttcagatggactgagcttggatgcttctgaggcaagctgaagctttgggttctgactgacccaccctacaggactgctgaacagagagcccagtgtgactagggatcctgagttttctgggacaattccagctttaatcaatacattttgttaaatgtgccataaaatgagactttttacgcctttataaggccttagatgtaaataaactcacccaaacaaaaa

SEQ ID NO: 157130 - DNA, 354 bp, Homo sapiens
  misc_feature (1)...(354): n = a,t,c or g
caaagattcccaatttaatttttatacgactcccaataaggaaagagattatgccttgcatgtacatgtaaactttggcccccccaaggatcctttaaaacggccgccccnnnnnnnnnnnnnncacgtttaatgtaaaaatgatctcgtgacatttacatactaagtattaggcattgcataatattaattttgatggctatgttacatcatctacaaataatatgacaattggtggcatagtatgtgtttttcaaaacccctgtacccagaaatagtgtccctcaactacatattgctgaagggataaggatcgctcttaaatgcctgcggacgcgtgggcggacgcgtggg

SEQ ID NO: 157131 - DNA, 1871 bp, Homo sapiens
ttggacacaggagtgatgacagcagttcacatggatgtaaagcaaatactgctccgcaggaatcctgaaaaataattctaatggtactatcttaggaatagcaaattatgtccagtcatagagaagaaagcttcataataatacattcttacctaaagctcactgtcatgatgttaggtatttaaattcttaaagatgttgggttgactattagtggtatttttatgttgtcttattttaggtaagcttctgtgtaaagctaaaaatcctgtgaatacaatactatcctttacaggcagacatttattggtaaacaagatcttgccctccaatgaaatgacttacatgttttaaaaaaccgagttggttttattgaatttaaaaagataggtaactaagtagcatttaaaatcaagataagagcattccttcttgtatcagtggggcagtgttaccataaacacggtgtatatgttgttaaaccctatggaagagtaacagtgtaggaccagactgcctctctcaggatatgtgcctggatattttgtgggatacctcccctggcactgggccaaaacactatgcttttggggtgttaggactggaaatatttttaaggagtatttaaacctttccagtattctgtttcacggcttagatgggaatgtatcttatgaatagagacatattaggataatgtttacatcttagaaaaaacatagatagtgctagtaatattacttataactgtaatatatagattcagaaatacattttcattatccaaaatcagcttcaacaaatggtttctggagacaaataatttggtttcattatcattgtataatcaggttaatgatttattttttgactaaatgtgcaatttcttatcactagataactttcagtatcagcggtggttacttattacttaaatcagaggaaggattttataaaggttaataaatttgaattttaccaataaatattcccataatttagaaaaggatgtcgacttgctaatttcagaaataattattcatttttaaaaagccccttttaaagcatctacttgaagattggtataattttcataaaaatgtctttttttttagggtcccaaagatatcttaggataaactattttgaagttcagatttcagatgagggcaacattttcttggggataattaccccaagttttcatccctgttgaatggtacaaaatatttctgtgaaactaacaggaagatattttcagataactaggataacttgttgctttgttacccagcctaatttgaacgagtggcagaggctacctacaaaaagcaaccttttcattttcactaagatgtttaaaagctattgtattattaaaaagtctttacaatgcttgtttcaaagaaccaacagaaaaaaaagctaagaaaactgaggaactaacattaaaaaaattaaatttagaataaggaatgatttctttaaatttgtcctttttttctttgggtctaaaacattatttaaatttttgtaaatattttggattttaatgtgtcttagatcctcattattttaatacaggaaaagaaaagatttaggtaattccctaccatgctatatatgttaagttcatgccatccaggcatttaagagcgatcctcatcccttcagcaatatgtatttgagttcacactatttctgtttttacagcagttttgaaaaacacatactatgccaccaattgtcatattatttttagatgatgtaacatagccatcaaaattaatattatgtaatgcctaatacttagtatgtaaatgtcacgagatcatttttacattaaacgtgaaaaaaaatcaaaaaaaatc

SEQ ID NO: 157132 - DNA, 605 bp, Homo sapiens
ctgatggctccaagccggtgaaggtgcccgagaacccaccctccatggtcttcaagcagatggagcaggtggctcagttcctgaaggcggctgaggactatggggtcatcaagactgacatgttccagactgttgacctctttgaaggcaaagacatggcagcagtgcagaggaccctgatggctttgggcagcttggcagtgaccaagaatgatgggcactaccgtggagatcccaactggtttatgaagaaagcgcaggagcataagagggaattcacagagagccagctgcaggagggaaagcatgtcattggccttcagatgggcagctcctccctgtgcccccagcctcagcccaacttcttacccgaaagcatcactgccttggcccctccctcccggctgcccccatcacctctactgtctcctccctgggctaagcaggggagaagcgggctgggggtagcctggatgtgggccaagtccactgtcctccttggcgcaaaagcccattgaagaagaaccagcccagcctgccccctatcttgtcctggaatatttttggggttggaactcaaaaagaaaaaaaaaaaatcaatcttt

SEQ ID NO: 157133 - DNA, 1305 bp, Homo sapiens
  misc_feature (1)...(1305): n = a,t,c or g
agaggcccnnatagaaacctttcgagaccctagcgcagnggcggaattatcaccacggcggcagccctttaaacccctcacccagccagcgccccatcctgtctgtccgaacccagacacaagtcttcactccttcctgcgagccctgaggaagccttctttccccagacatggccaacaagggtccttcctatggcatgagccgcgaagtgcagtccaaaatcgagaagaagtatgacgaggagctggaggagcggctggtggagtggatcatagtgcagtgtggccctgatgtgggccgcccagaccgtgggcgcttgggcttcccagtctggctgaagaatggccgtgattcttgacaggctgtgaacaacctttacccctgatgcctcaaagccggttgaaggtgcccgaaaaaccccccccttcttgttcttcaagcaagacggagccgttgcctcatttcctgaaggcggctgaaggactatggggttcgtccaaaatctaacatttttcaagatctttgaacctctttgaaaggcaaaggacatgggcagcagttccagaggacccttgatggcttttgggcagctttggcaggtgaccaagaattgatgggcactaccgtggaagatcccagactggttttatgaaagaaagccccagcagcataagagggaatttcacagaagagcccagctgcagaaagggaaagcatgtccattggcccttccagatggggcagccaacaggagggggcctccccaggcccggcattgacagggctacgggacgaccctcgggcagatcatcaagttagaagcggagagggctaagccttgaagcccggccctccccccagcatccttggctgcagccatcccgcttaagcctgcctcaacccacacccgtggtggtaccttcagccctggccaagctttgaggctctgtcactgagcaatggtaactggcacctgggccagttcctccctggtgcccccaggcctcagcccaacttcttacccgaaagcatcactgccttgggcccctccctcccggctgcccccatcacctctactgtctcctccctgggctaagccaggggagaagcgggcttgggggtagcctggattgtgggccaagtccactgtcctccttggcggcaaaagcccattgaagaaggaccagcccaggcttgccccctatcttgtacctggaatatttttggggggtggaactcaaaaaaaaaaaaaaaaaaaatcaatcttttctcaggaaaaaaaaaaaaaaaaagggcggccctct

SEQ ID NO: 157134 - DNA, 1428 bp, Homo sapiens
  misc_feature (1)...(1428): n = a,t,c or g
cgacgcgcgctgcggacccggctcgacccacgcgtacgcggacgcgtgggcggacgcgtgggcgccagcattcgctcaagaagtcccgcatggagaatgacatggcccagtctctccacagtgacacggctgatgacactgcccatcgccctggcaagagcaacctcaagctgccaaagggcattctcaagaagaaggtgtcagcctctgcagaaggggtacaggaggaccctccggagctcagcccaatccctgcgagcccagggcaggctgcccccctgctccccaagaagggcattctcaagaagccccgacagcgcgagtctggctactactcctctcccgagcccagtgaatctggggagctcttggacgcaggtgacgtgtttgtgagtggggatcccaaggagcagaagcctccgcaagcttcagggctgctcctccatcgcaaaggcatcctcaaactcaatggcatgttcttccagacagccttagagctcgcggcccccaccaccttcggctccctggatgaactcgccccacctcgccccctggcccgggccagccgaccctcaggggctgtgagcgaggacagcatcctgtcctctgagtcctttgaccagctggacttgcctgaacggctcccagagcccccactgcggggctgtgtgtctgtggacaacctcacggggcttgaggagcccccctcagagggccctggaagctgcctgaggcgctggcggcaggatcctttgggggacagctgcttttccctgacagactgccaggaggtgacagcgacctaccgacaggcactgagggtctgctcaaagctcacctgagtggagtaggcattgccccagcccggtcaggctctcagatgcagctggttgccccccgaggggagatgccttctcccccacctcccaggacctgcatcccagctcagaaggctgagagggtttgcagtggagccctgagcagggctggatatgggaagtaggcaaatgaaatgcgccaagggctcagtgtctgtcttcagccccgctgaatgaagaggatactaaagagaggggaacgggaatgcccgcgacagagtccacattgcctgtttcttgtgtacatgggggggccacagagacctggaaagagaactctcccagggcccatctcctgcatcccatgaatactctgtacacatggtgccttctaaggacagctccttccctactcattccctgcccaagtggggccagacctctttacacacacattcccgttcctaccaaccaccagaactggatggtggcacccctaatgtgcatgaggcatcctgggaatggtctggagtaacgcttcgttatttttatttttatttntatttatttatttatttttttgagacggagtttcgctcttggtgcccct

SEQ ID NO: 157135 - DNA, 570 bp, Homo sapiens
tgtgatggaatctgggatgttatgagtaatgagcagctctgtgaatatgttaaatctaggcttgaggtatctgatgacctggaaaatgtgtgcaattgggtagtggacacttgtttacacaagggaagtcgagataacatgagtattgtactagtttgcttttcaaatgctcccaaggtctcagatgaagcggtgaaaaaagattcagagttggataagcacttggaatcacgggttgaagagattatggagaagtctggcgaggaaggaatgcctgatcttgcccatgtcatgcgcatcttgtctgctgaaaatatcccaaatttgcctcctgggggaggtcttgctggcaagcgtaatgttattgaagctgtttatagtagactgaatccacatagagaaagtgatgggatggcagtcttgggcacgtccatctgtaaacctgctgagagctctggtgacaagaaaggcagtggctggcagaccttccaagcactcagaagcacgcggacaaaaaggtttttttgtaaacccgaacgaaaaataaacccagcattatataattataaa

SEQ ID NO: 157136 - DNA, 1440 bp, Homo sapiens
atgggtgcatttttggataaacccaaaactgaaaaacataatgctcatggtgctgggaatggtttacgttatggcctgagcagcatgcaaggatggagagtggaaatggaagatgcacacacagctgttgtaggtattcctcacggcttggaagactggtcattttttgcagtttatgatggtcatgctggatcccgagtggcaaattactgctcaacacatttattagaacacatcactactaacgaagactttagggcagctggaaaatcaggatctgctcttgagctttcagtggaaaatgttaagaatggtatcagaactggatttttgaaaattgatgaatacatgcgtaacttttcagacctcagaaacgggatggacaggagtggttcaactgcagtgggagttatgatttcacctaagcatatctactttatcaactgtggtgattcacgtgctgttctgtataggaatggacaagtctgcttttctacccaggatcacaaaccttgcaatccaagggaaaaggagcgaatccaaaatgcaggaggcagcgtgatgatacaacgtgttaatggttcattagcagtatctcgtgctctgggggactatgattacaagtgtgttgatggcaagggcccaacagaacaacttgtttctccagagcctgaggtttatgaaattttaagagcagaagaggatgaatttatcatcttggcttgtgatgggatctgggatgttatgagtaatgaggagctctgtgaatatgttaaatctaggcttgaggtatctgatgacctggaaaatgtgtgcaattgggtagtggacacttgtttacacaagggaagtcgagataacatgagtattgtactagtttgcttttcaaatgctcccaaggtctcagatgaagcggtgaaaaaagattcagagttggataagcacttggaatcacgggttgaagagattatggagaagtctggcgaggaaggaatgcctgatcttgcccatgtcatgcgcatcttgtctgcagaaaatatcccaaatttgcctcctgggggaggtcttgctggcaagcgtaatgttattgaagctgtttatagtagactgaatccacatagagaaagtgatggggcctccgatgaagcagaggaaagtggatcacagggaaaattggtggaagctctcaggcaaatgagaattaatcataggggaaactaccgacaacttctggaggagatgctgactagttacaggctagctaaagtagagggagaagaaagccctgctgaaccagctgccacagctacttcttcgaacagtgatgctggaaacccagtgacaatgcaggaaagccatactgaatcagaaagtggtcttgctgaattagacagctctaatgaagatgcagggacaaagatgagtggtgaaaaaatatga

SEQ ID NO: 157137 - DNA, 980 bp, Homo sapiens
tttgcttttcaaatgctcccaaggtctcagatgaagcggtgaaaaaagattcagagttggataagcacttggaatcacgggttgaagagattatggagaagtctggcgaggaaggaatgcctgatcttgcccatgtcatgcgcatcttgtctgcagaaaatatcccaaatttgcctcctgggggaggtcttgctggcaaccgtaatgttattgaagctgtttatagtagactgaatccacatagagaaagtgatgggggtgctggagatctagaagacccatggtagccttaaaaaaccttcctaaaatgcttttgattctgaaaattgggggaaaaaacttttaatcacaattttcttcaatacaaggggaaaatattcttgcggattcccaacgttttgtgatatgagcagaaaatcattagcatttcccatcatttgttcatatttgtgttttctgacagttgccacttgtagcattgcctgtactacagtattttttgccaacctcaggcatactccgttacatcttgtattgaactttcggccctagaaaccagtggagttatttcaccacaaatcaacaatgtgcctgaggtgcatgggaaatatagttagctatactctgaaaatacattatgttttttttctttaaacaaaacacacaacatgtaagcatgttaagagtaaagaattgtatgatatgttccttttttcagttcaccaagttggaagccttttgcagctctgtggcttggaatttcatttgagcaatttctataggatatgtatttattattgattgttatttaaaaaaatthcacttttacctgtattaccaaactgggttctccaataatgtccaaattgtaatgttgccttgcttcaagataaagtgtatttgggaataatattatacacccttacaaatttcatgcatgtatctactgcatccttcaactctcactagaaaatcttttg

SEQ ID NO: 157138 - DNA, 451 bp, Homo sapiens
gacatattccaggctcttacactgagaccaaagagaaatctttacctcagtttcttcatcagcagaatgggtttctggcctctctcagggataattttgaaggcataatgaaaattatgatgaatcactcattggtaggaaaataatgatataagtttcaaatatgtatgattttacctatacttggtaatgctttgttttatagagcctgttaagctgctattgatagtcggagcttatatactgtgacttctgaagactatacatgaattccacaatcagtgctttgttgatacaaaatccttaaaagggaggcactttaaagaatatgtatttttcacttttcttaatatgtttcatcggtgacaggcatgataatatttctatatgtaatgggtaattgggaaaaaatagatgataaataaaattgctctaaagaagttaaaaaact

SEQ ID NO: 157139 - DNA, 890 bp, Homo sapiens
aaaaccggccgcgaaccacgcgggcgatttttgctctgtttgttattttttacagtaatcacttatttttttgtggtaattggcattgccccaatttttatcctttatgaattggattcaccactctgctggaatgaagtttttataggttatggatcagctttgggtagtgcctcttttttgactagtttcctaggaatatggcttttttcttattgtatggaagatattcatatggccttcattgggatttttaccacgatgacaggaatggctatgaccgcgtttgccagtacaacactgatgatgtttttagccagggtgccgttccttttcactattgtgccattctctgttctacggtccatgttgtcaaaagtggttcgttcgactgaacaaggtaccctgtttgcttgtattgctttcttagaaacacttggaggagtcactgcagtttctacttttaatggaatttactcagccactgttgcttggtaccctggcttcactttcctgctgtctgctggtctgttaactaacttccagccatcagtctatgtgttgtcaagtgtaccagctggaatgagggaagctatgaacttcttatacaagaagaatccagtgaagatgcttcagacagagcctgttaagctgctattgatagtcggagcttatatactgtgacttctgaagactatacatgaattccccaatcagtgctttgttgatacaaaatccttaaaagggaggcactttaaagaatatgtatttttcacttttcttaatatgtttcatcggtgacaggcatgataatatttctatatgtaatgggtaattgggaaaaaatagatgataaataaaattgctctaaagaagttaaaaaaaaaaaa

SEQ ID NO: 157140 - DNA, 2411 bp, Homo sapiens
cccctcaactatattaagaactcctagtttcaccctttctccatcccatcatcccacctatctgtggttgcttcccaagacctcctcccaagatagacatctcctacccagtgcccttgtgtgaccccaggactcaagtctcagactgtgaacagatgtggccatgcccagagacgccagcctggccagaagggcatgcctcagcttactacttcatctctcctggttccctccctgcagtgccccgggtgtcatcttctcccactctgggtaccagggatgctaccacataggcttcccaaagccccattctaactcccctctctcagggaagccctagagagaggtccaaaaagcattcacagctgtatcacactctatgcaggtggcgtaggagactgatcaggcctgctgtggggaagacagtatgtatgaacacagccagcaaatgtcatagttccaaccaggatgctttcaggccatctcagctgcttgatggtgagatggttcccttattccttcaggaaaggcttagcattgtggccacattaggggaagccagctttgaacaaatcagtcatagtactgccctatagcattagccagtgaccaaattaggggacaacgtctttgtgcacagaattgcttattcaagggaacatttccacaaggaaaggaaatatttaaggggttatttccacaggaagccccaaaacgtcttgggaaacacagaggtgaggaggaggaatagtaattgtcaatgagctttttaattaccaaggttacaccccctgcccccaaagaaggagtcctctttttaggggaattcaggaaccttcattgtcctaggaagctggaaagattcttgggaacattttaggcttttactctcaacttgctgttctctttacattccttaagttagactttcgggtgtggcttctctcccaggggtaacatttacttccattttctaggaccgaaccaaaagtctttcttgcaggaatctccccaccgagtgtgggtaaggaagggaagggacaaaaggctttaggatataaatttcatgttacagagcatgtcattgtcaaaggaaatctgtggccctgagattttaagaacataaaatgtgacatttgatatttctccagcctcagggaagtaagatggataacattggtggccttaatcaaatggtcccattattaaccccaaaggaagtgcccacagcaagaggtttgtgggatgcacttatgtactacggtgaggaaagggggccacatatgaaaggccccttaagtcacatcctgacagtagcacttttgagtgcagattcctgggccccaccttaaacctactagttctgaaactctgggaataaggccatgaaatctgcccttactacagactacccaagttgttctgttgcacatcaatgtttgggaaccactgctgtaagggaatcattctggtcaccttgagctttgagctaccactaagccatgaaagaaaatacatcatacagggaagagagaagggaggaggttccaagtagtaactggcagatcctcctgtctggaggtaccaccttctattctggtttctgacttttccttcttgatgaccatagatgtgttccagaggcaaaagagacacattatcccagatggcagaacatgctttcaaaacatataaaatgtcaaagttccagatccttctacatctttagtcctgtctgaggatggtagctggctctctgtagctgatagatggctagagttccatccaaatccttgaccacgacttcatggagatttgaataatctatttgatgagatttctatttcaataacccacctctctcaccccacattcatatccctaaatttgaccctctgggccgagtcacatgggccttcaagagaggtgatcccagtagactgaggtcttccctttcagcagaaagattccatttccctggcttgccagtggcactgatttccaaacacccaatgagtttaatattctttcctccttggcattactgccccagcctctttttattttttctgtgtgtgtctaataaccaggaaaaaaataaagccttaggttttaaaaagttttaaaaataatccggtttccagaaactgtcaaatgtacccatatttgtattaagagttgttgggaaattttgtacaatgaatttacatttatttatggtgacatatttacgcttgtgatcaaataatgatgttaaattcttaaatcatatttgcctatgcagctgaagctcgctattttgatttgtattttgggggtacctgtgttgagttgataaacatttccatcttcattaaaactgcttccaacctagtaaaaccagcaaaaaaaaaaaaaaaaaaaaaaaaaaa

SEQ ID NO: 157141 - DNA, 1269 bp, Homo sapiens
  misc_feature (1)...(1269): n = a,t,c or g
cccacgcgtccggtgtttgaccaggtcagaactcttgttctatgcgaatgtgctcacgcagacagaagcggaggggctccgtcgctctgccctcacgccgctgaaccgcgagggtctcccgctcctcaggcttgcggctcggccgcgaagtgtgtcaggtgtgcatcctgggtgctcctttgtgctctgtcctacggtgacacaggcggcgtggggttagacaggtaccggtcagactacggtgacacaggcggcgtgcggttagacaggtaccggtcagattacggtggcacaggcggcgtggggttagacaggtaccggtcagattacggtggcacaggcggcgtggggttagacaggtaccggtcagattacggtggcacaagcggccgtggggtagacaaggtaccggtcagattacggtggcacaggcggcgtggggttagacaggtactggtcagatgcacgggctccctaaacccctgctgtggcttcggcagtaaagacaggacgcacccatgtcacaagaggagcacaggcaggggtgttggtgttggggcagccctcagggtctccagaccccagccccactcacacagcagcctaggaaggaagggcagagtcccaggtgtcagctggtgggtctcccagggagctgcccctccctgggaagtcacaggacaggaatgacagatcagggaactgcaggaagctgccacctctggggtcagaatatgcccagcctgcgggggctctctatcggggtcttcgagagccagacagccctgccttgtgctgcataccctggctttgctctgtgcagaacccagcacacgtgattttgtgtgacatgccagcagcttggcctcccaggacaggaggcctgccccngggggaggggctgccaggaggagggggggcaggcaccccatgagtctgtccagccttgtcacagatgcatcgcccgacctgcggtcctgatttcagctcacctcagagtaaatcagaataaactgcacccagactttcacgaatgcatgttgacgctttcagttcacccctttctttgctaactttcttcctattttcttctaatgcgagagcttattaattccatatttatcattttgaataacttttctcctttttaggttacaaaagtactttcactcttagtaaaatgtatttactattttagtaacaaaaatatacttgcctaatcatgtttaaaatatagtgatgtgaaaaattcaaaaaaaaaaaaaaaaa

SEQ ID NO: 157142 - DNA, 407 bp, Homo sapiens
  misc_feature (1)...(407): n = a,t,c or g
ggcacgaggagctatacgcatctttacagagtcttcttagaactcattaagatgagcgtctatgacctgaaccataccgtaataatggttatctctggacatgtaagactagcctttnnnnnnnnnnnnnnnnnnnnnnnnnnnnnnnnnnnnnnnnnnnnnnnnnnnnnnnnnnnnnnnnnnnnnnnnnnnnnnnnnnnnnnnnnnnnnnnnnnnnnnnnnnnnnnnnnnnnnnnnnnnnnnnnnnnnnnnnnnnnnnnnnnnnnnnnnnnnnnnnnnnnnnnnnnnnnnnnnnnnnnnnnnnnnnnnnnnnnnnnnnnnnnnnnnnnnnnnnnnnnnnnnnnnnnnnnnnnnnnnnnnnnnnnnnnnnnnnnnnnnnnnnnnnnnnnnnnnnnnnnnnnnnnnnn

SEQ ID NO: 157143 - DNA, 369 bp, Homo sapiens
ggcacgagaaaatttatccccctaacagcctggtcaaactgggctatagttaaagcagcctcggaaccgtttcaatcggaaaatgaggcttatcctccagcagaaagaatttctgcagaggaaggtggtgatgctgctgaaggaggagaggatagtgaagaagattttgaggaaaatacagacaaacctggagatgagttaatttcttttgaggagcacgtgggaccttcagctgctcctaaaatagagaagccatatatgccaagatgtttaaaacaaagaagggccttgaggagcagtcggctcctcattgggatcatccggagtggccgcctccaataaagcaatgtagcttggagccttggaggg

SEQ ID NO: 157144 - DNA, 738 bp, Homo sapiens
ggcacgagcgattagagaaaaatgttaaagaggtattggaagattttgctgaagatggtgagaagaagattaaattgcttactggtaaacgcgttcaactggcggaagacctcactcggactcaacactacacaccaggccaccacatggcgccgcacccagcattgacacttcttttaccttgtctgggctctgacatccgtgccaggttgctcttcgtcatggagtcccttttactgagctctgctctgacgctttgtgccagggtgcctctccatcttcatccttcccacccgcttagcctctgcccgaccccagacagattcctttcctcacctggaagccagaccatggcctttgtgggagataccctctttaccctgcctgtgcttcgccagcctgcaccaggccaccctcctgcacagatactctcctcagtactggaccaggctaccaacagccccatgtgaacccattgtaacccaggtcaggcattaacacctgcagtaggctaccatggctttctccttccaacccccctagcttggccctactaataatcactttgtcactgttcggggttcatatttggttgtttcctgtaggctcctagctttaagataggattgcaaactaaaataaacttagatctttgagaactcaaggaaatcagtcaaacattattgctattaaataaaaatgaaataccgtagtggtatcaatttcaattatgcgcca

SEQ ID NO: 157145 - DNA, 5868 bp, Homo sapiens
cacgggggctcccgcgtggccgtctcggcgcctgcgtgacctccccgccggcgggatgtggcgactacgtcgggccgctgtggcctgtgaggtctgccagtctttagtgaaacacagctctggaataaaaggaagtttaccactacaaaaactacatctggtttcacgaagcatttatcattcacatcatcctaccttaaagcttcaacgaccccaattaaggacatcctttcagcagttctcttctctgacaaaccttcctttacgtaaactgaaattctctccaattaaatatggctaccagcctcgcaggaatttttggccagcaagattagctacgagactcttaaaacttcgctatctcatactaggatcggctgttgggggtggctacacagccaaaaagacttttgatcagtggaaagatatgataccggaccttagtgaatataaatggattgtgcctgacattgtgtgggaaattgatgagtatatcgattttgagaaaattagaaaagcccttcctaattcagaagaccttgtaaagttagcaccagactttgacaagattgttgaaagccttagcttattgaaggacttttttacctcaggttctccggaagaaacggcgtttagagcaacagatcgtggatctgaaagtgacaagcattttagaaaggtgtcagacaaagagaaaattgaccaacttcaggaagaacttctgcacactcagttgaagtatcagagaatcttggaacgattagaaaaggagaacaaagaattgagaaaattagtattgcagaaagatgacaaaggcattcatcatagaaagcttaagaaatctttgattgacatgtattctgaagttcttgatgttctctctgattatgatgccagttataatacgcaagatcatctgccacgggttgttgtggttggagatcagagtgctggaaagactagtgtgttggaaatgattgcccaagctcgaatattcccaagaggatctggggagatgatgacacgttctccagttaaggtgactctgagtgaaggtcctcaccatgtggccctatttaaagatagttctcgggagtttgatcttaccaaagaagaagatcttgcagcattaagacatgaaatagaacttcgaatgaggaaaaatgtgaaagaaggctgtaccgttagccctgagaccatatccttaaatgtaaaaggccctggactacagaggatggtgcttgttgacttaccaggtgtgattaatactgtgacatcaggcatggctcctgacacaaaggaaactattttcagtatcagcaaagcttacatgcagaatcctaatgccatcatactgtgtattcaagatggatctgtggatgctgaacgcagtattgttacagacttggtcagtcaaatggaccctcatggaaggagaaccatattcgttttgaccaaagtagacctggcagagaaaaatgtagccagtccaagcaggattcagcagataattgaaggaaagctcttcccaatgaaagctttaggttattttgctgttgtaacaggaaaagggaacagctctgaaagcattgaagctataagagaatatgaagaagagttttttcagaattcaaagctcctaaagacaagcatgctaaaggcacaccaagtgactacaagaaatttaagccttgcagtatcagactgcttttggaaaatggtacgagagtctgttgaacaacaggctgatagtttcaaagcaacacgttttaaccttgaaactgaatggaagaataactatcctcgcctgcgggaacttgaccggaatgaactatttgaaaaagctaaaaatgaaatccttgatgaagttatcagtctgagccaggttacaccaaaacattgggaggaaatccttcaacaatctttgtgggaaagagtatcaactcatgtgattgaaaacatctaccttccagctgcgcagaccatgaattcaggaacttttaacaccacagtggatatcaagcttaaacagtggactgataaacaacttcctaataaagcagtagaggttgcttgggagaccctacaagaagaattttcccgctttatgacagaaccgaaagggaaagagcatgatgacatatttgataaacttaaagaggccgttaaggaagaaagtattaaacgacacaagtggaatgactttgcggaggacagcttgagggttattcaacacaatgctttggaagaccgatccatatctgataaacagcaatgggatgcagctatttattttatggaagaggctctgcaggctcgtctcaaggatactgaaaatgcaattgaaaacatggtgggtccagactggaaaaagaggtggttatactggaagaatcggacccaagaacagtgtgttcacaatgaaaccaagaatggaattggagaagatgttgaaatgtaatgaggagcacccagcttatcttgcaagtgatgaaataaccacagtccggaagaaccttgaatcccgaggagtagaagtagatccaagcttgattaaggatacttggcatcaagtttatagaagacattttttaaaaacagctctaaaccattgtaacctttgtcgaagaggtttttattactaccaaaggcattttgtagattctgagttggaatgcaatgatgtggtcttgttttggcgtatacagcgcatgcttgctatcaccgcaaatactttaaggcaacaacttacaaatactgaagttaggcgattagagaaaaatgttaaagaggtattggaagattttgctgaagatggtgagaagaagattaaatttgcttactggtaaacgcgtttcaactggccggaagacctcaagaaagttagagaaattcaagaaaaacttgatgctttcattgaagctcttcatcaggagaaataaattaaaatcgtactcataatcagctctgcatacatctgaagaacaaaaacatcaacgtcttttgtccagcctctttttcttctgctgttccacctttctaaacatacaataaagtcatgggataaaaataatcgatgtatgttacgggcgctttaaccatcagctgcctctcgaatggaagaacagtggtaatggattaacatcctattttgttgtactaaagtgacaaatcggaataatataattggtatggccattaggttcagtccttgaagataagaagcttgttctctgtttgttgtcttatttgtggtggcactcgtttaatggattaactgaggttgctcaatgttcagtttcttttccagaaatacaatgctaggtgttttgaaataaaacttatatagcaattgtttaaagttatcaattgtatataaaatcacagtagcctgctaaatcattgtatgtgtctgtagtattctattcccagaaactatttgaccatgataattcagtttatattcaccacatgaaagaaaaatgggtaacagaagaacccctaaaacaggttaatttggattgtaacgttcagtgaaagaaatttcaacccttcatagccagcgaagaaatttgccttggaagccaagtcagtaccagcttacctatttgattcagttgctgttttctcactctctatatccatttgaaattgatttattttagatgttgtatacttacgttaggctttctgttaatagtggtttttctcctgttgacagagccaccggattatgacacaggatgaggaagattaaggataatcaattgactaatttcatttagaatattatcaaacatttcaactaggtatcagaaaaaggctttctttcataagactattttaaatagaaattatttcaacaattaaagtaatgttgaccatccccctctcagctgaataaagaaaaatttagttcaatttattgcaatttaattacaatactaccttcacaacattttcatgtgttttaaataaatattttttaattggctaaaggacattcaagcaaagaaatgctttctttacttaaaatgtctatctcatttgctgccttttcactaagcctttactttgttaataaaagtgtccattgtgtgatgtttttgattttacagtttgctaaatcttattttcttggagttgctttttggtaacagccccattgctactccccattttattgttttacatcaatgcatgcttcgttgtgatccctcaagatgtaacacttggtatgctcggttgaggatatgaaaaaatacttccgaaaccaggaattcagtgtatgtttgttttatactgtttgataagaaaagtaggtccagccttaagcagcacagatgcgctggtagatgcatagtcaggaactttttttatttcttttaggtctagggacaggagtgaatagaaagggaggagagctctattatgttctatacacagattaggagatgaccttactgggtacacccctctaaccagtgcttacaggttaatgcatgttaatgaatatttttgcagttgtaaagcataacaattacaactacacatctatttctaaagaataaaacaggaccatatttatttacttctgtcaactatagaaagaaagaccttcagctgtatttccacagatttctcccaaggaaaaggctaatattagtcactactgttatcacatccctttgtataagttttaaaaagagatggagggagatcttcatttctttgaggagatcagtattgtaacgtatgtgaatagatgataacaattaatattactaaaagtcccacatgagagtcctgacgccctctccatgccccacagtaatgtggcttctttcatgggtttttttttcttctttttagctgatctcatcctaagcatgctttatttttccttgaaagctaggtatttatcaactgcagatgttattgaaagaaaataaaattcagtctcaagagtaaaccctgtgtcttgtgtctgtagttcaaaagtcagaaatgattctaatttaaacaaaaagatattaaatatacagaagttaaattcgaactagccacagaatcatttgtttttatgtcagaatttgcaaagagtggagtggacaaagctctgtatggaagactgaacaactgtaaatagatgatatccaaacttaatttggctaggacttcaattttaaaaatcagtgtacctaggcagtgcacagcacgaaataagtggcccttgcagcttccccgtttaacccactgtgctatagttgcgggtggaacagtcaacctttctagtagtttatgatattgccctctttgtattcccattttccacagttttttccgcagacttctttctgcaaattattcagcctccaaatgcaaatgaatgatataaaaataagtagggaacatggcagagagtggtgcttcccagcctcacaatgtgggaatttgacataggatgagagtcagagtataggtttaaaagataaaatctttagttaataattttgtatttatttattctagatgtatgtatctgaggaaagaaatctggtatttttgctttccaataaaggggatcaaagtaatggtttttctctcagttctctaagctggtctatgttatagctctagcagtatggaaatgtgctttaaaatatgcttaccttttgaatgatcatggctatatgttgttgagatatttgaaacttaccttgttttcacttgtgcactgtgaatgaactttgtattatttttttaaaaccttcacattacgtgtagatattattgcaacttatattttgcctgtgcttgatcaaaggtcatttgtgtagatgagtaattaaaaaatatttaaatcac

SEQ ID NO: 157146 - DNA, 568 bp, Homo sapiens
ccgaccgccaggcgctgttacagtggatgcgaactaaccggtaatagatgagatactcaagttcagagaggtgtggaagtcatttgacagagcagtcgggcccgagtggtttccttatgccaaggcagcacgtcatcctttttcctcaaaaataacagcaacaacattcctgcaccttgcctctgcagcattatatcgtactgcagaaaccagctcaactatgcaaaactaccaccaggactggccgacaccaggagggattccagagaccacactgcagggagcatacagaaagaaaattaagagatcagatgcagcagcagccggaacccacagttcaccttggtgcattcctttatgatgaagacttattgattcattatatgagaaaggaaaaatgagcagaaactactgtatgatgtgcagctcacaccagacagcaactttagggttatctttccagttcagcagtgcaactctatggagtagaattgaaaggagacttttcgccaattgcaggaaatggtcataaaaaaatacctgctcactgacagaataaaggtacctt

SEQ ID NO: 157147 - DNA, 440 bp, Homo sapiens; identical to SEQ ID NO: 141717
  misc_feature (1)...(440): n = a,t,c or g

SEQ ID NO: 157148 - DNA, 1012 bp, Homo sapiens
ggcgagtggcgagtggcgagtgtcaggggggcggccggcgggggcggggcggccggaggaggcgttggcagcgggctcggacccacgcggcgccgcggcccgcctggcctgcagcgctcccacccccggcggcggcacgatgccctttgacttcaggaggtttgacatctacaggaaggtgcccaaggaccttacgcagccaacgtacaccggggccattatctccatctgctgctgcctcttcatcctcttcctcttcctctcggagctcaccggatttataacgacagaagttgtgaacgagctctatgtcgatgacccagacaaggacagcggtggcaagatcgacgtcagtctgaacatcagtttacccaatctgcactgcgagttggttgggcttgacattcaggatgagatgggcaggcacgaagtgggccacatcgacaactccatgaagatcccgctgaacaatggggcaggctgccgcttcgaggggcagttcagcatcaacaaggtccccggcaacttccacgtgtccacacacagtgccacagcccagccacagaacccagacatgacgcatgtcatccacaagctctcctttggggacacgctacaggtccagaacatccacggagctttcaatgctctcgggggagcagacagactcacctccaaccccctggcctcccacgactacatcctgaagattgtgcccacggtttatgaggacaagagtggcaagcagcggtactcctaccagtacacggtggccaacaaggaatacgtcgcctacagccacacgggccgcatcatccctgcaatctggttccgctacgacctcagccccatcacggtcaagtacacagagagacggcagccgctgtacagattcatcaccacgatctgtgccatcattggcgggaccttcaccgtcgccggcatcctggactcatgcatcttcacagcctctgaggcctggaagaagatccagctgggcaagatgcattga

SEQ ID NO: 157149 - DNA, 513 bp, Homo sapiens
tttttctgaaaatcagccttttaatctagttgaacccaacgagtggggaaagaactaaaacatttttttcccttcagattttgattataagaataacgggtcagaggtgtctcttccataggaaactgacatcccctatgtcctcagagttgtttttttttttttttcttcaaaaaaatgcataaaagaatttcaactcatgtgcatgccacacatttccatctatagtgacaaatcataggggcttgcttgggaagtaccatctttcgtggaaggtgccgggtgtataaaggagtacctttgggcagcctggtcccaaagctgaaagcccaggtctggtgcctctggggcaggttggctgcccaggggagaaaccaaatcattaatgtgtccacctagtgggggctgcgagattgtcgaagcctggctgagagctgatcgatatgcattctgggatgttcccctgagggaagagactgagctctctaggagggtcccaagatctggactccc

SEQ ID NO: 157150 - DNA, 3026 bp, Homo sapiens
atgagcctctgcgcccagcccagccctcccgtcctgagaggttcctatacttgtctttcccctagtgtgaacgagctctatgtcgatgacccagacaaggacagcggtggcaagatcgacgtcagtctgaacatcagtttacccaatctgcactgcgagttggttgggcttgacattcaggatgagatgggcaggcacgaagtgggccacatcgacaactccatgaagatcccgctgaacaatggggcaggctgccgcttcgaggggcagttcagcatcaacaagaaccaggagcttcagatcctaagtcaagtgggtgaacgcagtgcccttgggagggccgaggcacccggtggcagctggcagggttttgctcagcacgtgccggccttcctcgaagctcggtactgtcacagtggagcctctcaacaacgctgtgaggcagcaccatttgacaggaagttgaccagcagccagatgtcagagtttgcgtgttttgagcagcagcggcagcctcaccagagaccccacggtgacctcgtttcatcagccagccccgcaggaggaggacaggatggggtccccggcaacttccacgtgtccacacacattgccacagcccagccacagatcccagacatgacgcatgtcatccacaagctctcctttggggacacgctacaggtccagaacatccacggagctttcaatgctctcggtggagcagacagactcacctccaaccccctggcctcccacgactacatcctgaagattgtgcccacggtttatgaggacaagagtggcaagcatagggactcctaccagtacacggtggccaacaaggaatacgtcgcctacagccacacgggccgcatcatccctgcaatctggttccgctacgacctcagccccatcacggtcaagtacacagagagacggcagccgctgtacagattcatcaccacgatctgtgccatcattggcgggaccttcaccgtcgccggcatcctggactcatgcatcttcacagcctctgaggcctggaagaagatccagctgggcaagatgcattgacgccacacccagcctaatggccgaggaccctgggcatcgccagccttgcctccagtgccctgtctcctttggccctcaatctggtcccaaatctggctgtgtcccaaagggtgtgtgggaagtggggggaaagtagaggatggctcgatgttttgcagctacctcttttccccgtgtttctttttagacaaattagcactgcctgaagttgcagttcccctttccctggggagccccaagaacagagtcaggcaaggggtggggagtccagggatcttggggacccctcctaggagagctgcagtctcttccctcaggggaacatcccagaatgcatatcgatcagctctcagccaggcttcgacaatctcgcagcccccactaggtggacacattaatgattttgtttctcccctgggcagccaacctgccccagaggcaccagacctgggctttctagcttttgggaccaggctgcccaaaggtactcctttatacacccggcaccttccacggagatgggtactttcccaagcaagcccctattgatttgtcactatagatggaaccctgacttctgccccatcccttcctgcccaacctagaacccaggcctcaagtctttaccccacccctttcttgttcttccaagaagcagatgcccagttgctcagcagcagcggttagagactttgaatctgcccaccagtcacaaggcgggtcacagattcctcttcctctcttctcctcgttcctctgaaccctccaccaatgtgcctcagactgtgtgctgtgtggcaacagcattctggttcccacttgccaagatctcccaccactctgctggggatctgcaagtggcagggaagtgggggttgtgtaaaaggggaagtcatcttttgagatccagatagacatggtttgtgcacttacggtccagatggggaaggcatccttcctgcaaccctaaaataatcatgcagcctcttcagacgggacgccatcggtcccaaggcctttaggttggaggaagcaaagcaggccaggcctgtcctgtccgtggacctctaccttctggactccctacgggtgcagagcactctgggtttcttctacagccatcgtggcccaacttgacactgtgctcctccatcagctggtcacatgccaacacgttcccagcccctgaggcagctccaggggtgccccacctggttcctgaggtgggtccctaaccctggctgctcctcttcaatccttttcccttttgtcctgaaaaggaaggaagcaatggttccaggcaattaatttcaacccagggaaattttaagctaatgcccttcatgttcccaggggagagggccacacgccctgttttcccatttatagcaagattgtttgcatacttttgtaatgaaggggagtgttccagtggaaggatttttaaaattatcttatgggataagctcaagtctctgcccatttgtaattttttggctctaagctccgattggagaccgcttctcccttggtgcatgtgagttgactgatggttggtgagtggtaaatgccatttggttaatttctggtatcgggtgggccacttggcatggatttttttacaattctgttccccaagttacaggaaggagtccctttggtgtgtgaatatgtgtgcctgtagagggtggggcagggttggggtggggatggaaatgtgtggcatgcacatgaagttgaaattcttttatgacatttttttgaagaaaaaaaaaaaaaaaaaccaactctgaggacataggggatgtcagtttcctaagggaaaaaacacctctgacccgttattcttataatcaaaatctgaagggaaaaaaatgttttagttctttccccactcgttgggttcaactagattaaaaggctgattttcagaaaaaaaaaaaaaaaaa

SEQ ID NO: 157151 - DNA, 461 bp, Homo sapiens
  misc_feature (1)...(461): n = a,t,c or g
ggcacgagggatgttacccattttaagacacacctttttaagggtaactttaaggggaaaaaaagcctgcctattatgatattacactttctgatcaaataaagagagcttttgaattatcatcatcatcattannnnnnnnnnnnnnnnnnnnnnnnnnnnnnnnnnnnnnnnnnnnnnnnnnnnnnnnnnnnnnnnnnnnnnnnnnnnnnnnnnnnnnnnnnnnnnnnnnnnnnnnnnnnnnnnnnnnnnnnnnnnnnnnnnnnnnnnnnnnnnnnnnnnnnnnnnnnnnnnnnntgtttttggtacaaacaaaannnnnnnnnnnnnnnnnnnnnnnnnnnnnnnnnnnnnnnnnnnnnnnnnnnnnnnnnnnnnnnnnnnnnnnnnnnnnnnnnnnnnnnnnnnnnnnnnnnnnnnnaccttgaattatctagacataaatttgtatcatacgttac

SEQ ID NO: 157152 - DNA, 481 bp, Homo sapiens
tgtacaagagtaaacttatgataaccaatttatgtctagataattcaaggctgggcgtggtggctcacacctataatcccagcactttagaaggcccaagacagggggatagtttgagccccagaggtgtccagaccagcctgggcaacatagcaagatcttgtctgtaccccaaaaacattttttttttaaattagcctagatctggcaagcacgtgccctgtactccccagctactctgggggctgaggttggaggatcccttgagccctgggaggttgagactgcaatgagccacaactgcaccgactgcactgcagcctggggtgacaggggagcctatctcaaaaaataatgatgatggatgataattcaaaagctctctttatttgatgaggaaagtgttaatatcataataggcaggctttttttccccttaaagttacccttaaaaaggtgtgtcttaaaatgggtaacatcc

SEQ ID NO: 157153 - DNA, 432 bp, Homo sapiens
tttcgttacagcagaggaggaagcatggaggattactgtgatagccctcatggagagactacctcggttgaagactcaacccaggatgtgaccgcagagcaccacacgagcgatgacgaatgtgagcccatcgaggccattgccaagtttgactacgtgggccggacagcccgagagctgtcctttaagaagggagcatccctgctgctttaccagcgggcttccgacgactggtgggaaggccggcacaatggcatcgacggactcatcccccatcagtacatcgtggtccaagacaccgaggacggtgtcgtggagaggtccagccccaagtctgagattgaggtcatttctgagccacctgaagaaaaggtgacagccagagcgggggccaactgtcccagtgggggtcatgtagccgatatttatctt

SEQ ID NO: 157154 - DNA, 1669 bp, Homo sapiens
gcgcttcaaaggcccttaggtttccttgtctctgtttacagaactagtccagccaggtgtcgctgctgcctcatagctgtgtggggtcgcgtgtatgtcggggggccatcttgccgatttaacgctgctttttgtgttgttgttgttttccctcctccctgcctgcctgccccttctcccccagcgaggacggtgtcgtggagaggtccagccccaagtctgagattgaggtcatttctgagccacctgaagaaaaggtgacagccagagcgggggccagctgtcccagtgggggtcatgtagccgatatttatcttgcaaacatcaacaagtaagctctgcttttcattttctgctccccgtgaatgacttgcaacacccagcctcaccctctggcctaacccccatctccattccctgtgctgcacgtagggctcccagctccccgagcctaacagtttgcatgtggtcattgctgctgcaaggcggacagggctgaggatgctgctacaagcctcggggcaggtccaggtctccagctagctgccctcgtgctgtggaagggtgctttactgtgtgttcccgcagtgtctgtccacccagacctttgtggcagtcttacagctaaaactttgaccaaagctttggtcactttatgcaacctggttttgtactgtttctcagaggtgccttcttttttccaatccatactcaaataatagtctttgatgtctgtcttccttgaccccgtgttcgtgcaaagattcagagtctgtgtgtgggcttctactagggtgatgttacaacaggtgggtttaattgaggatatcaagtgtctgttcctccccctgtcctgcattcactcctgtggaggaaaggaggccacgatgtccctaaggaaagctttgtcctgagctcttcattcattggctaacccctagctcccttttcttctgccctttcacaccaggagaaataattttccattttgttcctaatggctttggccttttgtattattctaccccctttagtcccctttgcagatccccactcctgctcagcagtgctcttaccctctgacccccaagctttcaattgtggctgttagcaacatcctggggtttaaaactccaccccacgcccgatctggctgtctaagagggattcctaacgcctgccgttgtgccgccctcccccaagaggcattcaggttattggagaactaatctcatctcaaggggcccagacacccaagtccccaaagcctacagacctctttcccgcccaggccctgaaaccctggccccgtgccagcaaggatgacaagccccagggcggcttcctgatgaatatggattggagatgatgtacagtttttattcccctctggcttttgaggaatgaaatgatttgcacttttgaaaacctgttaaccgtaggcctctggacactgagactggaaggaagaataaaggaatgcttgttgtttttaaactataccaggtttcccagatctcttggcttttttccacccagacggtagcagggggagtggttggggcacgtggctcttttccatctctttcaccctcaagttagtaaagtcgtttattcagatcacttactcagtgtagttataatttaattcagaccagttaaaaaaaaa

SEQ ID NO: 157155 - DNA, 293 bp, Homo sapiens
tttggatttttagtagaaacggggtttctccaagttggtcaggcttgtcttgaactcctgacctcaggtgattcacctgccccggcctcccaaaatggtgggattacaggcaggagccaccgtgccgggccgacaatatttctaaagaaaccttttaaaaacctgcattctctttgttcatccaattattcaatcattggctcatttgttaattcaaatacttattaagagctcactgtgtacaccacgtaccagtattcacaccacagatttcttttttaatttttttgaaa

SEQ ID NO: 157156 - DNA, 306 bp, Homo sapiens
atgccagttctgctcaccagtgacgaaatgcacaagagctccgtgaaagcagggtttgctaaagtggatcaacagcaagcccccaagtcagttcagcttctgacagtgaagacaagagactcaacaagtaacagaggaaactctggccccaggagccaggcaactgaccgcatctgcagaacaccttatcattttgaagactgctctaagtggaacatcctcctgaatccacttaatctccattcaacttctaatctgctgatgtcacctgaccagctcaagaccaagaatgagaaacggaactaa

SEQ ID NO: 157157 - DNA, 1430 bp, Homo sapiens
tggggtcttgctctgttgcccaggctggagtgcagtggtgcgatctcagctcactgcaacttttgcctcctggttcaagcagttctcctgcctcagcctgccaaatagctgggattacaggtgtgtaccaccactcccagctaatttttgtatttttagtagagatggggttttaccatgttggccaggctggtctcgagctcctggcctcaggtgatccacctgctttggcctcccaaagtgctgagattacaggcgtgaactaccgcgcctggccccatgtattgtatttttttcaggttatattgaaatctactaccaggaatgtcggaatgggttttggtatgtataatggaaatagatagagtggttaagtctagaaacacatacattaattgtattgaaatgttatatcaatacatcatttatgatgttgtgtgtggtcccagacctcatggccaccagtttggttaagcatttgtgaatgcttttttaatagcattcattagcattaatggaggaggacactgtgttttctcaattaatctcattgatttgtttggtataagtttgggtcagaaatgaaactgccaaaacatcgatcagtacaaggaagggacacagggcttaaaatgtccacagtcttggcagtggacttggcagttctcccagtaagcagaagtacttgagcttaattctgaacttcaaagtaatattttatacttaattttaggagttttcatttacatattgaaaaatgccttgactgtattcacataaatggtgctaaaacattgtaccccttataagaactgcagcaatccacagtaatgttggttacttctgagtatttgataaaggaacaaagtcaaaatgaatgtatttaataagcttctttctcatttccattgtttttataaaaatattttggtattgttgcctgcattttagccacttctaactttttgtattatgaatttggagaggataacaagccaactttagaccctctgccaagtggcgatggtgtttttcttccatgggtaagccattgtgaatggaggctggtggagcagcacactgtgtgaaaccctggcagcgctcatcttggcttgttttagcagtgcctctgtttacacccataagatgttccgcatgtgtccaaaatttcgcctgctctgaaaaacatggcccccgaggctctgtgcagtttggggccttggttcccacctgcagatgcggtcagttcccctggctcctggggccagagtttcctctgttacttgttgagtctcttgtcttcactgtcagaagctgaactgacttgggggctttgctgttgatccactttagcaaaccctgctgcagaggactgtaaaaacaaataactaaaaataaacttagaaaatacaactcaaaaaaaaaaaaaa

SEQ ID NO: 157158 - DNA, 601 bp, Homo sapiens
ccaggctggagtgcagtggcttgttctcagctcactgcaaactctgcctcccaggttcaagccattctcctgcctcaggctcccaagtagctgggattacaggtgcctgccaccatgcttggctaagttttgtatttttagtagagacggagtctcatcatgttggccaggctggtcccaaactcctgacgtcaggtgatctgcctgccctgtctcccagggggctgggattacaggcacgagatgggtggatcacctgaggtcaggaccagcctggccaacacagcgaaaccccgtctccaccaagaatacaaaaaaaaataggagtgatggtgtgtgcctgtaattccagccactcaggaggccgaggcaggagaatcacttgaacccgggaggtggacgttgcagtgagccagtttatagctttcagtcaagacatgtatattggttgaaatactgatacagttattctatagaaatttgttgcagcctgaaatgattgtgatttttctctgttaaaatggctttctctgataaataaatattttaaaataaaaaagcaatatctagaataatagtttaaaatacagaatacacttac

SEQ ID NO: 157159 - DNA, 421 bp, Homo sapiens
aaatgggatgctaggaaatatgcttaaatcaagtcttatttttaaagaggatttacaggaaacagcaatggaaacctggtcaattgaccaggtctgcagttggttggaggaaaaaaatttaagagagctagtttatagatttcaagaggaaaaattaagtggggccgctcttcttgcacttaatgatcggatggttcagcaactggtaaagaaaattgggcaccacgctgttctgatggatttaattaaaaaatacaagcataacactcaaggactgaagtccccagaaaaccccaaaaaggcagccgtggtcatgcaaacagaagcagctcgagattacagggatgaagagtcctccagtccagccaggcatggggagcagatgccatctttctatccagctgaaaaccttgataatggg

SEQ ID NO: 157160 - DNA, 1042 bp, Homo sapiens
cattaggccagcacagtggctgacatctctaatcccagcattttgggaggtcgaggtgggtggatcacctgaggtcaggagttcgagaccagcctggccaacatggtgaaactccatctcttctaaaaatgcaaaaatttagccaggcatggtgctgggattacaggcacataacaccacacccagctaactcttgtatttttgtagaaatggggtttcgctatgttgctcagactggtttcaaacacctggcctcaagtgatcctcctgcctcagtctcccaaatgctgtgattacaggcacaagctactgcaccaggcctctgactacatttctattaatatggttaggttggaggttttagtatttttgtatctcatatttgtatcaatatgactggcttctttgtctgtagtgtgtggtaatattagttctgtaaactgtcagttgcaaaaaaaaaaaataccttgaactatagtatatgttgataattagccataataatttcttagttaatttcttataattaaatttgtcaaagaggaaacttacagtttatatctgatgaaatctctaaaaagatgggtaaaacattgggaaatgtatgcatgtacttcactctggtttcatagggttagcaagtgtcttaaaaacatatataaagaagcacagagattgttaggagatatttatgctcccagttttaataattggggatactttgtataccacaggaaaggaaaaattacttaaactcctctttttttaggtcaaaattgggaaaaaaagtcttaatttgacagttactatggcctgtggctacccataggcaagtatttcagtgggaaaatactttactaagtaagtaatttgaacacagcttaaaatccatagtatgttacaattgctagccttttcacaaagtttgcattgtcttaatgtaggaagggatactgtgatctaaggatttcacaatttttaaaaagtgggaacctaaatagggtttcctaattgccatgaagttatttgtatcttaggtgtt

SEQ ID NO: 157161 - DNA, 1158 bp, Homo sapiens
acggagtcgtgggatcaaagactttgaaaacgatcccccattatcatcgtgtggcattttccagtccagaattgcaggggacgcgctactggacagtggtatcagaatcagctctgtgtttgcctccccagccctccgctgtgtgcagacggccaaactcatcctggaagaactcaaactggagaaaaaaatcaagatacgagtggaacctggaatctttgaatggacaaaatgggaagctggcaaaaccaccccaaccctcatgagcctggaagagctgaaagaggcaaatttcaacattgacactgattacaggcccgcgtttcccctgtccgccctcatgccggccgagagctaccaggagtacatggacaggtgcacggcgagcatggtgcaaatcgtcaacacctgtccgcaggacacgggtgtcatcctaattgtgagtcacggctccactctggactcctgcacgcggccactgctcgggctgccgccccgggaatgtggggattttgcccaactcgtgagaaagatcccttccctgggcatgtgcttctgtgaagaaaataaagaggaaggaaaatgggagttggtgaacccaccggtgaagaccctgacccacggggcgaacgcagcatttaactggaggaactggatctcaggcaactgagagccacggtgatgttgtcataacctcagagtggagaggcagaaaccatgtgcagaggctgggagatgctgctgtttccagaggcgtcttagtctcacccaatgtgatttgtagaagcacgagacgcacttttatatcccggaatatttcccctccggctttcgcctttgtaactcccatctgtggacccatcgtccaccagcccagctgcggggagcacagggcaggtggctgggtgaggatgccgccctgcagcatgtacaccgagcgtctgcagctggggacacaactgcccgagactctaacttccaggaattaaagactcaccacacacgaaggatctaaccacttcattttccatggtctaatcattaaattcccaatcgttttttctttttctgggtccatcactctttagccatatccacatgggctaaaacaggtgtaatagtcaataaaatggtcccagaaaaccatcgaccacgtca

SEQ ID NO: 157162 - DNA, 1677 bp, Homo sapiens
ggggaagagggaacaaaatacagatctttttttcagactctatctttgcttgttcaagaagaaggttatgggtctctttatcgtggtctgacaactcatctagtgagacagattccaaacacagccattatgatggccacctatgaattggtggtttacctactcaatggatagcagcacgaggactgctgtactgcaaaaaaagaagaccaaaagattacagtggaccatgggatacagaagccagcatggcagacagaagaaaaatagtttgggaacatgtaactattctaagtggaagttttgttgtaggaattatagtaatcacaccacattacttggcctttcggtaatgtgaaaaaaaaaaaaaaacctcagagcctccaaggaaatgcctttagaagcactcctctctcaaaattgccattttctctaccatgtcccccagacacagttgggttttgttgatttatggcagtcttctaaacaaagccatccttaattttacatactgtattgtaactatccaaagatagtattggcagtcataaatttataacttctggcctttgtttaattccagtaaaataacagcaatgacaatgagatcatcagtattattttcacatttccctgagaggacctggcacaatattttaaatttaattatttggcagtagtcactgtttttgacaaccaatgaaatagcgtctaaatatcttgtatattttttagcatcaaaatgttttggtttccactgctgacaggtgcttgttgtttagcctaatgtggatatttaaattgttaacataccaaacacacatggtaatagtttgggacaaaataactagtaaaatgttgatttctcggctatttcactgactgcggcatgtcctcgtgtcttctctgattttgtggtacatgaatgaatgcatttatctttttagtgacttactagttacgaacttgaattatcacctctttgtcatacttaagtatcatttacataaagtgtaaaagattttttcacttttgaatctttacctacttgctttcacattaagaatttgaacttttgagttttttccaggtctatatataatagattacatttattttgtagagaaaatagtaatttaaagttttgccattttaaggtgacaatatttgggacagtataaatattatagacaagggcccccttgctgtctgctttagcaggtaagtgacattaattgacttatagttttgtgtaaatgaacaaactgcttttggccaaggaaatttaattctgtccctagtttcctgccgtggtaaatcatagaaaggattccaagttcaatttgggttaaatgtgctaataggatgtagctttttaaattctgctattgagtcagctgtaccttttaatactttaaatgtgttatttgtatggccccttaataaaggtgtttgctggtaattccggttaaaagacttcgcctatgccatactggtgtataaaaactgccgcaattggacgccggtgtggtactcatttcagtatacctgaactgtacattttgtgcaatggctttatctaaaagaatgacgcttcgtgaaagcactttgtggccttttttggggggggagggtgagagagtaggagagaataccgatgttaagattaaaaaaaaa

SEQ ID NO: 157163 - DNA, 792 bp, Homo sapiens; identical to SEQ ID NO: 126056

SEQ ID NO: 157164 - DNA, 1054 bp, Homo sapiens
ttttttttttttttttttttttttttttgagacagagtctctctttgtcacctaggctggagtgcaggggcacaatctcggctcactgcaacctccgcctcctgggttcaatcaattcttctgcctcagcctcccaagtagctgggactacaggcgcatgccaccatgtccagccaattgtttttgtatttttaggggagacagggtttcaccatgttggccaggctggtctcaaactcctcacctcaagtgatccgcccgcctcggcctcccagagggttaggattacaggcatgagccaccaaatctggcccaaattgagtttaataaagagcttgagtgatgctcagattagggagtgagtattccaggaatgctaggtgcgtggagttggggagccagctgagctctgaatcagagagcagtgagacctaagggtccctgatctcaaagggtccctcctgtctcagggtgaggacctgaagggtgtgggtcccggggagggtgaggaggccattgtaggagatctactgagatggtatcgggatgccccaagcaccacgtagggggattacatctgggtttctgggaacgaagagctgagttaggggagagatcccgaaagatctcagtggggaaaggactaggggtgcagggtgtttcacagaaacaatcaaggggcctcgatttcacagtaaatcatcaagagggctccttggtgggtagaagaggggtatcacagcaccccaaatattggggcctgttcacccctctgcagccattctggggttttaatgtaaaaccccaatggcaggatattccacatacattatcatgggtttgcaacattagcatacgctggctgtcccgcaggacggtggggactggaaaatcagtccagggtctgggtttgagtcctaagaggacaggcctggcggcgccacacggctcctcttcaacagctgccggagctgtagacaaggcaaaggagggagagaagtctgtcaggttggaaggagaggtggggaaggcacgccatgcagagggaggggct

SEQ ID NO: 157165 - DNA, 429 bp, Homo sapiens
gagctgtgagaggttttctaccagccaggtcttatgttcccaggccctgtcttctggaaagcattactgggaagtggacactaggaattgcagccactgggcagttggggtggcttcctgggagatgagccgcgaccaggtcctgggaaggactatggactcttgttgtgtggaatggaaggggactagccagctctctgcatggcacatggtcaaggaaactgtccttggctcagacagacctggggtggtgggcatctggctgacccttgctgagggaaagctagcctgcgatacagaggacgatcaggatatgctactgtctggtgtaccacatctgtcgtcttaccttgggtcctgtattggcatgcacgtctaacatttgggagtataatcgttatatcttgtaagttaccaattacggtgggg

SEQ ID NO: 157166 - DNA, 423 bp, Homo sapiens
  misc_feature (1)...(423): n = a,t,c or g
nnnnnnnnnnnnnnnnnnnnnnnnnnnnnnnnnnnnnnnnnnnnnnnnnnnnnnnnnnnnnnnnnnnnnnnnnnnnnnnnnnnnnnnnnnnnnnnnnnnnnnnnnnnnnnnnnnngaaattttcggtgaacaggctgttctgcggggaagcccaggtgggcccaaagatccgggctcattccaatgccggttgcctgtgctacaaacatgggggggtcttaggcacgacgccctggaccatgcctatgggatgcctgggggcatctgcgtccatgcaagcgggtacattggcggtcaccgtacccgagagggagccttgagcatggcccgtgccaccttggcccagcgctcataccttccacaaatctgctagtctaataaaacctttcttctcagaaactgttaaactatagatagagtctg

SEQ ID NO: 157167 - DNA, 401 bp, Homo sapiens
  misc_feature (1)...(401): n = a,t,c or g
agagccaaggctaaaagacgaaacaccaccgtatcttgtcgaatgaggcacctaaaaattgtataccgcagattcaggtacagattgtatgtggggatcataattggtccagggggcttgaatgaaaccctagtgtttacttgtaaaaagataacagtaccctgatggttactggggacgagatgttggaagctttannnnnnnnnnnnnnnnnnnnnnnnnnnnnnnnnnnnnnnnnnnnnnnnnnnnnnnnnnnnnnnnnnnnnnnnnnnnnnnnnnnnnnnnnnnnnnnnnnnnnnnnnnnnnnnnnnnnnnnnnnnnnnnnnnnnnnnnnnnnnnnnnnnnnnnnnnnnnnnnnnnnnnnnnnnnnnnnnnnnnnnnnnnaagggatatcggtatgc

SEQ ID NO: 157168 - DNA, 417 bp, Homo sapiens
tgagaatcatgaagatgaggaaggttctgaaacaccatcagttacttggcgaggtcctcactcagctgtcctccaggttcaaacctcgagtccctgtgatcaaggtacaggactttacatagcagtcacattcctttcttaatttagaagataaaagatgtagcaaaaagtggattgattgctgtagcatgaaggaggagggagctggcttctttgtatgtagatttctataaaagaaagtcggcttcagtttaactgttgaaacacacatacaaagtgcacagatgatgaagtgccagcttgatgactttcacagtcaatacactgtgtgatcagcacccaggtaagaattgaaacatgcccggcatcccggaagcccaaccaccccagccagcacctgtgtcccatagaaaatcg

SEQ ID NO: 157169 - DNA, 2583 bp, Homo sapiens
gaagatcctttctgagctgctgtgaataaatttggaatggtactgtatatttccatctaatggagaactagctgtactttgaataaggattgctgcactggacgactttagaacatccctcacaatgtcgtcaacccggagccagaacccccacggcctgaagcagattggcctggaccagatctgggacgacctcagagccggcatccagcaggtgtacacacggcagagcatggccaagtccagatatatggagctctacactcatgtttataactactgtactagtgttcaccagtcaaaccaagcacgaggagctggagttcctccttctaagtcgaaaaaggggcagacacctggaggagctcagtttgttggcctggaattatataaacgacttaaggaatttttgaagaattacttgacaaatcttcttaaggatggagaagatttgatggatgagagtgtactgaaattctacactcaacaatgggaagattatcgattttcaagcaaagtgctgaatggaatttgtgcctacctcaatagacattgggttcgccgtgaatgtgacgaaggacgaaaaggaatatatgaaatctattcgcttgcattggtgacttggagagactgtctgttcaggccactgaataaacaggtaacaaatgctgttttaaagctgattgaaaaggaaaggaatggtgaaaccatcaatacaagattgattagtggagttgtacagtcttacgtggaattggggctgaatgaagatgatgcatttgcaaagggccctacgttaacagtgtataaagaatcctttgaatctcaatttttggctgacacagagagattttataccagagagagtactgaattcttgcagcagaacccagttactgaatatatgaaaaaggcagaggctcgtctgcttgaggaacaacgaagagttcaggtttaccttcatgaaagcacacaagatgaattagcaaggaaatgtgaacaagtcctcattgaaaaacacttggaaattttccacacagaatttcagaatttattggatgctgacaaaaatgaagatttgggacgcatgtataatcttgtatctagaatccaggatggcctaggagaattgaaaaaactgttggagacacacattcataatcagggtcttgcagccattgaaaagtgtggagaagctgctttaaatgaccccaaaatgtatgtacagacagtgcttgatgttcataaaaaatacaatgccctggtaatgtctgcattcaacaatgacgctggctttgtggctgctcttgataaggcttgtggtcgcttcataaacaacaacgcggttaccaagatggcccaatcatccagtaaatcccctgagttgctggctcgatactgtgactccttgttgaagaaaagttccaagaacccagaggaggcagaactagaagacacactcaatcaagtgatggttgtcttcaagtacatagaagacaaagacgtatttcagaagttctatgcgaagatgctcgccaagaggctcgtccaccagaacagtgcaagtgacgatgccgaagccagcatgatctccaagttaaagcaagcttgcgggttcgagtacacctctaaacttcagcgcatgtttcaagacattggcgtgagcaaagatctgaacgagcaattcaaaaagcacttgacaaactcagaacccctagacttggatttcagcattcaagtgctgagctccgggtcctggcccttccagcagtcttgtacatttgccttgccgtcagagttggaacgtagttatcagcgattcacagctttctacgccagccgccacagtggccgaaaattgacgtggttatatcagttgtctaaaggagaattggtaactaactgcttcaaaaacagatatactttgcaggcgtcgacattccagatggctatcctgcttcagtacaacacggaagatgcctacactgtgcagcagctgaccgacagcactcaaattaaaatggacattttggcgcaagttttacagattttattaaagtcgaagctattggtcttggaagatgaaaatgcaaatgttgatgaggtggaattgaagccagataccttaataaaattatatcttggttataaaaataagaaattaagggttaacatcaatgtgccaatgaaaaccgaacagaagcaggaacaagaaaccacacacaaaaacatcgaggaagaccgcaaactactgattcaggcggccatcgtgagaatcatgaagatgaggaaggttctgaaacaccagcagttacttggcgaggtcctcactcagctgtcctccaggttcaaacctcgagtccctgtgatcaagaaatgcattgacattctaattgagaaagaatatttggagcgagtggatggtgaaaaggacacctacagttacttggcttaacccttctggaagggtctgactgtgtgacccgcagcaaatagttcatgttggaaagaatgaaaacaacttcaagttcataggcagccagcctgccgccattggacctcccttttaaaaactgaggacca

SEQ ID NO: 157170 - DNA, 2869 bp, Homo sapiens
gaagatcctttctgagctgctgtgaataaatttggaatggtactgtatatttccatctaatggagaactagctgtactttgaataaggattgctgcactggacgactttagaacatccctcacaatgtcgtcaacccggagccagaacccccacggcctgaagcagattggcctggaccagatctgggacgacctcagagccggcatccagcaggtgtacacacggcagagcatggccaagtccagatatatggagctctacactcatgtttataactactgtactagtgttcaccagtttgttggcctggaattatataaacgacttaaggaatttttgaagaattacttgacaaatcttcttaaggatggagaagatttgatggatgagagtgtactgaaattctacactcaacaatgggaagattatcgattttcaagcaaagtgctgaatggaatttgtgcctacctcaatagacattgggttcgccgtgaatgtgacgaaggacgaaaaggaatatatgaaatctattcgcttgcattggtgacttggagagactgtctgttcaggccactgaataaacaggtaacaaatgctgttttaaagctgattgaaaaggaaaggaatggtgaaaccatcaatacaagattgattagtggagttgtacagtcttacgtggaattggggctgaatgaagatgatgcatttgcaaagggccctacgttaacagtgtataaagaatcctttgaatctcaatttttggctgacacagagagattttataccagagagagtactgaattcttgcagcagaacccagttactgaatatatgaaaaaggcagaggctcgtctgcttgaggaacaacgaagagttcaggtttaccttcatgaaagcacacaagatgaattagcaaggaaatgtgaacaagtcctcattgaaaaacacttggaaattttccacacagaatttcagaatttattggatgctgacaaaaatgaagatttgggacgcatgtataatcttgtatctagaatccaggatggcctaggagaattgaaaaaactgttggagacacacattcataatcagggtcttgcagccattgaaaagtgtggagaagctgctttaaatgaccccaaaatgtatgtacagacagtgcttgatgttcataaaaaatacaatgccctggtaatgtctgcattcaacaatgacgctggctttgtggctgctcttgataaggcttgtggtcgcttcataaacaacaacgcggttaccaagatggcccaatcatccagtaaatcccctgagttgctggctcgatactgtgactccttgttgaagaaaagttccaagaacccagaggaggcagaactagaagacacactcaatcaagtgatggttgtcttcaagtacatagaagacaaagacgtatttcagaagttctatgcgaagatgctcgccaagaggctcgtccaccagaacagtgcaagtgacgatgccgaagccagcatgatctccaagttaaagcaagcttgcgggttcgagtacacctctaaacttcagcgcatgtttcaagacattggcgtgagcaaagatctgaacgagcaattcaaaaagcacttgacaaactcagaacccctagacttggatttcagcattcaagtgctgagctccgggtcctggcccttccagcagtcttgtacatttgccttgccgtcagagttggaacgtagttatcagcgattcacagctttctacgccagccgccacagtggccgaaaattgacgtggttatatcagttgtctaaaggagaattggtaactaactgcttcaaaaacagatatactttgcaggcgtcgacattccagatggctatcctgcttcagtacaacacggaagatgcctacactgtgcagcagctgaccgacagcactcaaattaaaatggacattttggcgcaagttttacagattttattaaagtcgaagctattggtcttggaagatgaaaatgcaaatgttgatgaggtggaattgaagccagataccttaataaaattatatcttggttataaaaataagaaattaagggttaacatcaatgtgccaatgaaaaccgaacagaagcaggaacaagaaaccacacacaaaaacatcgaggaagaccgcaaactactgattcaggcggccatcgtgagaatcatgaagatgaggaaggttctgaaacaccagcagttacttggcgaggtcctcactcagctggtcctccaggttcaaacctcgagtccctgtgatcaagaaatgcattgacattctaattgagaaagaatatttgggagcgagtgggatggtgaaaaggacacctacagttacttggctttaaccctttctgggaagggtcttgacttgtgtgacccgcagcaaatagttcatgttgggaaagaatgaaaacaacttcaagtttcattaggcagccagccttgcccgccattgggaccttccctttttaaaaactggaggaccaagactcccatcagctggtcttcgggttttacatcggaactgctcaggattgatacatttcaagtctgtaaatacggacaccaacgccatttaccctaatttaagaacagcggggactgaccctccgtgccgagggctgcatgctaccgcactaagtcaatacatgggctccccgatttgcagctgtcgttttggcagcacttgtcacgttggcagccctttgagagcaagtttgagtggacccccatgtaacctgctatgaaaaccctttgtatagtgtgtttcattttttaatgtgtgaaaataaagcaaattaaaggaaaaaaaaaaaaaaaaaaaaaa

SEQ ID NO: 157171 - DNA, 3097 bp, Homo sapiens
  misc_feature (1)...(3097): n = a,t,c or g
cggagcataacacgcctctgacttctggatttgtgttccaggaatgggccttgacgaattattattcggtgaagcacatggatttgtgccttactgtggtggaccgggcaccgggctctcttataaagctgcagggctgccgagaaaatgacagcagacagaaatgggaacagatcgagggcaactccaagctgaggcacgtgggcagcaacctgtgcctggacagtcgcacggccaagagcgggggcctaagcgtggaggtgagtggcccggccctttcccagcagtggaagttcacgctcaacctgcagcagtaggagggtccgggaggccctgccgtcctgtctcctgcaccactgggtggagtctggtgatcacattattgattatgtttcttaaacttttccgcgaaactaatatacctcagtattccatcatggtctgaaagtcaaacttcggcaaggcacggacgactgtgcagacacagcagcggcaagaagcgagaactgccctccccctcctctcggtgcagcccagccggcgccccttccccaggccggagcgcccctcttccttccagctttcacttctgccggctccgcaactgagtgacacccagcgacaaccgactggggagtggtagaagcaactgaacggatgcgtgcgagctgaggacagggcgggaggagggggcacacatgccccaggggagcgaggagaactcttgaaatctccattttcaatcccttcgaaatcacgtatggttttccacaaagccgagttcgtgttcacgtgggcaggtttacgtcaatagtccctctctctgctcctccattcgcaagtgtcttcctgggccagactcccctccacctcatgtacttgctatattgaggatgaagttttctatggtgggacactaaatataaagctatatagagaaagaatgtacggtcagttccctatggtttctgtagatcatcgtcatcttgtgtattccccacaaagccgttcgcagcttccgggagaaggggccagagcccggtggggccagtttctcacagagggaggaggtggcctttgtcccctggagcccgatcagccagttggtgctactgctgtggccagctggggggcttcctccagaccaccggcctcggccccggcatccctgttgggcgtcagcctgagagtccctactgtgcgtcagaatccaccttgcgtgctgtgcgtatctgtgaacctggagcggttacttattttgacagatatcacctttgggtctttttacattaaatttcttttctctaaggaatataagacataccccatagctctgtgtgagccagcaatatccgctgccccctggcgacagggcagaccaatgatgccaggcagcttgtcacacgctagtattggcttcattgtgatctgagccctgcacgctggggccttcagaattaatggccagcagtgtcagggatgagcccgtcagccaagggcacaggcctgggctcacagtccttcacacctgctggcctnggggagctccaagccaggcaagcgaagtcctgccccgcccgcagctccctcccacaccccgcctggccaagatgactgcttcagggggctttngggggaaagaattaaggaaagggtcagaacccaaacaataccttgcttcatttacactgaggatttcagggcgggagacaggagccttggggtcctgttttaaaccacagacagttatgaactgaaagtcataacggggagaggtgcctggcttctacctggggtgctcaagaatgttcctcgtcacccctgccactctgtggtcggtgccctgcttcctcctccactcctggggcgccttcttccagcgccgcacacacagatgctcagtctcagagaggcttggcacggctgggcagtcttgagaaaagcgttcagtttagggcacacctgcaaggcccctcggtggggacagcggcggcccttggagtttagggagccacccttggagggtgtgccggtgccatgctcctccctgtgtcttgtatgaaaggggccactgtgtgtcttcntcccccggcgggagccccaacaatgtgtgcactgtaggaacagcggccccgaaggttggaagcctggctgggaagggcttgccctataaggtcttctcttcccgcctcccctgccatgcaaccagatgtgttgtgagtggggcagcgttgccccacgctggtagtaactccgcacgcttctgtctttcacggtgggcgctcggggggagcctgaggaaaacccccttaggtacctgtgcgaggctgtggagtgcaggccagagcagggtgtgcgtagcccccagcacccaggttcttctgtcagaccctgtgacctgcgagctgctactactgtaaggagggaaatggatgaatctggctcgttttaaaatcacgttttctgacgaatccttttgccccttcacctttaccccgcccgcacccctaaggccctcttcagccttcctaatcatcccacgtgttttacccagacccttggcggcggccccatgccctgggggccggcgtcctgtccccgagcctgggaggccggcttttggatggtccggggcgtcaaagagcaggggtgggcccggggaggggtccctttgcgggtgagctaatgtttaccatgacaccagtgtgcccaaagtgacttaactgcgggttgcggttagtttcctagtcatccagggacctatcctcacccctccccactccctgtttttaaaacctcagaattcctttccctaagagcccattcgagcaaaagcgtgccgaaggttagttgtcttctctgtgctggtcctttccttatgtcctcataaaagtctcagatgatggtatctgtgagtatgttttgcaaattcaaaatatagtttggtaattttttttttccagttgatttttaaaaagaaactgctgtacagagcttgtactttgtcccattttatagatggaaaccatccttgaaaattgtttaacttaaataaaagagaagatactttctaaaaaaaaaaaaaaaaaaaatgtcg

SEQ ID NO: 157172 - DNA, 488 bp, Homo sapiens
  misc_feature (1)...(488): n = a,t,c or g
agtgtgcnccctttgaccgcctgcagtagttccgcacgaggacaggcgattctcccctcattttctggactgggcagcctttggggtcatgacccttccctccatcggcatccccctgctattgtggtactccagcaagaggaaatatgacactcccaaaacgaagaagaactgattggggcttccacagccctcctctcccaagaaatccaggctcctctcccaagaaatccaggtgctttccagactccaaagggtatcttaaatgcaatctcttctctcttagcccttggccactttctcctggaagatgaaatgaaagctatgggactcttggaggatacccagtgtctattctgggttagagaagtgcttactaaggggttttctaataaaaacaaatgccacattgnnnnnnnnnnnnnnnnnnnnnnnnnnnnnnnnnnnnnnnnnnnnnnnnnnnnnnnnnnnnnnnnnnnnnnnnnnnn

SEQ ID NO: 157173 - DNA, 1288 bp, Homo sapiens
  misc_feature (1)...(1288): n = a,t,c or g
ggctctcttcctgtctttgtggctccggaaaggcgtttgggatgccaacgatgaggctgctgtcatttgtggtgttggctctatttgctgtcactcaagcagaggaaggagccaggcttttggtttccaaatcactgctgaacagatacgccgtggagggacgagacctgaccttgcagtacaacatctacaatgttggctcaagtgctgcattagacgtggaactatctgatgattccttccctccagaagactttggcattgtgtctggaatgctcaatgtcaaatgggaccggattgcccctgctagcaatgtctcccacactgtggtcctgcgccctctcaagggctggttatttcaacttcacctcggcaacaattacttacctggcccaggaggatgggcccgttgtgattggctctaccagtgcacctggacagggagggatgctggtgcgagcgggagtttgacaggcgattctccccctcatttttctggactgggcagcctttgggggtcatgaccccttccctccatcgggcatccccctgctaattgtggtactccagcaagaggaaaatatgacactcccaaaacgaagaagaacttgatttggggcttccacaagccctcctctcccaagaaatccaaggctcctctccccaagaaaccccaggtgctttcccagactccaaaagggtatccttaaaatgcaaatctcttcttctcttaagcccttggcccactttcctccctggatccctgcccctgcttctcagcccataagttgaaggaccccagcccctaggaagtcttgcgganagccctccttggttccccatccgtgaaagcccataaaacagggaatgccttttggaaattagcctttgaggcctaggaggggccctcttgatggccccattgagggtgctttttggtttattgctggcaacatgaattctctcaggggttttagaaggggcattttggaagactgccttgacaccaacccctatcccctgcctccccctctcagaagaggggtgggaaagatgaaaatgaaaaggctaatggggactctttggaggatacccaggttgtccattcctggggttagagaaagtgcttacctaaggggttttcctaataaaaacaaatgccacataattgtnanannannanntacctnnnnnnnnnnnnnggggggggcccgggcccccattcccccttatgggggggggtttaaaaatcccgggcccgggttttaacaacggggggattgggaaa

SEQ ID NO: 157174 - DNA, 471 bp, Homo sapiens; identical to SEQ ID NO: 126330
  misc_feature (1)...(471): n = a,t,c or g

SEQ ID NO: 157175 - DNA, 1393 bp, Homo sapiens
atggcagagaacgatgtggacaatgagctcttggactatgaagatgatgaggtggagacagcagctgggggagatggggctgaggcccctgccaagaaggatgtcaagggctcctatgtctccatccacagctctggctttcgtgacttcctgctcaagccagagttgctccgggccattgtcgactgtggctttgagcatccgtcagaagtccagcatgagtgcatccctcaggccattctgggaatggatgtcctgtgccaggccaagtcgggcatgggaaagacagcagtgtttgtcttggccacactgcaacagctggagccagttactgggcaggtgtctgtactggtgatgtgtcacactcgggagttggcttttcagatcagcaaggaatatgagcgcttctctaaatacatgcccaatgtcaaggttgctgttttttttggtggtctgtctatcaagaaggatgaagaggtgctgaagaagaactgcccgcatatcgtcgtggggactccaggccgtatcctagccctggctcgaaataagagcctcaacctcaaacacattaaacactttattttggatgaatgtgataagatgcttgaacagctcgacatgcgtcgggatgtccaggaaatttttcgcatgaccccccacgagaagcaggtcatgatgttcagtgctaccttgagcaaagagatccgtccagtctgccgcaagttcatgcaagatccaatggagatcttcgtggatgatgagacgaagttgacgctgcatgggttgcagcagtactacgtgaaactgaaggacaacgagaagaaccggaagctctttgaccttctggatgtccttgagttcaaccaggtggtgatctttgtgaagtctgtgcagcggtgcattgccttggcccagctactagtggagcagaacttcccagccattgccatccaccgtgggatgccccaggaggagaggctttctcggtatcagcaagtttaaagatttttcaacgacgaattcttgtggctaccaaccctatttggccgaggcatggacatcgagcgggtgaacattgcttttaattatgacatgccctgaggattctgacaccctaccctgcatcgggtggccagagcaaggccggtttggcaccaagggcttggctatcacatttgtgtccgatgagaatgatgccaagatcctcaatgatgtgcaaggatcgctttgaggtcaatattagtgagctgcctgatgagataggacatctccttcctacattggaacaggacacggtagaagactcgcccattttgggaatgttgaccgtctgttcctttcagggaggagggacaccagggtgggggtgaaggagacactactggcccccacc

SEQ ID NO: 157176 - DNA, 463 bp, Homo sapiens
agcaggttcagagttgggagagggagaagaggaagtgggcctctcatacttaatgaaagaacaaattcagaagaaggaggtcttcgaggggagaagaggaaacgagatgctgaaaacgatggagaggaagaagatgaatagatcattctaagaccagattctctaatgtttctgggtgtgcaatagagtgatcacatctttgtttcttcatgtacgatagctatccctacagaagataatgtgtaactttttataggaaaagtgtggttttactatttttgccttatcattccgaataagaactagtctgttaatgatcatattgtatgtagagaaaaattttcattgactcccattgtggaattccctagcaatttatttagacttaattttttaaattcaagcttactgtattagtcatttttagcccataattaaaacatgatcccttttaaaaaaaaaa

SEQ ID NO: 157177 - DNA, 652 bp, Homo sapiens
tctcatacttaatgaaagaagaaattcaggatgaagaagatgatgatgactatgttgaagaaggggaagaagaggaagaagaggaagaaggaggtcttcgaggggagaagaggaaacgagatgctgtgaaagaagaaattcaggatgaagaagatgatgatgactatgttgaagaaggggaagaagaggaagaagatgaagaaggaggtcttcgaggggagaagaggaaacgagatgctgaagacgatggagaggaagaagatgactagatcattctaagaccagattctctaatgtttctgggtgtgcaatagagtgatcacatctttgtttcttcatgtacgatagctatccctacagaagataatgtgtaactttttataggaaaaagtgtggttttactatttttgccttatcattccaaataagaactagtctgttaatgatcatattgtatgtagagaaaaattttcattgactcccattgtggaattccctagcaatttatttagacttaattttttaaattcaagcttactgtattagtcatttttagcccataattaaaacatgatcacttttacacaggtgtagtatggtgcatttcattccttatttataaattaactgaaattacagtttgctataatat

SEQ ID NO: 157178 - DNA, 494 bp, Homo sapiens
cttcatttttcatcacatgaaaggtcaattttttaaaaaagtactcttggtacagaatattttcaaagcctttgtctgaacaagagaagaagttgcaaaattctgagcaagcaccaggaaaaatcatctttgatcagttggttgtaacctacaacatgctacagaagggcccagacgaaaaccggggagccttaggccctgggggtgatcagcccaggaacaccccagtccctagcagacccggctccctagaactttccagcccaataaagcttatggtcgccccccgcaaaaaaggataacctaaataagttatttcagtggttattctttactaagaaatgcatatattctctcaaaaatgtgatacttgggttagtcaggtattttccatatagaaaccacactctccgttcctcaaagtgttgtccttgcacttttaactttttaaacttattaacaaatttttatattaaaatatttaattgtggctg

SEQ ID NO: 157179 - DNA, 860 bp, Homo sapiens
taaagacacagggtctcactgtatcccagtgaaggagtgcagtggcacaaacccatagctcactataaccttgagctccctgggagctcaagtgatccttctgactcagcctccccagcagctagaaatagaggagcatacagttatgccctggataattaagaaatttttttttttttttggtagagatggagtcttgatgttgtccatgctggtcttcaactcctggactcaagtgatgctcctgcctcagcctccccaagtgctaggattaagggttgagctagatgacacttttttaaaagtgtcttcactggttctcttttgtctaaagcagggctacaagaaaagaatctggaatccttaatcaaatacatttctggccaagtgtgggttttatcagtccctgatggttaataatgagatagttgaactaacttaagaaactttggaatacctttgttgtagagatttggggaaaaatcttacttgctctgactagtgatcttgaagtaaagcctttaacaaagaaagctagtaacaatgataaggccatcaaaatttgttttttattatcaaataattctataaacttacaaaatccataaattcctagcaacacatttttaacaaagataaaaataagaaaaaaatgtcagttaaaaaataaataaaacatacctagaaatggaatccgtctggaaagaaagagaaaaacataggcatactaaatttttatgctttcattaaactattaacctatgattataagtaaatttaatgtagtatcaatagaagcaaacgaatgaacacctaaggttctttatgcataacagtatatacatattttgtttaaaatt

SEQ ID NO: 157180 - DNA, 378 bp, Homo sapiens
agaagatgcatgccagagacttcacagtttctgctctggctcgcgggattgatgtgcaacaagtgtctttggttataaattatgatctacctaccaatcgtgaaaactatattcacagaattggcagagggggtcgatttgggaggaaaggtgtggctataaactttgttactgaagaagacaagaggattcttcgtgacattgagactttctacaatactacagtggaggagatgcccatgaatgtggctgaccttatttaattcctgggatgagagttttggatgcagtgctcgctgttgctgaataggcgatcacaacgtgcattgtgcttctttctttgggaatatttgaatcttgtctcaatgctcataacgg

SEQ ID NO: 157181 - DNA, 300 bp, Homo sapiens
ttacatcatcttactgaacactactgactttactgaatctattccgtgatttgatgttaccttccatacaaatcacagtagaaaaacgtatgaatgtttttcaatacagccaagatgctggcttctcacctgtgaatatagttttcacgattggtaggtagyttaccaaagacacttgtgcacatcaatcccgcgagcctgaaacacaatggcatgttttaaaaattgattcaaaaaaacttgacacctgtcatgtaggccacaaaatagtagcgaactatactaagtggtatagcccac

SEQ ID NO: 157182 - DNA, 1769 bp, Homo sapiens
ggggctttttcagtcgggcgctgagtggtttttcggatcatgtctggtggctccgcggattataacagagaacatggcggcccagagggaatggaccccgatggtgtcatcgagagcaactggaatgagattgttgataactttgatgatatgaatttaaaggagtctctccttcgtggcatctatgcttacggttttgagaagccttccgctattcagcagagagctattattccctgtattaaagatccaaaaggtaattctggcacttggagactatatgggagccacttgtcatgcctgcatttgtggaacaaatgttcgaaatgaaatgcaaaaactgcaggctgaagcaccacatattgttgttggtacacccgggagagtgtttgatatgttaaacagaagatacctttctccaaaatggatcaaaatgtttgttttggatgaagcagatgaaatgttgagccgtggttttaaggatcaaatctatgagattttccaaaaactaaacacaagtattcaggttgtgttgctttctgccacaatgccaactgatgtgttggaagtgaccaaaaaattcatgagagatccaattcgaattctggtgaaaaaggaagaattgacccttgaaggaatcaaacagttttatattaatgttgagagagaggaatggaagttggatacactttgtgacttgtacgagacactgaccattacacaggctgttatttttctcaatacgaggcgcaaggtggactggctgactgagaagatgcatgccagagacttcacagtttctgctctgcatggtgacatggaccagaaggagagagatgttatcatgagggaattccggtcagggtcaagtcgtgttctgatcactactgacttgttggctcgcgggattgatgtgcaacaagtgtctttggttataaattatgatctacctaccaatcgtgaaaactatattcacagaattggcagagggggtcgatttgggaggaaaggtgtggctataaactttgttactgaagaagacaagaggattcttcgtgacattgagactttctacaatactacagtggaggagatgcccatgaatgtggctgaccttatttaattcctgggatgagagttttggatgcagtgctcgctgttgctgaataggcgatcacaacgtgcattgtgcttctttctttgggaatatttgaatcttgtctcaatgctcataacggatcagaaatacagattttgatagcaaagcgacgttagtcgtgagctcttgtgaggaaagtcattggctttatcctctttagagttagactgttggggtgggtataaaagatggggtctgtaaaacctttctttcttagaaatttatttcctagttctgtagaaatggttgtattagatgttctctatcatttaataatatacttgtggactaaaagatataagtgctgtataaaatcagccaattatgttaaactagcatatctgcctttattgtgtttgtcattagcctgagtagaaaggcctttaaaatttttttagaaagcatttgaatgcattttgtttggtattgtatttattcaataaagtatttaattagtgctaagtgtgaactggaccctgttgctaagccccagcaagcaatcctaggtagggtttaatccccagtaaaattgccatattgcacatgtcttaatgaagtttgaatgttaaataaattgtatattcacttgaaaaaaaaaaaaaaaaaaaac

SEQ ID NO: 157183 - DNA, 894 bp, Homo sapiens
atggaccccgatggtgtcatcgagagcaactggaatgagattgttgataactttgatgatatgaatttaaaggagtctctccttcgtggcatctatgcttacggttttgagaagccttccgctattcagcagagagctattattccctgtattaaagggtatgatgtgattgctcaagctcagtcaggtactggcaagacagccacatttgctatttccatcctgcaacagttggagattgagttcaaggagacccaagcactagtattggcccccaccagagaactggctcaacaggttgtgttgctttctgccacaatgccaactgatgtgttggaagtgaccaaaaaattcatgagagatccaattcgaattctggtgaaaaaggaagaattgacccttgaaggaatcaaacagttttatattaatgttgagagagaggaatggaagttggatacactttgtgacttgtacgagacactgaccattacacaggctgttatttttctcaatacgaggcgcaaggtggactggctgactgagaagatgcatgccagagacttcacagtttctgctctgcatggtgacatggaccagaaggagagagatgttatcatgagggaattccggtcagggtcaagtcgtgttctgatcactactgacttgttggctcgcgggattgatgtgcaacaagtgtctttggttataaattatgatctacctaccaatcgtgaaaactatattcacagaattggcagagggggtcgatttgggaggaaaggtgtggctataaactttgttactgaagaagacaagaggattcttcgtgacattgagactttctacaatactacagtggaggagatgcccatgaatgtggctgaccttatttaa

SEQ ID NO: 157184 - DNA, 1273 bp, Homo sapiens
  misc_feature (1)...(1273): n = a,t,c or g
gctgatcactactgacttgttggctcgcgggattgatgtgcaacaagtgtctttggttataaattatgatctacctaccaatcgtgaaaactatattcacaggtgagaagccagcatcttggctgtattgaaaaaaattcataccgtttttctactgtgatttgtatgaaaggtaacatcaaatcaaggaatagattcagtaaagtcagtagtgttcagtaagatgatgtaattaaatttgtactagggaaggttgatgagaacanaccaaggtgggaaaacttgtaaacatttgcccagattgtggacataggggttttttccacaattgttggtcgtaccttatgcttgagctttaagtgatggtccttggtgtccatgtggtttttcttggtgaatttttttcctataagttggggaatttccttgggtgtcgcctggtaagcaatttgagtgaaccccgggtttagttataggtgggctttaatcccctaaattaaattggaattgtaaccttgtttatatggatgttaaaaaaaaggactttttaaaaaatacaggagtcgatagcagcagttggtgacgagatggcactcagaaacggcgttgacgtaatttaggacgtggaatcataagccgaaacagcacactgtttgaataaagagcgagtccggtatttatatttgtttttcttttgtcatgattatttgatttttaagttgctccagctaaggcatttttttgtattagtatttctattagggaacctttcttattaggtggtttgtattgtctggtttctaacatgcaggtagctgtttgggcagttaaacacgtttaggagtaatttgagttacaacgtgtggaaactggaggcaaaaaagcagtgataagtttgggttaccataccaaatatttgttttcccactggaaaaaagtaagttttagaaaatagttaacctttgcagcatttgtttacagtttacagttccagaagtgcgtcgaaatggattacataactgctcttttattcctgggtgttcacatctggcccaggctgacaccctgctccttgggctgggcccacttttgggtatgggcctttaaatttcactaccccaaacacgatactgtcatctgctttataataatgctcaagatgcctgataaaaatctcatttttgcagccagaccaagcccttgaatccctttgggcactaactggcaaagggaagatttttttcctccnagatatgcattaagcagctagtgc

SEQ ID NO: 157185 - DNA, 1933 bp, Homo sapiens
gtggtttttcggatcatgtctggtggctccgcggattataacagagaacatggcggcccagagggaatggaccccgatggtgtcatcgagagcaactggaatgagattgttgataactttgatgatatgaatttaaaggagtctctccttcgtggcatctatgcttacggttttgagaagccttccgctattcagcagagagctattattccctgtattaaagggtatgatgtgattgctcaagctcagtcaggtactggcaagacagccacatttgctatttccatcctgcaacagttggagattgagttcaaggagacccaagcactagtattggcccccaccagagaactggctcaacagatccaaaaggtaattctggcacttggagactatatgggagccacttgtcatgcctgcattggtggaacaaatgttcgaaatgaaatgcaaaaactgcaggctgaagcaccacatattgttgttggtacacccgggagagtgtttgatatgttaaacagaagatacctttctccaaaatggatcaaaatgtttgttttggatgaagcagatgaaatgttgagccgtggttttaaggatgcaaatctatgagattttccaaaaactaaacacaagtattcaggttgtgtttgcttctgccacaatgccaactgatgtgttggaagtgaccaaaaaattcatgagagatccaattcgaattctggtgaaaaaggaagaattgacccttgaaggaatcaaacagttttatattaatgttgagagagaggaatggaagttggatacacctttgtgacgttgtacgagacacctgaccattacacaggctgttatttttctcaataccgaggcgcaaggtggacctggcctgacctgagaagatgcatgccagagacttcacagtttctgctctggtttattaatttgcagcatggtgacatgggaccagaaggagaagagatgttatcatgagggaattccggtcaagggtcaaagtccgtgttctgatcactactgacttgttgggctcgcggggattgatgtgcaacaacgtgtctttggttataaatttatggatctacctaccaatccgtgaaaacctatattcacagaattggcagaggggggtcgaatttgggaggaaaaggtgtggctataaacttttgttacttgaagaagacaagaggattcctccgtgacattgagacctttctaccaatactacagtggaggagaatgcccatgaaatgtgggctgaccttattttaattcctggggatgagagttttggatgcagtgctccgctgttgctggaataggcgatcacaacgtgcattgtgcttctttctttgggaatatttgaatcttgtctcaatgctcataacgggtccagaaatacagattttgatagcaaagcgacgttagtcgtgagctcttgtgaggaaagtcattggctttatcctctttagagttagactgttggggtgggtataaaagatggggtctgtaaaatctttctttcttagaaatttatttcctagttctgtagaaatggttgtattagatgttctctatcatttaataatatacttgtggactaaaagatataagtgctgtataaaatcagccaattatgttaaactagcatatctgcctttattgtgtttgtcattagcctgagtagaaaggcctttaaaatttttttagaaagcatttgaatgcattttgtttggtattgtatttattcaataaagtatttaattagtgctaagtgtgaactggaccctgttgctaagccccagcaagcaatcctaggtagggtttaatccccagtaaaattgccatattgcacatgtcttaatgaagtttgaatgttaaataaattgtatattcactttaaaaaaaaaaaaaaaaa

SEQ ID NO: 157186 - DNA, 752 bp, Homo sapiens
actcccaaaagagcgcccaagaagaaaatggccataagtggagtccctgtgctaggatttttcatcatagctgtgctgatgagcgctcaggaatcatgggctatcaaagaagaacatgtgatcatccaggccgagttctatctgaatcctgaccaatcaggcgagtttatgtttgactttgatggtgatgagattttccatgtggatatggcaaagaaggagacggtctggcggcttgaagaatttggacgatttgccagctttgaggctcaaggtgcattggccaacatagctgtggacaaagccaacttggaaatcatgacaaagcgctccaactatactccgatcaccaatgacaagttcaccccaccagtggtcaatgtcacgtggcttcgaaatggaaaacctgtcaccacaggagtgtcagagacagtcttcctgcccagggaagaccaccttttccgcaagttccactatctccccttcctgccctcaactgaggacgtttacgactgcagggtggagcactggggcttggatgagcctcttctcaagcactgggagtttgatgctccaagccctctcccagagactacagagaacgtggtgtgtgccctgggcctgactgtgggtctggtgggcatcattattgggaccatcttcatcatcaagggattgcgcaaaagcaatgcagcagaacgcagggggcctctgtaaggcacatggaggtgatggtgtttcttagagagaag

SEQ ID NO: 157187 - DNA, 1254 bp, Homo sapiens
attcttgtctgttctgcctcactcccgagctctactgactcccaaaagagcgcccaagaagaaaatggccataagtggagtccctgtgctaggatttttcatcatagctgtgctgatgagcgctcaggaatcatgggctatcaaagaagaacatgtgatcatccaggccgagttctatctgaatcctgaccaatcaggcgagtttatgtttgactttgatggtgatgagattttccatgtggatatggcaaagaaggagacggtctggcggcttgaagaatttggacgatttgccagctttgaggctcaaggtgcattggccaacatagctgtggacaaagccaacctggaaatcatgacaaagcgctccaactatactccgatcaccaatgtacctccagaggtaactgtgctcacgaacagccctgtggaactgagagagcccaacgtcctcatctgtttcatcgacaagttcaccccaccagtggtcaatgtcacgtggcttcgaaatggaaaacctgtcaccacagggggtttcagagacatgttttcctgccaagggaaaacacccttttccgcaattccattattttccccttcctgcctccaactgaggacgtttacgacttcagggtggagccactggggcttggatgagcctcttctcaagcactgggagtttgatgctccaagccctctcccaaaggactacagagaacgtggtgtggtgccctgggcctgactgtgggtctggtgggcatcattattgggaccatcttcatcatcaaggggattgcgcaaaagcaatgcagcagaacgcagggggcctctgtaaggcacatggaggtgatggtgtttcttagagagaagatcactgaagaaacttccgctttaatggctttacaaagctggcaatattacaatccttgacctcagtgaaagcagtcatcttcagcattttccagccctatagccaccccaagtgtggatatgcctcttcgattgctccgtactctaacatctagctgggcttcccggttaattcccttttcctggatctattttcctctatttcctatccttttattatccccatgcaatgcctctggaataaaacatacaggagtctgtctttgctatggaatgccccatggggcatctcttgtggacttattgtttaaggtttcctccaactgtgatttttctgaacccaataaactatttttatgatcttgggtggaaaaaaaaaaaaaa

SEQ ID NO: 157188 - DNA, 3063 bp, Homo sapiens
atggacataaacagcatcgtgctgctacgtatattgatcctccagaaggtggagaatggagacctgagcaacaagattctgaagatcactgattttggcctggctcgggaatggcaccgaaccaccaagatgagtgcggcagggacgtatgcttggatggcacccgaagtcatccgggcctccatgttttccaaaggcagtgatgtgtggagcattctgcctacttgggcagtagttctcacattccttttagctgtagaacccctgaagtgggatagaatgcagacaaacaaagaaacaagccaggatggaggtgggcatttattccaagagcaagcaatggaggataacagtggctttgacctaggaatctggttggcaatgctgagagttcctggaggtcacttggtagaagctccccagcatgaccactacctggataagtcacatgaaagctatggggtgctactttgggagttgctgactggtgaggtgccctttcgaggcattgatggcttagcagtcgcttatggagtggccatgaacaaactcgcccttcctattccttctacgtgcccagaaccttttgccaaactcatggaagactgctggaatcctgatccccactcacgaccatctttcacgaatatcctggaccagctaaccaccatagaggagtctggtttctttgaaatgcccaaggactccttccactgcctgcaggacaactggaaacacgagattcaggagatgtttgaccaactcagggccaaagaaaaggaacttcgcacctgggaggaggagctgacgcgggctgcactgcagcagaagaaccaggaggaactgctgcggcgtcgggagcaggagctggccgagcgggagattgacatcctggaacgggagctcaacatcatcatccaccagctgtgccaggagaagccccgggtgaagaaacgcaagggcaagttcaggaagagccggctgaagctcaaggatggcaaccgcatcagcctcccttctgatttccagcacaagttcacggtgcaggcctcccctaccatggataaaaggaagagtcttatcaacagccgctccagtcctcctgcaagccccaccatcattcctcgccttcgagccatccagttgacaccaggtgaaagcagcaaaacctggggcaggagctcagtcgtcccaaaggaggaaggggaggaggaggagaagagggccccaaagaagaagggacggacgtgggggccagggacgcttggtcagaaggagcttgcctcgggagatgaaggcctcaagtccctggtagatggatataagcagtggtcgtccagtgcccccaacctggtgaagggcccaaggagtagcccggccctgccagggttcaccagccttatggagatggccttgctggcagccagttgggtggtgcccatcgacattgaagaggatgaggacagtgaaggcccagggagtggagagagtcgcctacagcattcacccagccagtcctacctctgtatcccattccctcgtggagaggatggcgatggcccctccagtgatggaatccatgaggagcccaccccagtcaactcggccacgagtacccctcagctgacgccaaccaacagcctcaagcggggcggtgcccaccaccgccgctgcgaggtggctctgctcggctgtggggctgttctggcagccacaggcctagggtttgacttgctggaagctggcaagtgccagctgcttcccctggaggagcctgagccaccagcccgggaggagaagaaaagacgggagggtctttttcagaggtccagccgtcctcgtcggagcaccagccccccatcccgaaagcttttcaagaaggaggagcccatgctgttgctaggagacccctctgcctccctgacgctgctctccctctcctccatctccgagtgcaactccacacgctccctgctgcgctccgacagcgatgaaattgtcgtgtatgagatgccagtcagcccagtcgaggcccctcccctgagtccatgtacccacaaccccctggtcaatgtccgagtagagcgcttcaaacgagatcctaaccaatctctgactcccacccatgtcaccctcaccaccccctcgcagcccagcagtcaccggcggactccttctgatggggcccttaagccagagactctcctagccagcaggagcccctccagcaatgggttgagccccagtcctggagcaggaatgttgaaaacccccagtcccagccgagacccaggtgaattcccccgtctccctgaccccaatgtggtcttccccccaaccccaaggcgctggaacactcagcaggactctaccttggagagacccaagactctggagtttctgcctcggccgcgtccttctgccaaccggcaacggctggacccttggtggtttgtgtcccccagccatgcccgcagcacctccccagccaacagctccagcacagagacgcccagcaacctggactcctgctttgctagcagtagcagcactgtagaggagcggcctggacttccagccctgctcccgttccaggcagggccgctgcccccgactgagcggacgctcctggacctggatgcagaggggcagagtgttccagaggccactggcttcaaggttgtcccctgccctaagcagtataacgaggtgattccagaagccctgcttatggaagtggagagttggtgctggaatggtgagcacctgcagactgctagcagaatccaacccttgctcaatgccattgtagcggcgtcatttgtctggggtaatatgcgagctttgttgtctcacaccagggaaatcaaggacgcagatgcacaagaagaaaggtccctgggcaaagcctgtgaccacagccacacctgtgagtataaggcctgccacaagctcaaatcccacagccagggatggcagatccaggttcacacttcctcagggaataattactcggagtccttcctgacgcacaaagaccaagggaagaccctggcagtttga

SEQ ID NO: 157189 - DNA, 691 bp, Homo sapiens
ctgtataagcaccagcacaggctccgacaacatgcaggtgaggaaggggacagaagggcctaagatcccaccatggagagagagggaggagaggggaggggggcttgtagcatcagcttatcagaaggaccccctggtgcaccagaagattgtagtcctgggtgaacaagagctgccctcgggggttagcagcctgttgcttctgttgacttggctttctgccctgcagccagtgaaacctgacagcttcctcacctataaaattgaaacagtaatagtacccacattggagtattctgaggattatatcagtaatacatgtaaaacaatgagaccagcatctgtacaaggtaagcactcaacaaatattggccatgatggtgatgatgatgatgaagatgatgatgaagagatgatgattgcctctgcctgcctgctccaggctgagctggtaaactatgaacgagtcaaggaatattgcctcaaagtcttgaagaaggaaggggagaacttcaaggccctttaccggtctggtgtggccttctaccaccttggggactatgacaaagcactctactacctgaaagaagcaaggacccaacaaccaacagacaccaacgtgattcggtatatccagctgacggagatgaaactcagccgatgctcccagagagaaaaagaagccatgtaa

SEQ ID NO: 157190 - DNA, 5291 bp, Homo sapiens
  misc_feature (1)...(5291): n = a,t,c or g
ctcggggccacggtccccccgcagcgctagtcccgggcccgcgagcaccggcccccgccacccgcaggttgcggagggaggagggcgggagcgggcggcgcggagccgggaggcgggggaggggccggcgtccgaggcggcggcggcggcggctggagcagcctctggcagcagcggggagaatgggagtgcggggcgccagaccgccgcggggtgtcacggccgccacgaagcctgcgaggcgcggggccggcgcccgcggcttttaaacccgggaaggcgcggcggcggcggcggcggcgggcagatcgcggcgcgcaccaggcgccggggcggcggccgaatggagagaaagggctcggcggccggggccaaggggaacccgagcccgcccgcggccggagaggggcagcggccaccgccgccgctgtgcgtcccgggcggcggcggaggagccccagcgaggggccaggtcggggcggcggccgagccggccgagctcatccgacgagcgcacgagttcaaaagccaaggggcgcagtgctacaaggacaagaaattccgtgaagccataggcaaataccaccgggcgttgctggagctgaaggggctgctgccgccccccggggaacgggagcgggactcgcgcgcggcctccccggctggggccctgaagcccggccgcctctcggaggagcagagcaagacggtggaagccatcgagatcgactgttacaacagcctggcagcctgcctgctccaggctgagctggtaaactatgaacgagtcaaggaatattgcctcaaagtcttgaagaaggaaggggagaacttcaaggccctttaccggtctggtgtggccttctaccaccttggggactatgacaaagcactctactacctgaaagaagcaaggacccaacaaccaacagacaccaacgtgattcggtatatccagctgacggagatgaaactcagccgatgctcccagagagaaaaagaagccatgtaaccaggaagcagctccagagctgcgcccacgcctgaccggggacttccaggcatcccctggcagagagccccgtcctggattctgtccctttctccccacttcttctggctcctcatttttcctcctgttgcaccccagctctttgtctcctcccagtacgaaaaggagagatgcaaatttggaatctggtaggtcgcccagacaatggagacatcctctcctcttagcaggtcagcgactgagaggggcctgacttctgctggggacagctgggagagggagtctcatgggcttggggatgctgtttgttggcttttgatttttggccagttgtttcttgacagagggcggctggggccaaagttttaaccattcccacaggcagcaggcaccacagcccatgggctggatccttccacatttttncttgacagaccagaaccagagcatctcgaggcaactgttagaaatccagggacgagacaaacagagaagcgctggtgaagccaacatagagactgtccaatgtgtaacactggagttcccacccccaccccccacccgtcacttagcccctgcctccttcccccactcgttgtcttggcttgtgctttctcctctccccatcggggatccgagactctgccaggattcacatgccactgaagcccactcagtgccctctggtgaccacacataccattccccctggactcccaccgagcaggcagctgtgcaccccagaagggcaggatgaagtgggccaaggtttgggacaggttgactgtgtaggtgacagggagggaaagatgatggccaggggaaagagcatcgtataggctaggggattgaactgtggactgattcagtgtaaataaaaataaattaacaggtagtagttcctgtcagttctgttggaagcagcccactccctcacttttactccttcctccaaccctcaatcagagctacttacaagccaggccaggatggggctttccccaaagcaattgcccgtttgtccagtggcagacaatggtggctacagcctttgtgcttttaagagtgggctgggattgtggagactgcccaggggctttggctttgtcagaacttgtacaatcttcttttgatgaaattatctgaactcaacatctagcacatagaatgtgttcaacaaatgcttgttgaatgaataaattatgactgcagactggctctcctgccttaaactaatttccatcccccagccctagtctccctgatggcctgtgccccgttatgcctatgcccatgttgcttcagtcaaacaagaaacaccttacctgagggccatatggtttgccccatcattgtgcaatatgcctgtgggacatgggatgtcgtctcagtcttcaaggaaatggaagggttaagaaatgcatatgagattattaccaatgacccccgttaatttatatgatgctttaaaattatcagagcactttcatgtatttttcgtgtgactagtgaaaaagacaatgttgtacaaaattaaaatatatacagatgcaataatgtgaatagttaggatttattaaatgcattatcttcagatctttacatgtataatctcatttctttcatgcagttactctgggatactgttcccatttgatgggtaagaatattgaaaaccagaaaaattaattatcccaaggttgcatggcctttagtggcatagctaggatttgaaccaggcctgcctgactccagagctctggctagtatctatgctatacttagttgcctctctataagtataatattgggcaattataaccatttgagaacaggacaatatgtattaacctgaaaagtgttcatgatgtcagtgatagtacatggcctccttatgtatttactcaagggccccaaaagaccagaggccagaatccctagtagtcagagcagtgacaggtcagaaaaaggcagctgaggtccaatagttatgtctgtgtattgctcattctacttactgatggagccagcatgtatctcaacaactcacctagcattcatcacccatccccagcattgggaaagggtcacaattaagaccgaaaggaaacacaaagttaaatatgggttaattatgtaagcagatgccccaccacggcaggatccaatcacagccgaggggcccagaagagagcagcgtaagttatattcacatagttccccaaaggctttcaacgggggctacaggaaggtgctagaaatattgaggggcctgccattactcacctagagctcactctctggagaagaggaaaaggaagaagctatttccgctgccacattctccccaatccctactatattatgctgtctttcctcttcctcctagctggctttacatgaccctaacccaaaactaccctatggccccacacgggaatgtgttcaaacgccccgacccccacccccacccccattcccaagcctccaacttagaacgtttgtgatttggcagatggtttgttaggatctgaaggatgaagagaagggtagaggtcacctggagaatgagttcaaactgccagggtcttcccttggtctttgtgcgtcaggaaggactccgagtaattattccctatgcagagacaggagagaggtcttgtttacatgagtgtgctggggcagggctggacaatccaggatatgattgtagccatcccatgtagaaagatcaaaaaccagaacgaaatgaagacagcctctcagaacctcatagaacaagcgtccaggtcatctgcttgtttggtgacttagatatacaggcttactggaactccattcactgtgacctgaagttaaataatcccaaagagaaaaagctacctggggtattggttgatgtttggggtgatagggctgaattttctgtgcatttgtccaacaaaggctttagagcacaaaaccaggttcattctccctaccaaatcttcagcttccttctcctcatccctccccaaaacaagaactgtgatttaattccgtacgttgcggatgtcactgctggacctatgtaggctgggagtactaatcagggcatctgacctggcactgtcatcccctgcctggacttttgcgatgggacttttcggggggaaaaactaacgctttttaattattgtggaaagcatcatgtgtgtattgtagaagttttaggaaaaaaaggacaaaatccaatccataagcttaccacccaagacaaacgtgtattcttttgaatataccttttagttctttttgggtgtaaatgtacacacggcacacacagttgtggggattttttttaaacaaaaactgggatacactggaatatactctttaataacttttccaagtgtgtatttattattttaggatatgtaatcctacacagatacaaaattcaaaaagtacaaactgctctgtagtcagaagtaaatcttctccctaccccgtctgccagcatctagtttccctctaatttattttgcatcctagtggagatgcttacacattgtcaaacatatgtatatattcttttatcacacacaaatggcagcatattggacactttttgttttttgctccttctgttccttcacttaataatatcacgaacattttcggcatatcaaactttctcaacagcatcttcattgtatggatggaccctttttttatcatcaatcctcaaatagtgattatttcatttgttcccaatcttcattgtaaatagtgttgcaactgacattcttgtagctaaattttgcacatgtctataacgatttccttaggataaactccaagaagagacttgcttggctatttttaagaattttgatacatcgtgntgccaaccaccctccagaaagtttgtaccaaaacgctctcctatttggatcctagagagtaccctgtttcctgcaccctaacacctaggtatccatccacctatccaaaacctttccccaaattggtagtctgggataatagtatgtccaatgttaatttaactttcctttgaatcttcgcgaataacattttccatatgtcttattgaccatttgtacttctttctttgtgaattttctatttatttgatattggtatgtttattatcaatttgtaattttattaagaatattatttttgtcaacaaatgctgcaaatatgctttccaagtgctttgctttcaaattttgtttatggtgctctttgacaaacataaattcttaattctgca

SEQ ID NO: 157191 - DNA, 1191 bp, Homo sapiens
  misc_feature (1)...(1191): n = a,t,c or g
gaagtacctcatgaagagctgcaaaaatctcaaaggtggatttcaggaggtggcagaacatttagagctggaacggataggaccacaacatcaggcaggatctgattcattgctcacaggaatggcctttttcaaaatgagagaagtatgaagacatcactgcctttttctcagttggttgttaggttgagaacattaaaaatcttgtggccaaagattttgggcaaccaagtacctactaaggtaaagatatatttagagatcccatatgagtcacatccaccacacttaaaaatattcaaaaataagtcatcttgaaatgtagttcaaaaggaactgggagaacatgttcatcatagaaccaacaattttaaaacataaactacctgagaagtcatgtaggtccaaccatattatttctcaggtgagaaaacaggctaataacttccatgattaaacacattactagtgggagaactccagagttcttttctgactcccattggtgctcctcctacaaggcaaggaatctttatattaggtttattctagcatgaccccttttaaggtttaaactggtgataaatatattatttgctcatgtcattcttcagtgctttgaagattttataagagaagaactcaggctcttttactgcattgagtcttaaaaggggggttgaattccgaaggaatcaaataaatccaacgtagtagttgcatcagaaaccatattaggaaaaccctccttaaacggcaaaaggcagagatcagttccttgagtataaagtgttagggatggaagaatgaaactaaatgaacccattatctactcctaagtaattaagtggatgtgcacagatacacctagctataggtaaacaggaaaattggttgtgcaaaaaacaagtgaggtttttcttgactataagttttcccttttggaaaaattcgctgtggatttgagtatattttctcttaagacattaaattgagactgagaatttaaaactttttgtagcaatgtattgataatagaaagcattaaagctgttttgctaagtagtgttgttgattcagaagtgatttggactatccattcatgacaccgtaaatattttggttttggactccttcccattgtttcattagataattgaaacaaccttttggattttttngctttgcatt

SEQ ID NO: 157192 - DNA, 928 bp, Homo sapiens
caagacccattggagaattcaggagcaatgctgactatcaataccaactattgcggtgtaatgtagacttgttaaagataattcagctaggactgacatttatgaatgagcaaggagaataccctccaggaacttcaacttggcagtttaattttaaatttaatttgacggaggacatgtatgcccaggactctatagagctactaacaacatctggtatccagtttaaaaaacatgaggaggaaggaattgaaacccagtactttgcagaacttcttatgacttctggagtggtcctctgtgaaggggtcaaatggttgtcatttcatagcggttacgactttggctacttaatcaaaatcctaaccaactctaacttgcctgaagaagaacttgacttctttgagatccttcgattgttttttcctgtcatttatgatgtgaagtacctcatgaaagagctgcaaaaatcctcaaaggtggattaacaggaggtggcagaacagttaagagctggaacggataggacccacaacatcaggcaggatctgattcattgcctcacaggaatggcctttttcaaaatgagagaaatgttctttgaagatcatattgatgatgccaaatattgtgggtcatttgtatgggccttggttctggttcatcctatgtacagaatgggcacaggggaatgcatatggaagagggaagccaacaaggcagtccatggacatggaaatagtccttttaatttttatttcgagctacacacatgcttgtatataggttttatctctggttgaatccctcgaacattaggacagtaccctttcccccccctttccatgggcccattttattgtctgcctttcagtactaagtatgaccgttcctatctcagatcttaataaaaagaaaaaaaaaacgc

SEQ ID NO: 157193 - DNA, 575 bp, Homo sapiens
tgaatttagcaccaattgcattaacgcacatctcttccacaactaacagacttaaaataacagtgtccttcgtattaatatctgtgccattcatttagaattagcagagctaatatggaggggctgaactagtagccacatcttgttcatcacatagactaatagaaaggaggctgtggctaaagcagaaatggaacttccggatctgaaattagccaatataatgttcttttgtatttgggtatttttcatcttaatttttacagcatatactcttcttaccagtatcctttgaatttgggttttccacaacctcaaagggttatttgaaatcttttgttgtattttaaaatattttttggaagagctgctaattttattttaaaaaacaaagttgtgaaaacatgcctcctttttaaaaaataacccctccatccaggatatggaatccagcaccacagtgcacaggtcagggctcggagggagcctctgtgcagatgtgctttctttacagtggctgtaaaaagtttgtatttattatgtataaaatgttgaataataaaaaaaaaggaatt

SEQ ID NO: 157194 - DNA, 4399 bp, Homo sapiens
cctttttttttttttttttaattccatttttttttattattcaacattttatacataataaatacaaactttttacagccactgtaaagaaagcacatctgcacagaggctccctccgagccctgacctgtgcactgtggtgctggattccatatcctggatggaggggttattttttaaaaaggaggcatgttttcacaactttgttttttaaaataaaattaggcagctcttccaaaaaatattttaaaaatacaacaaaaggatttcaaataacccttttgaggtttgtggaaaaacccaaattcaaggggcaatttgggctaggctaaaggacaggaatacaaggactggggtgggcaaggaactgctctattttaataaagcatttggaaggatttttaatatggttaggcaaactttaaaaatcttaaaaaaaccacccttttaatttcttttttaaacttaagaataagtttgataaacacaaaagacctcaaatagatcaacaggttaagaagtgtaaaaaacaacaacgaaaaaaaaccccaaatcatggagaaggattcattaatgggtattgtcactggaagtgatcaaaggaactaaaaatttcttcagttatcaccttacttttgggtcaaaaaaaccccaggggaacatttgggcgagcatttcaagttttttaaggattcttagggaggggatgggagttttcaaaaacataatacaacttgtaggattaaattcttgccaaatttgatttcttaaccaaggaaaaaaaaaaaaaaaacaaaccacaaccggcgaacatcccttagtccctaggtattgtgctccctaccttctacaggagcggacagcggacagtcagcacctgacgtgggggcacctgctggctgcaggcttgctggcctgcagagaaggccactcctggctttccctgtgacacacagaagacacttgtcttttcctggtcaatctgtacttgtgcagggtgcgcaatccttcagtcctttctcatagaaagctggtttcctccacgagccaccaggttcttccttccacggaaatgtcagggtagtgggacctggaagctgcattttccaccatagcagttggtctggaccagccacagcctggctgtctgggccggtctgctggcttgggaataaaataatgccggggcgtccccagtagagaagctcaacaatgcaggtatgtgtcctcaacttatctagacatttggattctaaggatactggtaagaagagtatatgctgtaaaaattaagatgaaaaatacccaaatacaaaagaacattatattggctaatttcagatccggaagttccatttctgctttagccacagcctcctttctattagtctatgtgatgaacaagatgtggctactagttcagcccctccatattagctctgctaattctaaatgaatggcacagatattaatacgaaggacactgttattttaagtctgttagttgtggaagagatgtgcgttaatgcaattggtgctaaattcagggcagtccaatttttcccaataaggtttcactttctcagtctggggactaaccttggggaggagccagcctctcctgaaatccctccttctgtttccttatgtagccaacatgatctgattaattctcaatcagatgagcaaaagccacttgaagaaagatgagaatctttgccacatccttgtggtcacagtaatatactgtacgagtgcacatgatcagtaatttagggactgtgccctggaatgaggcctgttcttgagtctcatataaaaacagaccactgttaggcatgagggctgcccccctctttgctcctagggtccgctaggatttgtgctatggtaggagaaatgacatagaaaatgacaacaaaaaaaaaaggcacgaaatattcaaaacgtgggaggagtctaccaggccacccagtcacacataatcctccttgttttttgctctgttcaagagtcatcatcatgcaaaggtgcctaaaaaacaagactggccaaactccaagcctggccttgattgtagcagtaatggatgggcaagcccatcatcacaccagtgtgatttccacatcttcaatcttctctgctggccttcggtgattctgtgtaggtggagggggagctgcccggacaggtcgcagtttgccatatgaggtctcaggagtatgccttgatgcctgtgagaatcctggtgactcagcatgaaggcttttttcgtttgctgaaggagaccggggaaagtacagggagctcctcttatctgggctggggtaggggctgctgggaggctggtcgtacaacggcagtggaggcagggaggcgtgtggcttgggggaaggagagatctgaatctctctcatccatggagtgtcaccattttctgaggctgaaagttcttccactagcaccgatgggaaaactccaatacgcccattgaattccccttcccagaagccatcatcatcttggttttctttgttcaagatacggattattgctccctcaggaaaagataactcatcatctgtctggccctcataatcataaagtgctttcacaaaacatacactggcatctccgttgaggctgcctgaaacgagttctgcttccgtggaattgctggacgtgtgtgaccgactgtccaaagcggccagggactgcagcatgctcaggaggctgttcgaggtgggaaactgtaggtacttttctggcacataacccacttggccaactttatttcgagcctttacccagtcttccatatctccatcttcaatcacttctaacacctcatgttcctcaatggtcaactcatctggttgagaagccttgtaggaataaacaactttgcaggtgagtggataatttcttaaggtgccagaagggctggaactgctgtcatcgaaaacatccatgttatcttcaaactcttcgccttcttctctttcggtatctgcattaagcgagtgtaaagtgccattactggtcactgcaggagggcgggcccatcgctcattttccagttcttccattacttggttcatggcactctttagccatgtgtccacagaaacaccaatctgctttagcaggtccaaccgggcttcagctttcaatttaattatctctgctttacgaatattttctctagcttcatctattttctgttctagctctgctcggctttgttctgatacagcagctccatgacactccagatcatttagaacccgttgttggtgaacaatgtttttatgctcacgtgccacacgtgtggcccattttcgagcttccttatttagactgtgctcctctgtggtcccagtttctgattctaactgtcggctagtatcactgtcacaaggctggaactggaagggctggggtttgtgaaatacagcgttttcttgcaaaaacagctgaagattgtagtcccggaccaccttgctggagttttctaataaaaactggaatgtgttctgcacagcttggcatgtttctagctcagtccggctgaaggctattaaataatccttgagatgatcatacacatttccatcaagagccttcataatgttaactaaatctgtttgatagtagcgatcctgatgtgcatttgctgccgctagggtaagaagataatcattccttgcgtgggtagctttggaattacactcagatcgccgggcttttaactttacacttgccttctgtaaactgattcttgattgaaaaagactaagtttagattttgcctcgatgtcagctttctctcgtactgcatgagccatctgttcagtctcaaagtatttctttttgcctttagctaaatctttcactgtctcttgtaattcagtttggatctttgtcaactggtccacacacctttttagttgctgttcttttaagcttctcactgtccttgcaggctcagaaatgaagtttttatagttttcacatatattcatccgagactgggctacctgcattgttccctcgagaaaagatttccaaacgggatacatgctcctgtaatcattccgatcatcagcttttactccaggccaatctctcttcaggtattgactagccaacttctgcataccctgtgcatactctctttcaatagcagccttcttctgactgaatgtccttcctcggcggcggctgcatgatgctgaagggacatcaatcctccccgacggcagcgttagcaaggaccaggaggaggaggagggccggagaggaggggacggcccagcgagcgcgcgcgtgtgtgaaaggagcgcttaagaagcaagacttgccccggagggagcaggccagcgggcggcaggcggac

SEQ ID NO: 157195 - DNA, 1980 bp, Homo sapiens; identical to SEQ ID NO: 125732

SEQ ID NO: 157196 - DNA, 2888 bp, Homo sapiens
cgcggcgtgagaagccatgagcagcaaagtctctcgcgacaccctgtacgaggcggtgcgggaagtcctgcacgggacccagcgcaagcgccgcaagttccttggagacggtggagttgcagatcagcttgaagaactatgatccccaggaaggacaagcgctttctcgggcacccgtcaggcttaagtcccactcccccgccctaagtttctctgtgtgtgtcctgggggacccgccagcacttgtgacggaggctaaggcccgtggatatccccccacatggacatcggaggcgcttgaaaaaacctcaaccaagaataaaaaactggtccaaaaaagctggccaaagaaagtatgatgccgtttttggccctcagagtctcttgatcaagcagattcccacgaatccctcgggccccaggtttaaataaggcagggaaagtttcctttccctgctcacacacaacgaaaacatggtgggccaaagtggatgaggtgaaggtccccaatcaagtttccaaatgaaaaaggtgttatgtctggctgtagctgttggtcacgtgaaaatgaccgacgatgagcttgtgtttaacattcacctggcctgtcaacttcttgggtgtcattgctcaaagaaaaactggcagaaatgttccggggccttatattatcaagaggcacccatggggcaaagccccaagcgcctatattaaggcacatttgaataaattctattaccagttaaaaaaaaaaaaaaaaaagttggcggccgccaacttttttttttttttttttttttttttttttttttttttttttttttttttttttgctgaaacagacactcatttatttccccagaaggaggcaaaatggggtccttggggagtctctgtcccagcccggacaggcagatctcacttccagaagagcacattccagaaaagcagccagcaggggtagaggcccagggacagcagtgggaagagcagggcggccgtaggtgtggtgctccagcacaccctgggctagcgctgccaggaagagcttgccagccctcggccagtgacagtggcgcctcctgcagctcccgccacaggaacaggctgccaaggagcgtggctgccgggctggtcaccaccagcagggcaacataaagggtccggggcccatgaggcttggcaagcgcaacagtgggcaccatggtggtggccagcaggaagcccagtgagaagttggtgagggcgatgcagcccacctgcagtgctaggtagatcagggctaccaggctcagtgccatccagcccctgtctgggggcctgtgtgcttacccaccccgtgggtattgtggggcagggccaggccagctgcataaatcgccagcagtgtcagcaccacagcctcaggcctctgcaactgggaagtgctgggtggcaacgtgttggcccagcactggcaggacatagagggccagtcccatggcctgtgagatcagcagaggtgccacgagcgaggccagccccacaccctgtgatggggggaaggggtacactggggccaggggcacccccgggctcctcaaggcccattccagcctcatgcagctgcatccacagttccagagccttgagaccaaggaccaggagcaagaagccgacagcgggcatgtagaggccgatggagacaaagcgggagaggccggggagcaagtaaaggaagaaggactggtgcaggcgctccaggaggtggttgagcttgcggaacatgccctccaaagccttgcccactgccaccaggtcatacttgtactggcggaagctattgatgccacgcagggttagggcctccacacggtagcgcaggaagaggccatgggagccgtgggggcggccggaggcctgccgcagaaccatgagcagcagtgtctgcaggccctgcagcggtccatccaatgatgtccagtcctcgggctgcagcttgccctgaagcgtgcacaacaggccccctttctggcagaaggtctggaagagattgagcaggtcaaggttgggcagctgcccgttaagcccctccacggccacatcgaggctggtgaccacatcactgctcagctccagggccacggctgcctgaatggccccagctcggccctgcaggggagacgactgcatgccagtgacattgacatcgtggtaggcttcaagccaagcctcagtgcccagaaggtcatgttctgttaccaggaagacgatatctttggcccaataaatctgcccccggaagtgggcagccagtgccagcagcagccccacagcctggctgttggtagagtcagagccacagggcacggtgagcacaagcgactcggtgctggcagcacgcggggcccgcaggatgccgtacacgttggtgcccgcattccatatagcgctcgtgggtctcatctgggaagggcagtttccgggagaaactctgcgtgtagacctccagccctactgaccgcatcgtccgttcaagccaggccactggcagagcccccgacttcttgcggtgggcggcgaagtcccgggcaaaagcccgggcacggtctccgcccgcaaactgctcctcccccatggtggagcccatggcgttctccgacatgtaagtgcgctgggtcagcggcgggaaaaccagcgccaagaaccaggcggatgcccgcctacgtagctcagcacgcacaacggcgcgttgaggcgcagcactaggcgggcgagcgcgcgccggcgaaccgggtccgacaggaggcccatggcggggcagggcggcgcggctacggaccctctcccgcctccaactaccgccgcggtgcccacaggctgctcctgtcagacccggggacccgcgc

SEQ ID NO: 157197 - DNA, 438 bp, Homo sapiens
cccacgcgtacgcggacgcgtgggggcgtttcccacttacgggacagatctggaagcatctttgctaagttttgaaaaacttgaccgtgcctcaccatatctttggccagaacaattaccaggtgttgctgaatttgcagcttccttcaaaagtcctattactagttctccacccaaatggatggctgagatagaacgtgatgacatcgacatgttgaaagccacagagatgacacgggggaaattcctcaatattctagagaagcccaagaagtagcagctgcttgcggacaggatgtcctggggtccgaaaccaagctcccttcccggtgcacctctaacaatgcacacctcactgcttgcttgggagaggccagagggtgtacctccaggactgccctctcccctgctcctgggactctacacgtctgaggacat

SEQ ID NO: 157198 - DNA, 843 bp, Homo sapiens
atggcgtctcccacagacgggacagatctggaagcatctttgctaagttttgaaaaacttgaccgtgcctcaccagatctttggccagaacaattaccaggtgttgctgaatttgcagcttccttcaaaagtcctattactagttctccacccaaatggatggctgagatagaacgtgatgacatcgacatgttgaaagaactggggagtctcaccacggctaatttgatggagaaggttcgaggcctacagaacctagcctatcagctggggctggatgagtccagagagatgacacgggggaaattcctcaatattctagagaagcccaagaagtagcagctgcttgcggacaggatgtcctggggtccgaaaccaagctcccttcccggtgcacctctaacaatgcacacctcactgcttgcttgggagaggccagagggtgtacctccaggactgccctctcccctgctcctggcactctacacgtctgaggacattcagcagcaagagaagaatctgctctacccaaggatcattgcagttactcaatcaactttcagacttgaaccttcttagcctcggatattggtaacagctgagggcatatcattcttaaaggtcgaagtcctgctttctcatttctggaagtgattcaggagccccaggatcttacggttgatttgactcagtcatggcagtcagttgtgacatgttgattggatgggttcttttgaattgttcttgatctcttagaaagtgtttacgatgtgaggagaccagagaccaagtagattctggaccagaccatgcagcctgacctgtgaactctccagtatatac

SEQ ID NO: 157199 - DNA, 423 bp, Homo sapiens
aaattcggtttcatattctacttaacaatttaaataaactgagatatttctaactgaaaggagcaaggagagagacaaaaaagagataaaagctatgaccaaagaactaaaaaaaaagcggaactgcctaaaatgcaaagcaggtgggggaccgcgggaagccctgcgtctgccactatggcctgagcctggcctgggacccctgcatgctcaagtactgccacagccgcgaccggcccacgccctacaagtgtggcatccgcagctgccataagagctacagcttcgacttctacgtgccccaaaggcagctgtgtgtctgggatgaggatccctacccaggctagggtgggagcaacctggcggggggctgctctgggcccactgctcttcaccagccactagaggggggggcagcccccc

SEQ ID NO: 157200 - DNA, 380 bp, Homo sapiens; identical to SEQ ID NO: 156836

SEQ ID NO: 157201 - DNA, 313 bp, Homo sapiens; identical to SEQ ID NO: 156837
  misc_feature (1)...(313): n = a,t,c or g

SEQ ID NO: 157202 - DNA, 310 bp, Homo sapiens; identical to SEQ ID NO: 145955

SEQ ID NO: 157203 - DNA, 422 bp, Homo sapiens; identical to SEQ ID NO: 156839
  misc_feature (1)...(422): n = a,t,c or g

SEQ ID NO: 157204 - DNA, 2721 bp, Homo sapiens
ctttttttttttttttttttagaaagtaccaggttttattatctttttatcaaaaaaaaatcagtaactagacaacaggtgtgagaggtgccttacagagggagggtggctcacttcccacacagccccaaggggaaagggcacttgggggcagaagaaggaaccagccagcttgggacccttgggttgcagtggtgacggggagcttaatggcccactggtgcaagcaagggaggggtggttccccttcaccgcagccactggggtcaggaggaagacacgaacctggccaggctaaagccaccaaggcctccccctctcaggagagggagacaagggtcgtcccagacaacagggccccagctggcgttccaaatcaagccctccccccattctacctacatcctacccagggggagacaagggggtcgtccccaagcacaagcttgaggctgtgaactcggttagagccagatctagtgtctctaggaataagtgctggtccaacagaatggacattgctctccgctgtccagttacagtagcccatgaactcacatacagtgacgccctctagaaaacgtggttaagtgcaactggaggagggaatgtgtaatcttaatgtgattttaattggcttaactttaaaccagccgcatgtggttacttgtattggatagcacagccctagagccctgaagatagcaaaccaaagaacacccagctgggtccccaaacagaaggcagaaggggtagaacccatccaccttaactttttccagccccatcagaaggccccaggaacagggcaaggagaaaaaggcaaaaacccacccagcccacatgaaaattcactcactcaaccacccagcaacatcaaactggaaacaccacacttatttcctgaaaaaaatatatttatctatttttctagaaccaaggaagaataataatatattataagaagcacagacacaaatatcccaccatccccttcattatattttgggatctgctaaaaaaaaactatgtttcggcaaaagctattttataagaggaagcagcttcagaaatggccaaggccatgaggagcgggggtttaaagtataaaaaaaaaaaactggggaaggggtttaatgaaaaagagcaaaaaaaaaaaaggggaaagggggccccctttaaaggtttggatagtgaaaaaaaaaaaaaaaaaaaaaaagaattaataaaaatcatctctccggctcttctctcattttcaagaaacaaacaaaaacaaaaacaaaaaccattaaatacaaacttagcaggtgctgtggaaatgtgcgagagaatgaagacacctcggcacctccacactcttgcccaggcagagatatacactctgcacaaaggaatgaacagttaaaaaaacgaacaaacactaaaaatagatttacaaaatttctattaatcccattccagcatagtctctaagctcttttcaccatcctcccccccaaataaaaaaggttggtttccaaaggtcacttgacagagcctagaatggccccaggtatataccacagagattaccgtaggtgtggtcccaagtacccatttacagaaacatctcaaggtgcaggtggttctagttccttcccccatttcctggcagagagaccggctgtgaaaggaagggaggaaggccactgggggaggacctccagccaggactccacacaacatccgttagccccctggcttcagaggagctctggatgaggcatggtcagtatgggcttgagggcggacctagattcttaactggaagtttaagaagtgatccaatcccagtcttgccttcagaaaggccaagttgaaatcatttttactgacaggggaactgagggccaaagctcaagaagaacctggcagaacagtagaagacaatgtctcttctgaacacttcaaaggtaatcagagctggagatactgacaagtcagtattaggttgacctcaccctaccctaatgtccacccttcaaaatcccctggcttccctccccgctaaagtccaagccagtgcccacaagcaagcttcacgcgtagaactcattggtgggggctttcttgtagatgggtttcttgcccaggtcatagctgccttcatccttcttcttcatacggtacatgagcagtaggatcaggaagacggcaaagaggatgcccacgatgccacccacaatcagagctgccaggacctccgttctctcaaagatgttgctgccctgcacagtgctggacattgacaccttgttggacacatcctcactctcttcaacgggtgagattctcttggggataacctcattctcctctagtttcttgggttcggtggggacttggctcccagaccctgccctctcagggatatggttatctagaggcaccaagggatggacaacttcagggccgatcatggagtcttccaagtcatccagatctccagagccagacagctcaaagtcatcagattcctgcccgggccccactacatcctcatcgtctggtagggctccggagaagtatcggccttctaggaggtcctgggggtcgatgacctcagtctctcggatcgactcggcgactccgcctacgaagaacagcagcagcgcgaacagacgggcgggggccatggcaccgcggactggagaaggcgcgcaggctgcggcgagtggc

SEQ ID NO: 157205 - DNA, 405 bp, Homo sapiens
cgcgtccggacatcgggaggttcaagattcttatgaagcttatggccaggacgactggaatgggaccataacgtcgctgaaggccctcctgctaggccagtgaagggagcatacagagagcacccatatggacgttattaaaaacaaacatgaggggaaaatatcagttatgagcaaagttgttactgatttcttgtatctcccaggattcctgttgctttacccaccttattccattcttaactctgcattctggcttctgtatgtagtattttaaaatgagttaaaatagatttaggaatattgaattaattttttaagtgtgtagatgcttttttctttgttgtttaaatataaacagaagtgtaccttttataataaaaaaaggaggtggagtaaaaaaaa

SEQ ID NO: 157206 - DNA, 1215 bp, Homo sapiens
atgcagcgccgggacgaccccgccgcgcgcatgagccggtcttcgggccgtagcggctccatggacccctccggtgcccacccctcggtgcgtcagacgccgtctcggcagccgccgctgcctcaccggtcccggggaggcggagggggatcccgcgggggcgcccgggcctcgcccgccacgcagccgccaccgctgctgccgccctcggccacgggtcccgacgcgacagtgggcgggccagcgccgaccccgctgctgcccccctcggccacagcctcggtcaagatggagccagagaacaagtacctgcccgaactcatggccgagaaggactcgctcgacccgtccttcactcacgccatgcagctgctgacggcagaaattgagaagattcagaaaggagactcaaaaaaggatgatgaggagaattacttggatttattttctcataagaacatgaaactgaaagagcgagtgctgatacctgtcaagcagtatcccaaggaggaagagctgcgcaaaggtggagaccccaaatatgcccacttgaatatggatctgcatgtcttcattgaagtctttggacccccatgtgaggcttatgctcttatggcccatgccatggaggaagtcaagaaatttctagtaccggatatgatggatgatatctgtcaggagcaatttctagagctgtcctacttgaatggagtacctgaaccctctcgtggacgtggggtgccagtgagaggccggggagctgcacctcctccaccacctgttcccaggggccgtggtgttggaccacctcggggggctttggtacgtggtacaccagtaaggggagccatcaccagaggtgccactgtgactcgaggcgtgccacccccacctactgtgaggggtgctccagcaccaagagcacggacagcgggcatccagaggatacctttgcctccacctcctgcaccagaaacatatgaagaatatggatatgatgatacatacgcagaacaaagttacgaaggctacgaaggctattacagccagagtcaaggggactcagaatattatgactatggacatggggaggttcaagattcttatgaagcttatggccaggacgactggaatgggaccaggccgtcgctgaaggcccctcctgctaggccagtgaagggagcatacagagagcacccatatggacgttattaa

SEQ ID NO: 157207 - DNA, 1009 bp, Homo sapiens
aatattatgactatggacatggggaggttcaagattcttatgaagcttatggccaggacgactggaatgggaccaggccgtccctgaaagcccctcctgctaggccagcgaagggagcatacagagagcacccatatggacgttattaaaaacaaacatgaggggaaaatatcagttatgagcaaagttgttactgatttcttgtatctcccaggattcctgttgctttacccacaacagacaagtgactgaaaactcctgaggcatttcctggactagaatgggtagtgaagacccatgtcagctatcagaggactcctgaaacctggagagctacctgctgtataaaggctggcctgagggcatttgctgaacacagagaaacccaggagaggagatcagcagttttctttcactctacttggatctgtcagatttacccacagaaagcccagtccagggatcccttaagagtctttaggcccagaatggagtccctcaaggcttcagggggactgtggtgctaacaattaaactgttcaagactttaaagagttgaaggggactaatgggtatccctagcatggcctcctagatgggaattaactggcaactccttactgtgcccattcccagaatgtgtgcttccctttagcctcccatagaattggctgaaacaccctaccaaccgttttctgtttccccactaccacacctgtgttatgggtgtcagcctgtgagtccttgaacccttccagagggctcccaagggagggtgatcactgcccttccataaaaggctgaggaaagccaagtgagaagattccattaatttgggcagagttatttaacatctgaacctgtttttctcttcattgtttattacttaccttgtccaaaaaggtcataaagggtagggctttttctgttccacctctgtactatatttctccccaacaaatatctgcccctgaggacctcaataaaggtttggtcaagtgaaaaaaaa

SEQ ID NO: 157208 - DNA, 2726 bp, Homo sapiens
ggcttcggtcgctaccgctcccgctctgccacccccgccaaccgccgctcgggcctccgtcgctgccgcgtcgctttctcgctccttggatcgcacatcctcccagatgcagcgccgggacgaccccgccgcgcgcatgagccggtcttcgggccgtagcggctccatggacccctccggtgcccacccctcggtgcgtcagacgccgtctcggcagccgccgctgcctcaccggtcccggggaggcggagggggatcccgcgggggcgcccgggcctcgcccgccacgcagccgccaccgctgctgccgccctcggccacgggtcccgacgcgacagtgggcgggccagcgccgaccccgctgctgcccccctcggccacagcctcggtcaagatggagccagagaacaagtacctgcccgaactcatggccgagaaggactcgctcgacccgtccttcactcacgccatgcagctgctgacggcagaaattgagaagattcagaaaggagactcaaaaaaggatgatgaggagaattacttggatttattttctcataagaacatgaaactgaaagagcgagtgctgatacctgtcaagcagtatcccaagttcaattttgtggggaagattcttggaccacaagggaatacaatcaaaagactgcaggaagagactggtgcaaagatctctgtattgggaaagggctcaatgagagacaaagccaaggaggaagagctgcgcaaaggtggagaccccaaatatgcccacttgaatatggatctgcatgtcttcattgaagtctttggacccccatgtgaggcttatgctcttatggcccatgccatggaggaagtcaagaaatttctagtaccggatatgatggatgatatctgtcaggagcaatttctagagctgtcctacttgaatggagtacctgaaccctctcgtggacgtggggtgccagtgagaggccggggagctgcacctcctccaccacctgttcccacgggcacgtggtgtgggaccacctcggggggctttggtgcgtggtacaccagtaaggggagccatcaccagaggtgccactgtgactcgaggcgtgccacccccacctactgtgaggggtgctttttgttgtaagagcacggacagcggggcatccagaggatacctttgcctccacctcctgcaccagaaacatatgaagaatatggatatgaggatacatacgcagaacaaagttacgaaggctacgaaggctattacagccagagtcaaggggactcagaatattatgactatggacatggggagggttcaaagattcttatgaagctttatggcccaggacgaactggaaatgggaccaggcccgtcgctgaaggcccctcttgctaggccagtgaagggaggcatacagagagcccccatatggacggttattaaaaaccaaacatgagggggaaaatatcagttatgagcaaagtttgttacttgatttcttgtatctcccagggattcctgttgctttacccacaacagaccaaggtaattggtctaagtgttttttcttccgtgggtccccttccttctccccaaccttaattccatttctttaactctggcattctgggcttctgtatgttagtattttaaaaatgagtttaaaataggattttagggattatttgaattaaatttttttaagtgtgtagatgcctttttcctttggtggtttaaatattaacagaagtgtaccttttataataaaaaaaagaagttgagtaaaaaacaaaaccccccaaacctgttagtttcaaaaatgacattgcttgcttaaaggttctgaagtaaaggcttgttaaggttctctaagttttgatttgaggcatcccgtaaagttgtagttgcagaatcccaaactaggctacatttcaaaattcagggctgtttaagatttaaaatcacaaacattaacggcagtaggcaccaccatgtaaaagtgagctcagacgtctctaaaaaatgtttcctttataaaagcacatggcggttgaatcttaaggttaaattttaatatgaaagatcctcatgaattaaatagttgatgcaatttttaacgttaattgatataaaaaaaaaaacaacaaaattaggcttgtaaaactgactttttcattacgtgggttttgaaatctagccccagacatactgtgttgagagatacttagagggagggagtaggttttgaagaggttgatggtggtggggagggaaggcctcctgaattgagtttgatgcagagctttttagccatgaagaatctttcagtcatagtactaataattaaattttcagtatttaaaaagacaaagtattttgtccatttgagattctgcactccatgaaaagttcacttggacgctggggccaaaagctgttgattttcttaagttgacggttgtcaatatatcgaactgttcccaagttagtcaagtatgtctcaacactagcatgatataaaaagggacactgcagctgaatgaaaaaggaatcaaaatccactttgtacataagttaaagtcctaattggatttgtaccgtcctcccattttgttctcggaagattaaatgctacatgtgtaagtctgcctaaataggtagcttaaacttatgtcaaaatgtctgcagcagtttgtcaataaagtttagtcctttttta

SEQ ID NO: 157209 - DNA, 2085 bp, Homo sapiens
  misc_feature (1)...(2085): n = a,t,c or g
cgaggtttttttttttttttttttttttttttttttttttttttttttttttcagcagaaatcacaaatttattaactcttaaatatatcaatcagtcctttaccattatggcaagaaatatatacagtgtcccatggtaaactgcagtgtttcaaaatgatagaagataataaatgtgtaattcatttgtggtggagagaacaaatcacaatttcctcacatcttagtgcggaagacaaacttgatctacagtaatacttcaacaccacatgctaagttaaaagtgtaaaaaaaacactctacatctattttttttttctttaaatacatgtatgccacggtatagctggcttcacaaaagggtaaaagaaattaaaaagagaaaaatgaggccattattttttcacagatactcatttggcaggttaacatggctcaatatatttactgtatatatttattttaaatatatatgttgttttaaattgtgtaataattatcagaaaagcttcaacccatctaccatacatccactagcaataatatcctaagatgattagtattcaacacagagaggtgagatgagagaaaagaggaagggttgtttttgttattttgtttttcttttttgcttctgctttaaaaataggcttctgaggacttgtgaatttactatcgttaaaataacaatgatggagattccatgcactgtaaagcactttcagggaagagaacaaaaatcacaggaattgaatcaacaaaggaaaaatgagaagccacaaagaaaacctaggacatttccctttttgttttaaaactggggaaattctaactccttggggggaagacaatgatactctgattcaagagagaagcctaaaaaagcaccaagtcaccaaggttccaggttccaaaacacttatgagaatggcaaacatttgtaagcctcttctacccctagaaaactaggctagtgatgatgcagaagtgaccctttcattccccaagggcggaaggtgaagtgccgtttggccataaaaacccccctcctgcctatccaagttgggtatcccnccctggcaactgtccccaatcaagtaagacgttgccagtccacaggaggaacttgccttttatccctaactttaaacaatggcaaataccccccaacatagttaggataccctaagtcccaaactagagcttaagcagaattataaacctttaaaatcttgacaacatttttgggggcccttgaagatgatcaaaagtgctagtatagctaccttcaaaagacttttatttccccttttacattcattatgcaaatttcacttctattcttttctcacacactactagccagcctccccaaaaaaggaaaagggaaaaaagtaagaaaagaatggaacaaaagaaaaataagaaagcaaacggaaaggaacaaagaaacagggataaagaaaaggagatcacagatttgagaaagaaaaacaattcaattcagcaaattcaccaaaacaatgtgaatatatcctaaagtgattaaactcagaaatgatgtgaatttttccagtttacacagtttgaccaaaatacagcatggctttatgtggtagcaaaccaactgattcttgcttctactttcataagtgattttgcccacatatcatcccactttaattgttaatcagcaaaactttcaatgaaaaatcatccattttaaccaggatcacaccaggaaactgaaggtgtattttttttttaccttaaaaaaaaaaaaaaaaaaccaaacaaaccaaaacagattaacagcaaagagttctaaaaaatttacatttctcttacaactgtcattcagagaacaatagttcttaagtctgttaaatcttggcattaacagagaaacttgatgaagagttgtacttggaatattgtggatttttttttttgtctaatctccccctattgttttgccaacagtaatttaagtttgtgtggaacatccccgtagttgaagtgtaaacaatgtataggaaggaatatatgataagatgatgcatcacatatgcattacatgtagg

SEQ ID NO: 157210 - DNA, 863 bp, Homo sapiens
tgttttctttgagatagggttttgctctgtcacccaggctggagtgcagtggcccacaatcacagctcactgcaaccttgaacccctgggatcaaacaattctcttgcctcaggcttagagtagttaggactacaggtgcacatcaccatacctggcaatttttttttttttttaattatttttgtagaaagcagagtctcgctacggtgcccaggacaatttcaaattcctggcctcaagcaatcctcctgtcttggtctaaacatgttgagattacagggttttgagccaccatgcccagcctgaaaaacttttaagacaagacattaggaattcttaaagttttaaaaaggttgtcaaattattaaaacaatagcaaaagccaaaattaatactaacagctggtcatatatgattttatctgcctaattttactttgggacaatggcccagtggtttaaaagcctgcatagatacttctattctgcctcctttagtcactggtagggaggatatgttgtcatgtagataatttctaatttccttttaagaagaatccacactaataattaacctcttactctgccccatgtaaagacaagcattattcctaaaataatgaattatgcaattccttctacagattgatagacataatccatgtaaagacaagcattattcccaaaataatgagttacgcaattccttctatagattaatagatacaatctctgttctctgttagagtggattacccaatttcttagcatttacctttgaacatgtacctgtttgctaatttttggactcttagaaagtaaagatgttacttctcaaacagcatttatagaaattctaatat

SEQ ID NO: 157211 - DNA, 419 bp, Homo sapiens
  misc_feature (1)...(419): n = a,t,c or g
cggccgcgtcgacttttaacttttatttttattttgagataattgtagatttacatgcagttnnnnnnnnnnnnnnnnnnnnnnnnnnnnnnnnnnnnnnnnnnnnnnnnnnnnnnnnnnnnnnnnnnnnnnnnnnnnnnnnnnnnnnnnnnnnnnnnnnnnnnnnnnnnnnnnnnnnnnnnnnnnnnnnnnnnnnnnnnnnnnnnnnnnnnnnnnnnnnnnnnnnnnnnnnnnnnnnnnnnnnnnnnnnnnnnnnnnnnnnnnnnnnnnnnnnnnnnnnnnnnnnnnnnnnnnnnnnnnnnnnnnnnnnnnnnnnnnnnnnnnnnttttggtacaaaacctttttaaattggcctttttcattcagcataattctctggaattataagttgctgcctgtacccatagtttgttctttt

SEQ ID NO: 157212 - DNA, 599 bp, Homo sapiens
ttttttttttttgtgtttttttaacttctatttttattttgagataattgtgagatttacatgcagttgaaataatacagagattccatgtgcccttcacccaatttcccccagtggtaacatcttgcaaaactatagcacaatatcacaactgggatactgacatcgatagctgtgatatagaacatttccatcatcacaaggatccctcatgtttctcacagccacgcccaattctctcccatcctcaccccctccttaacacagccaccactaatctgttctccatttctataattatgtcacttcaagaacgttatataaatggaatctttttgggtacaaaaacctttttaaattggcttttttcatccagcataattctctgggaattataagttgctgcctgtacccatagtttgttcttttttattgctgagtagcactcacggtatgaatgtactatggtttgtgtaatcatttacccaatgaagaaaatctgggttgtttttggttattacacataaaattgcaataaacatcaatgtacatgtttttgtgtgaaaacatgcttataataatgtgaaactctatgccta

SEQ ID NO: 157213 - DNA, 3626 bp, Homo sapiens
gagtacctattcaaaattttattaaaaaccagcaaattaattttaatctctagccataaaaacataagtaatagtaagctcctaagcttggacaaaggctggattctcttcactataactgagtggtaatttaaagacaacaatttaatgtcactaattttcaaaattaaatagtttaagctcaatttaattttgctagatatttaacaaaacatacggctcaacctcataacctatatgtgtgtatgtctacatctgtgtatatatcataggatttgagaatcttaacacatgtataaataagtatatataaactccaattttaaatcttaaaattgctgaatttaccctcatattctttaaaaaacttaaagcattatgaatgtagagaaattcaccagagctcactgcctatttgatggctgtaacaagtcttcaagtatatacttttataataagttgaaaatttcatataattttatttattaagaattccaatctaagtataaaggtacaaggtagtgagaaggaaatactacagttcggagaactgcttatttccaagtatatttaacttataaagttaataaatagttaaatgaaacaaagtttataggtgacctttagtaaatggggaaattaacaggactttcttcttcatcttcaaactcttcagaagcagcaacagggctagttaattcaactcccaattgttctgaaagtttttttaccttctcttctaagagaatattcttcttcacttcttccttgtaattatacttaagatcttcaatttcttcaaaaaatgaaggatcaaaattttccagttcttttttcagcttctttatttcctcctaatggaaacattatctttaaaagttgcatataggaaatatacatattttacgtttgaacaaggagatttaattgtaaatatgaaagccaaagtattcctgaatggtcaaatacagcaataaaggcagaagaattaagatttttctttgttccattgtacagtgtaaataactaagttgttaactgtcaagtccagttatgtattctgtaagttgtgttctagtctttgactaaaatttatcatctcttataatgggacttaatctttctctaaaagcatataagagcttgtcaatagagcaatcaatcaaaaagattttgtgattcataacattgaagttagtctggttaagagttttggtttagacttcatttatattttccttactaatatctaatatttaatgaataatgatcaattttttataaagttattaatatgatcagggaaacctttgggacttctgacaggcatctggtgaagagacaattcaagccttagtgactatttagaatagccagtgatcactagctaattctcatatccatgcctttttgtcctgtttacagtcttaaaagaggtaaaacagcaaatatttttttaagggaactataaccttaggattcctgaaaagaatttcaaaaaaaaaataaagacactgttgccaatgtgacccaaaacttaagaacatactaatggcatatatttgttacaattaaaaaataaatttactacttaatcctaaaaaaaaaaaaaaaaaaaaaaaaaaaaaaaaaaaaaaaaaaaaaaaaaaaaaaaaaaaaaaaaaaaaaaaaaaaaaaaaaaaaaaaaaaaaaaaggaggaagtagacctaaaacctatgaaagaaaagaatgctaaagaagaattaattaggtgggaagaaggtaaaaagtggcaagccaaaatagaaggaattcgaaacaagttaaaagagaaagagggggaagtctttactttaacaaagcagttgaatactttgaaggatctttttgccaaagccgataaagagaaacttactttgcagaggaaactaaaaacaactggcatgactgttgatcaggttttgggaatacgagctttggagtcagaaaaagaattggaagaattaaaaaagagaaatcttgacttagaaaatgatatattgtatatgagggcccaccaagctcttcctcgagattctgttgtagaagatttacatttacaaaatagatacctccaagaaaaacttcatgctttagaaaaacagttttcaaaggatacatattctaagccttcaatttcaggaatagagtcagatgatcattgtcagagagaacaggagcttcagaaggaaaacttgaagttgtcatctgaaaatattgaactgaaatttcagcttgaacaagcaaataaagatttgccaagattaaagaatcaagtcagagatttgaaggaaatgtgtgaatttcttaagaaagaaaaagcagaagttcagcggaaacttggccatgttagagggtctggtagaagtggaaagacaatcccagaactggaaaaaaccattggtttaatgaaaaaagtagttgaaaaagtccagagagaaaatgaacagttgaaaaaagcatcaggaatattgactagtgaaaaaatggctaatattgagcaggaaaatgaaaaattgaaggctgaattagaaaaacttaaagctcatcttgggcatcagttgagcatgcactatgaatccaagaccaaaggcacagaaaaaattattgctgaaaatgaaaggcttcgtaaagaacttaaaaaagaaactgatgctgcagagaaattacggatagcaaagaataatttagagatattaaatgagaagatgacagttcaactagaagagactggtaagagattgcagtttgcagaaagcagaggtccacagcttgaaggtgctgacagtaagagctggaaatccattgtggttacaagaatgtatgaaaccaagttaaaagaattggaaactgatattgccaaaaaaaatcaaagcattactgaccttaaacagcttgtaaaagaagcaacagagagagaacaaaaagttaacaaatacaatgaagaccttgaacaacagattaagattcttaaacatgttcctgaaggtgctgagacagagcaaggccttaaacgggagcttcaagttcttagattagctaatcatcagctggataaagagaaagcagaattaatccatcagatagaagctaacaaggaccaaagtggagctgaaagcaccatacctgatgctgatcaactaaaggaaaaaataaaagatctagagacacagctcaaaatgtcagatctagaaaagcagcatttgaaggaggaaataaagaagctgaaaaaagaactggaaaattttgatccttcattttttgaagaaattgaagatcttaagtataattacaaggaagaagtgaagaagaatattctcttagaagagaaggtaaaaaaactttcagaacaattgggagttgaattaactagccctgttgctgcttctgaagagtttgaagatgaagaagaaagtcctgttaatttccccatttactaaaggtcacctataaactttgtttcatttaactatttattaactttataagttaaatatacttggaaataagcagttctccgaactgtagtatttccttctcactaccttgtacctttatacttagattggaattcttaataaataaaattatatgaaattttcaactt

SEQ ID NO: 157214 - DNA, 2726 bp, Homo sapiens
atggcaagagacttctggggccccagtggctggactatgactgtgaccgagctgtgatcgaggactgggtgttcagggtcccccatgtggccatattcctgagtgtggtcatttgcaagggctttctcgtcctgtgctcgtctcttgatctgactaccctggtccctgagcgtcaagtggaccagggcaggggttttgagagcatcctggatgtcctctctgtcatgtacatcaacgcccagctgcctcgggagcagcggcaccgctggcgcctgctcttttcgtctgagctccatggacacagcttctcccagctctgtggccacatcactcaccgggggccctgtgtggctgtcctcgaggaccatgacaagcatgtgttcggtgggtttgcctcttgctcttgggaggtgaagcctcagtttcaaggggacaatagatgcttcctgttctccatctgccccagcatggctgtgtacacacacacgggctacaacgaccactacatgtacttgaaccatggacagcagacgatcccgaacggactgggtatgggggggcagcacaattactttgggctttgggtggatgttgattttgggaaaggacacagcagagccaagcccacgtgcaccacgtacaacagcccgcagctgtcggctcaggagaacttccagtttgataagatggaggtgtgggcggttggagacccctcagaggagcagttggccaagggcaacaagagcatcctggatgcggaccctgaggcccaggccctgctggagatcagtgggcattcgcgccacagcgaagggctccgggaagtcccggacgatgaatgaggagccgcctgagccttcctggagccaggacctggattcctctgggtagagggcaccgcctgcagcccctcttccctcccacatggtttaactgtaatagcgtaccgcacgggtcacagcctggtagtcccacatgtgccaagaagacgccctctgaagccatgtcctgactcatgggtggatctcccagaaatagatgttttttaagttttcttttttgccctacagggtcaccctcaggatctctccaagaaatcttgtgtcaaattagtaactcagtcttatactttgttcttttttaccaacgaaatcctaagcagctgagacctttcagacccccgcttggcattagggaattccgctggcattagggaattccgctggcattagggaattccgctggcattagggaattccgctgggcattagggaattccgctggcattagggaattccgctggcattagcattgctgggatctcaacttctctattgaggagggggttcctcccgctggggttcatatggcctcactcaggccatccctgttagaaggtggtacctgatggtctgttctgacgggtgagggacagaggcatctggatgaaaatctcgacgctttctgggaacagcttccaatggcatgggagttctgtatttaaaagcatgaactgtgtataaaatggggaaatggaggcaggagactttgaggtaacatggtctggtggtggcatgagtcctccagaaggtatttgtaataaggttccacaccccagctctctcagctgtttttaaatgaatgtgtgtgaggaacagatgggaaagttgggagatctgtctacagagaagcaaagttgtggttctcttgctaacttcaaggtgagggatattggggcaccctaagtttggggaacttggttggataaatacgtatatggtccattccataaatcagtggtgagtgactgggccggggttctagacctctgggaaccagcacctgagtcacagctgtctaggcctcggtgctggcctgggttctagatctcttgggaacccagtgcctgagtccaccagctgtccagtgcagccattttgcccagggctgcttcccgagggggatgatgggaaattcagcagtgtagactcactttaaacaagctccggtgatcctgaaattgctgaagatcgtgtaggtgggttgtgggggtcagcagagctgccattcttgcccacgtcttggaaaacaacacacggtgagttcaccgtttgggccatgaagattttccccactttaaaggtgctgtgaacttgtctcctaaagatatatacctcttccttttgtcttttgctgtaagctttggaccttttgcagatctggatgaaaatacaaccctcttattgtataggttggcccttggattatagcccattagtaaatcggagctgttcggcatttttgccaggcccttgcattttcctacctgggaggttccatcaaacccttcccacttaagcaatagcccctgacctccaggcagaatgccctcataaattagcccttccgtaagaaaagtgcacgcctcagacagttgtgtggaggggcaggagcgtgatgcagacaaggacttagtcatgactgattttccttagcccagtttgtaatggcttatggggaacattgtgagcttcctacctgacatgttggcagaagtagaatattaggatcctcaagcatctctaccgtaagtccaaagaatttaggtccctattgtcactttgttttgcaatgttttttataaaaatgcaattaaatacctcactattaaactgccatgatgcctcagttaaaaaaaaaaattaaatgtccgtcagtgtctgaaa

SEQ ID NO: 157215 - DNA, 963 bp, Homo sapiens; identical to SEQ ID NO: 119782

SEQ ID NO: 157216 - DNA, 1281 bp, Homo sapiens; identical to SEQ ID NO: 119783

SEQ ID NO: 157217 - DNA, 937 bp, Homo sapiens; identical to SEQ ID NO: 119784

SEQ ID NO: 157218 - DNA, 909 bp, Homo sapiens; identical to SEQ ID NO: 119785

SEQ ID NO: 157219 - DNA, 1983 bp, Homo sapiens; identical to SEQ ID NO: 119786

SEQ ID NO: 157220 - DNA, 588 bp, Homo sapiens
tcagtgttccctggcctgagaggtgtagactctctctcctgcaattctgtaggcatgaatcatgcatcttgattccagctggtccctttcccgcttagaatttcttaaaatcatgaacatgtccagtagttcatttttgtcaatagaaccatttccatcagcatcatacagcttaaaataccattttaatttttgctccattttttcttgcatgattagatttacagcagcaataaactccaaaaagtcaacaaatccatcccgccgacaggcccctccctgtgtccatgtgttctcattgttcaactcccacttatgagtgagaacatgaggtgtttggttttctgttcctgtgttagtttgctgagaatgatggtttccagcttcatccatgtcccactgaacttcttcaatgcctttcttcttctgaatttcttcagattttgtcctcttctttcttgtcacatgataaaaaagagtagtagttagagacctttgaagtataaagggtgttccctccatttgggtcactttggacgtgacgtcatccttatcaatttccacaatgccaaggtagtgtctggccat

SEQ ID NO: 157221 - DNA, 600 bp, Homo sapiens; identical to SEQ ID NO: 119788

SEQ ID NO: 157222 - DNA, 858 bp, Homo sapiens; identical to SEQ ID NO: 119789

SEQ ID NO: 157223 - DNA, 696 bp, Homo sapiens; identical to SEQ ID NO: 119790

SEQ ID NO: 157224 - DNA, 2466 bp, Homo sapiens; identical to SEQ ID NO: 119791
  misc_feature (1)...(2466): n = a,t,c or g

SEQ ID NO: 157225 - DNA, 716 bp, Homo sapiens; identical to SEQ ID NO: 119793

SEQ ID NO: 157226 - DNA, 2286 bp, Homo sapiens
atggatgaagctggaaatcatcattctcagcaaactatcacaaggacagaaaaccaaacaatgcatgttctcactcataagtgggagttgaacaatgagaacgtatggacacaggtgtacaaggaaagctctccacataaggcagctgctgcccagggtgccggcaagaaaaaaggctttgtgaattactatggaccacagagatttgggaagggaaggaaagttcacacagaccaaattggactagctttgctgaagaatgaaatggatgctaaaggcacactttcattgatgcctgaattcaaagtgcgtgagagagcattgttggaggcattgcaccgctttggcatgaccgaggaaggttgtatccaggcatggttctctttaccccattccatgcgcatattctatgttcacgcatataccagcaaaatttggaatgaggcagtatcttacagacttgaaacctatggagcaagagtagtgcagggtgatttggtctgtttggatgaagacattgatgacgagaatttcccaaatagtaaagtggttcttccagtacttggatacaatattcagtacccgaagaacaaagtagggcagtggtaccatgacatacttagcagagatggactacagacatgtaggtttaaagtacctactctgaaactgaatataccaggttgctatagacagattttgaaacatccctgtaatctctcataccaactaatggaagatcatgacattgatgtcaaaacgaaaggttcccacattgatgaaacagctttgtctcttttgatctcttttgatcttgatgcttcatgctatgctaccgtttgtctgaaggaaataatgaagcatgacgtttaaaactgatacccttggtataaccatatatatgtcactctttgaaggaaagggggctaaaatgtcttaagcaccttccatgtgttaggaacttcataattgttatctcttttaattttcacagcatcctgagaagttaggatttgatactgtaattttatagaggatatgtaagtgtcagggtccaaatttaaggtccatgtgaccccaaagcctgtgttttttttctattatatgtttcagtgacctttattctgtgtcataaagttacaatcttttaaaaccattaggaatatatataatactgcaagataacatttaagaaaaaaagttgtgaatattcatatcctccagctccttgcttagaacactagtaaaattaggtcgcagtgaagcaaatgttggagagaaagatagatgaagcattttgctaattattattgtccccctttcctgtttttgaaattattgatcagaacaatatacaagggaaatgccatacctctgtttgtgatagataccccaaagtagttattacctctttgtgagataagtaatctttgatgaagattgaaatacaatttctcatccaatttttatatcttggcatacgctgaccctcttgaccatttgtaattttttcatattatctaaaacaggtgttagagtcagacagattcattcttagattctagctctgacacttactagtgattttgagtatgttgttgatttttttgtgtgtggttactgatagaatcaagacaattacaacttcataaatgacaaataataggattatctccacattttctgttgctggaggaacaaaacattgtgcccatttgaaaattttaatttttgttggtttaactatcgccacatggtaaatcatccttcgccattgtgatatcaattaaatatgggtgtgttggggaggaatgactggcatgtagacatgtattgatttaagaagatctgagcatttctttcattgttggtaagatataatgatgaaatttaaaaagcagtatggagcattatatatcagtaatgtgatatatatacttaagccagtttaaccattttggggaaatgttagcattagggaaataaaatccaaaagaagggaaggagaaggctatatgcaattgcaaatttgcttattgcaatattttgcatatacagacactaaaaacagttttcaaagtccagcattacgtaactaaagtaagtaaaatgatgtgtatcaacttgatggtaaaatatgtagttatttaaaaaagcaatgaacaatttagtttcatgagaaaatgttgccccctaaaagtagaacacatatgttacaactgcaataatactctgaattcatctttcacaaataagagacatgttagcatagtgattaaaagcaca

SEQ ID NO: 157227 - DNA, 2283 bp, Homo sapiens; identical to SEQ ID NO: 119794

SEQ ID NO: 157228 - DNA, 495 bp, Homo sapiens; identical to SEQ ID NO: 157017
  misc_feature (1)...(495): n = a,t,c or g

SEQ ID NO: 157229 - DNA, 721 bp, Homo sapiens; identical to SEQ ID NO: 123507
  misc_feature (1)...(721): n = a,t,c or g

SEQ ID NO: 157230 - DNA, 440 bp, Homo sapiens
cactggcatcgtgatggactctagcgatgggatcacccacactatgcccatctatgaggggtacaccctcccccatgccatcttgcctctggacctggctggccaggacctgactgactacttcatgaagatcctcaaggagggcggctacagcttcaccaccactgctgagcgggaaatcatgcttgacatcaaggagaagctgtgctacatcaccctggacttcgagcaggagatggccactgcagcctctagctcctccctggagaagagctaggagctgctcaacggccaggtcatcaccatcagcaaccagtggttccactgccccagtacctcttccagccttccttccttcacctccatcatgaagtgtgatgtggacatctgcaaagacctgtacgccaatacagtgctgtctggcggcactaccatgtacc

SEQ ID NO: 157231 - DNA, 439 bp, Homo sapiens
  misc_feature (1)...(439): n = a,t,c or g
tcccgggtcgacccacgcgtccacgcgtcgggagatcactgccctggcacccagcacaatgaagatcaagatcattgctcctcctgagcgcaagtactccgtgtggatcggcggctccatcctggcctcgctgtccaccttccagcagatgtggatcagcaagcaggagtatgacgagtccggcccctccatcgtccaccgcaaatgcttctaggcggactatgacttagttgcgttacaccctttcttgacaaaacctaacttgcgcagaaaacaagatgagattggcatggcnnnnnnnnnnnnnnnnnnnnnnnnnnnggnnnnnnnnnnnnnngggctggccccaggattaaaaaccggaaccgggaagggggacaccacccgttggaggggaccttccccaaaagtaaaaatggggcccggggcttttattggg

SEQ ID NO: 157232 - DNA, 443 bp, Homo sapiens
aaatcgtggaattcgagcaggagatggccaccgccgcatcctcctcttctctggagaagagctacgagctgcccgatggccaggtcatcaccattggcaatgagcggttccggtgtccggaggcgctgttccagccttccttcctgggtatggaatcttgcggcatccacgagaccaccttcaactccatcatgaagtgtgacgtggacatccgcaaagacctgtacgccaacacggtgctgtcgggcggcaccaccatgtacccgggcattgccgacaggatgcagaaggagatcaccgccctggcgcccagcaccatgaagatcaagatcatcgcacccccagagcgcaagtactcggtgtggatcggtggctccatcctggcctcactgtccaccttccagcagatgtggattagcaagcaggagtacgacgagtcgggc

SEQ ID NO: 157233 - DNA, 2119 bp, Homo sapiens
  misc_feature (1)...(2119): n = a,t,c or g
atgtcgacgcggccgcgacgcccgccgcagctggggcgatccacgggaagggcccggctcgcgtccagagtcgccgccgccgccggccccccgggtgcccgggcccccctcgcgggggaccgtgcccccgccgccggggccccgcggcgggccggcgccggcccctgccggcccgaccctttcccccccgccgccggccccacgcggggctccccccgggaaggggggaagacggggaaccggggaaaagagagagaaaaagggcgccgggcacagagcctcgcctttgccgatccgccgcccgtggccacccgccgccagctcaccatggatgatgatatcgccgcgctcgtcgtcgacaacggctccggcatgtgcaaggccggcttcgcgggcgacgatgccccccgggccgtcttcccctccatcgtggggcgccccaggcaccagggcgtgatggtgggcatgggtcagaaggattcctatgtgggcgacgaggcccagagcaagagaggcatcctcaccctgaagtaccccatcgagcacggcatcgtcaccaactgggacgacatggagaaaatctggcaccacaccttctacaatgagctgcgtgtggctcccgaggagcaccccgtgctgctgaccgaggcccccctgaaccccaaggccaaccgcgagaagatgacccagatcatgtttgagaccttcaacaccccagccatgtacgttgctatccaggctatgctatccctgtacgcctctggccgtaccactggcatcgtgatggactccggtgacggggtcacccacactgtgcccatctacgaggggtatgccctcccccatgccatcctgcgtctggacctggctggccgggacctgactgactacctcatgaagatcctcaccgagcgcggctacagcttcaccaccacggccgagcgggaaatcgtgcgtgacattaaggagaagctgtgctacgtcgccctggacttcgagcaagagatggccacggctgcttccagctcctccctggagaagagctacgagctgcctgacggccagggtcatcaccattggcaatgagccggttccgctgccctgaggcactcttccagccttccttccttgggcatggagtcctgtggacatccacgaaactaccttcaactccatcatgaagtgtgacgtggacatccgcaaagacctgtacgaccaacacagtgctgtctggacggacaccaccatgtaccctgggcattgccgacaggatgcagaaggagatcactgccctgggcacccagcacaatgaaagatcaagatcattgctccttcttagcgcaagtactccgtgtggatcggcggctccatcctgggcctcgctgtccacctttccagcagatgtgggatcagcaagcaggagtatgacgagtccggcccctccattcgtccaccgcaaatgcttctagggcggactatggacttagtttgcgtttacaccctttctttggacaaaaccttaactttgcggcagaaaacaagattgagatttggcatgggtttatttgtttttgtttgttttgttttggttttttttttttttttttgggttgaattcaggatttaaaaactgggaacgggtggaagggtgacaggcagtcggttggggagcgagcatccccccaaagtttcacaatgtgggncccgagggacttttggattggcacattggttggtttttttaatagtcattccaaatatggagatgcattgtttacaggaagtcccttgccatcctaaaagccaccccacttcctctctaaggagaatggcccagttcctttacccaagtccacacaaggggaggtgatagcattgctttcgtgtaaattatgtaatgcaaaatttttttaattttcgccctaaaaacttttttattttgttttattttgaatgatgagccttcgtgcccccccttcccccttttttgtcccccaacttgagatgtatgaaggcttttggtctccctgggagtgggtggaggcagccagggcttacctgtacactgacattgagaccagttgaataaaagtgcacaaccttaaaaaaaaaaaaaaaa

SEQ ID NO: 157234 - DNA, 393 bp, Homo sapiens
  misc_feature (1)...(393): n = a,t,c or g
ggcacgagtttgaagaaacttttggatgtggggcatcatccgcatctttctctctcctccaaatgacaaagtttggggaatttttgaattttcctagcatcgcccttgtgctcatcaggtaatctgctaaggaggaaaaaagaaaagaaaaaaggnnnnnnnnnnnnnnnggcaaaccaaaaccaaaaccaaaacccttaccaaaacccaaaagtagagagatttcccatataccttagggactttgaaaggccggcccttttagggcaccagggaggcctgggtgcaaaccatgttggctgggcccttcacggccctggagggaggtaaggctgcccttgaaaggcgtcccctgaaaaggtcttgggtgaaaacttgaccttgaaaaaccca

SEQ ID NO: 157235 - DNA, 473 bp, Homo sapiens
  misc_feature (1)...(473): n = a,t,c or g
gctccaggagaggcagctcccctgcccaagggtccttgggcagaccccagctgttgtctgcccagtacaagtgggtgggggtaggaggggatagggtgtccttgtgaacaatggatcccagcttagccccaaagaccaaccaaagagccagccagagtaagctggacctgcaacctgcctgagccccgtggcctctcagctctgcggacaccccgttccctccccagcttcctgcccaaagagccccacattcaagccaacttgagggaagggggcgtctcgtcagctggtccctgctagggagctattgatgtgcaatattagaaaggagacatgnnnnnnnnnnnnnnggggcggccgttttaaagaatcaaggtttacttacccgggcttgcaaggtaatagtttttttatgngggccccaaaatccaatccctggcccgccgtttaacacggtggagacgggaaaacct

SEQ ID NO: 157236 - DNA, 2150 bp, Homo sapiens
gatcattacgccagagcgctggaattacagatctttaaaaccttacactacctcagcaacctcatccagagcattatgacgcccctgggcaccaaagagaaccccgcccgggtctgcagggacctcatggactgtgagcagaccatggtggatggtacctactgggtggatcccaaccttggctgctcctctgacaccatcgaggtctcctgcaacttcactcatggtggacagacgtgtctcaagcccatcacggcctccaaggtcgagttcgccatcagccgggtccagatgaatttcctgcacctgctaagctccgaggtgacccagcacatcaccatccactgccttaacatgaccgtgtggcaggagggcactgggcagaccccagccaagcaggccgtacgcttccgggcctggaatggacagatttttgaagctgggggtcagttccggcccgaggtgtccatggatggctgcaaggtccaagatggccgctggcatcagacactcttcaccttccggacccaagacccccaacagctgcccatcatcagtgtggacaacctccctcctgcctcatcaagggaaagcagtaccgcctgggaagttggacctgcgtgcttcctctgacctctgacctcgtgggccactctagggcttcacggaggagggaagaggaagaggcaaggggagggtactgaggggcagatggcttccaggagaggcaagttccctgcccaagggtccttggggaagaccccagctgttgtttgcccagtagaagtgggtgggggtaggaggggatagggtgtccttgggaacaatggatcccagcttagccccaaagaccaaccaaagagccagccagagtaagctggaccctggcaacctgcctgagccccggggcctttcaagctttggggccaacccccgttcctccccagcttcctgcccaaagagccccacattcaagccaacttgagggaagggggcgtctcgtcagctggtccctgctagggagctattgatgtgcaatattagaaaggagacatgaaaaaaggagaaaaggaaatgacagaagtgtatatatatattatttaaacaaacaaaaagaaggtgcgttactattttttttttcacccgggaaagaggtgagaaggatgggaaggagcagccaggcgtgggaaacggcgagatccctcgggctgggggtgccccacgtttgcctacctccccactgtgaaatcgctggtgcctcacaattgtctctcacagtgtatgtgattttttttaaggaaaacacaaaaacatccctatttaagattctgaaggtgctaccattattttgccacagactttgaagaaacttttggatgtggggcatcatccgcatctttctctctcctccaaatgacaaagtttggggaatttttgaattttcctagcatcgcccttgtgctcatcaggtaatctgctaaggaggaaaaaagaaaagaaaaaaggaaaaaaaaaaaaaaaaagcaaaacaaaaacaaaaacaaaaaccctaccagaaaccagaagtagagagatttaccatataacttatggacctttgaaaatgtctgtccttttaaggcagcagggaggcctgggtgcgaagcatgcttggcttggcccttcacggtcctggagggaggtgaggctggccttggaaggcgtgccctggagaggtcttgggtgaaaacttgaccttgaagaaaccaatcacaaaagcggcgttgggtcagggctaggcttagaggtgaagcatcaacatggaaccatctcaggaagccgcatcgcctcttccgaggtcctcacttccagggagcctgtccttgcaagatgcaattcatcgttcctgctttttcattgttcattaaatttcttgtaagaaacccatttgttcatttagctccaagtgttaaatttggggtcaagggagacaagaataattaatgggggaatctcggagttccgacaccatagtgaacgtttcagcgtccctctgaattgtggctacatcagcggaacaagttcggcgcttggaattgggttttgaaggttattttaaaccatgggaattatttttaattaggaagggggaaaatgtatgtggaaatctt

SEQ ID NO: 157237 - DNA, 594 bp, Homo sapiens
  misc_feature (1)...(594): n = a,t,c or g
atgacatcagtgcacagtgcagatgacggaaacatttggcagcatcctctccagtgtggaggtgatgaccgagatttagtggagtttaacttgggtagtcccaagaatgtgggtcccttccttgcagtggaccagaagcacaacatcctgctcaaataccgctgccatggtccacccatccgcttcacgactgtctttagcaatgagctccattatgtggcgaatgagctgaatggcattgtgggagggaagacacagtgcaccttccctttggaagtgtacatccggcggctcaggaacatccgtcgagcagtggttcggctcctcgatcgaagcccanagaccgtggtggtcatccggacggccaacgcccaagagctgggacctgaggtgagccttttcaacagcgactggtacaactttcagctggacaccatccttcggaggatgttctcaggggttggagtatatctcgtcgatgcctgggagatgaccctggcccattatctaccgcacaagctgcatccagatgaagttattgtgaagaaccagctggacatgttcttgtcctttgtgtgccccttggaaacctag

SEQ ID NO: 157238 - DNA, 2456 bp, Homo sapiens
atgcctcgccctgcttcggcttgcgcacgtttgaaagctgaatggctctatagtcaaggcaaggggagagcatatcggcctggccagcacatccagcttgtccaatatctggctacagtctgccccctcacttctacacttggtcttcaaactgcagaggatgccaaactagagaagattttgagcaaacagaggtttcaccagaggcagttgatgaaccaaagccaaaatgaagagttgtctcctcttgttcctgttgaaacaagggcatcccttattcctgagcattcaagccctgttcaagattgccagatatcccaggaaagtgaacccgtcattcaagtgaattcttgggttgggataaacagtaatgatgatcagttatttgcggttaagaataattttccagcctctgtacacactacgagatattctcgaaatgatctgcacctggaagacatacagacggatgaggacaagttaaactgtagtcttctctcttcagagtctacttttatgccagttgcatcaggactgtctccactatcacctacagttgagctgaggctgcagggcattaacttgggcctagaagatgatggtgttgcagatgaatctgtgaaagggctggaaagccaggtgttggataaggaagaggaacagcctttatgggctgcaaatgagaattctgttcaaatgatgagaagtgaaatcaatacagagtcaactgagcagaaacaatcagacataaagaaaccagaaaatacacaaccagaaaataaagaaaccatatctcaagcaacttcagagaaacttcccatgattttaacccagagatcttgttacttttgggacaagacaaagttgcccttcagaaattaaatgatgcagccaccaagcttcaggcctgtggcgatttagtggagtttaacttgggtagtcccaagaatgtgggtcccttccttgcagtggaccagaagcacaacatcctgctcaaataccgctgccatggtccacccatccgcttcacgactgtctttagcaatgagctccattatgtggcgaatgagctgaatggcattgtgggagggaagaacacagtggttgccatagctgtatggtctcacttcagcaccttccctttggaagtgtacatccggcggctcaggaacatccgtcgagcagtggttcggctcctcgatcgaagcccaaagaccgtggtggtcatccggacggccaacgcccaagagctgggacctgaggtgagccttttcaacagcgactggtacaactttcagctggacaccatccttcggaggatgttctcaggggttggagtatatctcgtcgatgcctgggagatgaccctggcccattatctaccgcacaagctgcatccagatgaagttattgtgaagaaccagctggacatgttcttgtcctttgtgtgccccttggaaacctatcctgtcttggaagggactggaggaatcatattcaatgaccttctcaattgacctgagttacagaaagtggccccagagagagatgactgcccttaataagtataaaatttcaaaaagatctggacttaatatgatgacttataaggagcttagaaaatgcaggctacatttatatctacctataggattttatccaatgttgacttagccatggtagaactcttaactgcatctacacactatattgctcttgtaaccaaagatgctaatgagtgtatttgaattagcttctcctaggaggggtgactactttgctaaagagtatgaaaaatgttttgatggaagggacaagtttggttggtagtagagtgtttgtagcttatctggtaaaggaaattgagtgcatctgcatgcatagcacaagtaatccatcttctggcggttaactagagaaagcttatagtcagaggctcttgtgaatgcactgaagactgctgtgtctcaggagtttctcttgatgatctaccttttctgaattacttgaaaaggccaactgtgcttggttcgagttttttagtgaatatttacaatttcctgcttttatctagaaaagaagcaaaagggaaatatgaaagcagtatatataaaatctgtgctttggaattgatatttgcatttggtgattgttttttatttgattcagctaaattttatgtgttgaatacttactctagaataactacttttggaactggaagggggaaatctgtaaatggaaatttatttttatgttctgaaatttgagggtttaggaatttgacttttgtgtaaagaatgctacggtattataaagctgtggaagttttttccactagtttcaggtgtttttttttgttgttgttgttgttgttattttgaactacttaccaaaattagaagttaaaatctaattagaaattaataagatactaaaattcatgacagttaaaa

SEQ ID NO: 157239 - DNA, 2007 bp, Homo sapiens
  misc_feature (1)...(2007): n = a,t,c or g
ggcacgaggcaagttcttaacatcaatgatcatgctcctgagttctctcaatactatgagacttatgtttgtgaaaatgcaggctctggtcaggtaattcagactatcagtgcagtggatagagatgaatccatagaagagcaccatttttactttaatctatctgtagaagacactaacaattcaagttttacaatcatagataatcaagataacacagctgtcattttgactaatagaactggttttaaccttcaagaagaacctgtcttctacatctccatcttaattgccgacaatggaatcccgtcacttacaagtacaaacacacttaccatccatgtctgtgactgtggtgacagtgggagcacacagacctgccagtaccaggagcttgtgctttccatgggattcaagacagaagtcatcattgctattctcatttgcattatgatcatatttgggtttatttttttgactttgggtttaaaacaacggagaaaacagattctatttcctgagaaaagtgaagatttcagagagaatatattccaatatgatgatgaagggggtggagaagaagatacagaggcctttgatatagcagagctgaggagtagtaccataatgcgggaacgcaagactcggaaaaccacaagcgctgagatcaggagcctatacaggcagtctttgcaagttggccccgacagtgccatattcaggaaattcattctggaaaagctcgaagaagctaatactgatccgtgtgcccctccttttgattccctccagacctacgcttttgagggaacagggtcattagctggatccctgagctccttagaatcagcagtctctgatcaggatgaaagctatgattaccttaatgagttgggacctcgctttaaaagattagcatgcatgtttggttctgcagtgcagtcaaataattagggctttttaccatcaaaatttttaaaagtgctaatgtgtattcgaacccaatggtagtcttaaagagttttgtgccctggctctatggcggggaaagccctagtctatggagttttctgatttcccctggagtaaatactccatggttattttaagctacctacatgctgtcattgaacagagatgtggggagaaatgtaaacaatcagctcacaggcatcaatacaaccagatttgaagtaaaataatttaggaagatattaaaagtagatgagaggacacaagatgtagtcgatccttatgcgattatatcattatttacttaggaaagagtaaaaataccaaacaagagaaaatttaaaggagcaaaaatttgcaagtcaaatagaaatgcacaaatcgagagaacatttacatttctatcacattgacatgaaaattgaaaatgtatagtcagagaaattttcatgaattattccatgaagtgttgtttcctttatttaaaaagaatgctaggtaatcttagtagaaaactaaaaagtatgataaacaacagatggaagaattcatggaaaatagacgagaaaaagtaaataaggctttctggagatgacggaaattttgtatgaataaaagccttataaacaatgaatacatttggataaacaactcattaaaatgcacattaatggaatacctgtacaaatagttttaatacttgtgtccagtggcactaaagagatatattaaaatagattctggttgagttgattataagattgtcaatcataggatacacagggaaagcacagacacgattgctcatctctttggtagtctaaaatatgttccttttaaccacatcaaaagatactatctggattctaatacagaaggtggcaacttcctagggaattatactttgtattatattcaattaattattttatgttttgcatcacctggggtggttggccaaggaacacagctcttggaactaaaaagggcctttaccttaaggatttatttttggtaaatttttnaataaacctt

SEQ ID NO: 157240 - DNA, 447 bp, Homo sapiens
ccaatgattttatttgccatattagattttcattgatgtaatatgattaggatgattctacttaccttaaatagaatgtacagtatatataaaaaaatcccaaaaccgtagattggaataatttgccccatcagacctcttccactacctcctcctccagcacctccacctgatcctttggcctttgcaaatgcctcggcaaggtgagacctctggaaacgagccccaggagtctggccatctgagggtgcctggtgatgatgcatcataggtggaaatcggcccaattttccttcaggtgtcggcggcggctcctgccgcttcccgcgggacaggaaggccttgggcagcagcagcgacagagccaggacaagcccagaagccagagcgactctttgcactgtggagtacgccatgactgctcacggtggtcgcaggtgcagacgc

SEQ ID NO: 157241 - DNA, 1165 bp, Homo sapiens
ctgtctggaatgatgacacacagtcctatgtactcaacttccatgggcgcgtcacacaggcctccgtgaagaacttccagatcatccatggcaatgaccaaacccagagatgtgatacaattttgatctgacagaacaaatactggaatattttgggcttttctaataatcataggagcacagacttgtaaaagaacaaatgccacagaaaatgaggttaaaggacacaaactgggagtgcattgaattgtatcactcactggattaagaaccaaaatatccatgttcaagtcctagttctgccttgttagttgtgaattttggggcaaaacacttaaacattgagtaaacatttcttatgtgaaactgaaataatggctatcctaagtacctcatgaagaggaggcaggatttaaagagatgatggatttgaaataattttatgaactataagaagttttaatgtagacaatgatttttattgccatattagattttcattgatgtaatatgattaggatgattctacttcccttaaatagaatgtacagtatatataaaaaaatcccaaacccgtagattggaataatttgccccatcagacctcttccactacctcctcctccagcacctccacctgatcctttggcctttgcaaatgcctcggcaaggtgagacctctggaaacgagccccaggagtctggccatctgagggtgcctggtgatgatgcatcataggtggaaatcggcccaattttccttaaccgtcaaatccaatggctttttgtcagttctcactcttaattttcttcaggtgtcggcggcggctcctgccgcttcccgcgggacaggaaggccttgggcagcagcagcgacagagccaggacaagcccagaagccagagcgactctctgcactgtggagtacgccatgactgctcacggtggtcgcaggtgcagacgccagccggaaccggaaccggaaccggagcactggctgccgctcccgaccgaaccgcgggcggccggacgcgtcgcgcgagggacatagctgcgaggcgcacgcatcttcacctccactgtcgggagttgacctgctcctcccgcgtggttacccgtcgctgtaaatggtaccctcgccttcccgttcatactaactaaaaac

SEQ ID NO: 157242 - DNA, 603 bp, Homo sapiens
ttggggcgcacccagcgagcagcgagagtcgcggtgtcccgggcgctcgctggcaccgtggccgcagcggccggcctgggagccaggagggcgaggcggctgcaccttcggggccagattggagttcgaagagtggcgggtaccccagaagctcggggccggggcgatggctgcagcctcgggagggtatcgccggatcgaactccgggaaagggaagcaaaggcatggaacctccgcacactggatgagaatccatcttccattcgagctgggaatagactttgtgaaagatattatgtaatggagtctcgggaaccctgagacctctccagcgaagctgaagtgaattaattaagtgctttaaacggttctgggtgctgtgttacgggagagagtgactggaaagtaacaaagctgaatctttctccctggagtaaggccgaagactggattactacacgcctagacgtgacactacacccatagatctcatgcatcattaatgccatatgacattgccattttctttctcagttcacggacaaaagtggtgggttttcattgtcttcactgattgttcaatggcattaattaaagaagat

SEQ ID NO: 157243 - DNA, 2301 bp, Homo sapiens
gtcgaccggagggcaggaggagcaggaggagcaggagcaggaggagcaggaggagcaggaggagcaggaggagcaggaggagcaggaacaggaggaggaggaggaggagaaggaggagcaggaagagcaggaggaggaggagcaggagcaggaggagcaggagggagaggaggctgcaacgccgagcggaggaggcaggaaccggagcgcgagcagtagctgggtgggcaccatggctgggatcaccaccatcgaggcggtgaagcgcaagatccaggttctgcagcagcaggcagatgatgcagaggagcgagctgagcgcctccagcgagaagttgagggagaaaggcgggcccgggaacaggctgaggctgaggtggcctccttgaaccgtaggatccagctggttgaagaagagctggaccgtgctcaggagcgcctggccactgccctgcaaaagctggaagaagctgaaaaagctgctgatgagagtgagagaggtatgaaggttattgaaaaccgggccttaaaagatgaagaaaagatggaactccaggaaatccaactcgaagaagctaagcacattgcagaagaggcagataggaagtatgaagaggtggctcgtaagttggtgatcattgaaggagacttggaacgcacagaggaacgagctgagctggcagagtcgcgttgccgagagatggatgagcagattagactgatggaccagaacctgaagtgtctgagtgctgccgaagaaaagtactctcaaaaagaagataaatatgaggaagaaatcaagattcttactgataaactcaaggaggcagagacccgtgctgagtttgctgagagatcggtagccaagctggaaaagacaattgatgacctggaagacactaacagcacatctggagacccggtggagaagaaggacgaaacaccttttggggtctcggtggctgtgggcctggccgtctttgcctgcctcttcctttctacgctgctccttgtgctcaacaaatgtggacggagaaacaagtttgggatcaaccgcccggctgtgctggctccagaggatgggctggccatgtccctgcatttcatgacattgggtggcagctccctgtcccccaccgagggcaaaggctctgggctccaaggccacatcatcgagaacccacaatacttcagtgatgcctgtgttcaccacatcaagcgccgggacatcgtgctcaagtgggagctgggggagggcgcctttgggaaggtcttccttgctgagtgccacaacctcctgcctgagcaggacaagatgctggtggctgtcaaggcactgaaggaggcgtccgagagtgctcggcaggacttccaacgtgaggctgagctgctcaccatgctgcagcaccagcacatcgtgcgcttcttcggcgtctgcaccgagggccgccccctgctcatggtcttcgagtatatgcggcacggggacctcaaccgcttcctccgatcccatggacccgatgccaagctgctggctggtggggaggatgtggctccaggccccctgggtctggggcagctgctggccgtggctagccaggtcgctgcggggatggtgtacctggcgggtctgcattttgtgcaccgggacctggccacacgcaactgtctagtgggccagggactggtggtcaagattggtgattttggcatgagcagggatatctacagcaccgactattaccgtgtgggaggccgcaccatgctgcccattcgctggatgccgcccgagagcatcctgtaccgtaagttcaccaccgagagcgacgtgtggagcttcggcgtggtgctctgggagatcttcacctacggcaagcagccctggtaccagctctccaacacggaggcaatcgactgcatcacgcagggacgtgagttggagcggccacgtgcctgcccaccagaggtctacgccatcatgcggggctgctggcagcgggagcccagcaacgccacagcatcaaggatgtgcacgcccggctgcaagccctggcctaggcacctcctgtctacctggatgtcctgggctagggggccggcccaggggctgggagtggttagccggaatactggggcctgccctcagcatcccccatagctcccagcagccccagggtgatctcgaagtatctaattcgccctcagcatgtgggaagggacaggtgggggctgggagtagaggatgttcctgcttctctaggcaaggtcccgtcgtagcaattatatttattatgggaattc

SEQ ID NO: 157244 - DNA, 605 bp, Homo sapiens
gcacgagctcaaggaggcagagacccgtgctgagtttgctgagagatcggtagccaagctggaaaagacaattgatgacctggaagatgagctctatgcccagaaactgaagtacaaggccattagcgaggagctggaccacgccctcaatgacatgacctctatagcgtctctacagccaacttgagcgaaaccgcctgctttctaatgagctgaagctaacgctgcatgatctgtgtgactgatgggcagggctcaatgatgcccattaaactgagcttactgctcacaccactgacctggaccccaacaaaaagctgattgtctttttaaaagttattattttgccctgagcaaattgcattttaattggggcagttagaatgttgatttcctaacagcattgtgaagttgaccattgtgaagtttctgtccctttagaagagattatgggtgaagaagggaggggcctgagagattatagtgagaaaacttgcgagaattttgttttccacccttatttgctgctctttcacttgggcactgactgtaggatatgttcccttgcatggatgtttttaacaataaaaggactgacttgaaaa

SEQ ID NO: 157245 - DNA, 1065 bp, Homo sapiens
atgatggaggccatcaagaaaaagatgcagatgctgaagttagacaaggagaatgctctggatcgggctgagcaagctgaagctgagcagaagcaggcagaagaaagaagtaaacagctggaggatgagctggcagccatgcagaagaagctgaaagggacagaggatgagctggacaagtattctgaagctttgaaggatgcccaggagaagctggaactggcagagaagaaggctgctgatgctgaggctgaggtggcctccttgaaccgtaggatccagctggttgaagaagagctggaccgtgctcaggagcgcctggccactgccctgcaaaagctggaagaagctgaaaaagctgctgatgagagtgagagaggtatgaaggttattgaaaaccgggccttaaaagatgaagaaaagatggaactccaggaaatccaactcaaagaagctaagcacattgcagaagaggcagataggaagtatgaagaggtggctcgtaagttggtgatcattgaaggagacttggaacgcacagaggaacgagctgagctggcagagtctaagtgttctgagctggaggaggagcttgaagaatgtcaccaacaacctcaagtctcttgcaggctcaggcggagaagtactctcaaaaagaagataaatatgaggaagaaatcaagattcttactgataaactcaaggaggcagagacccgtgcctgagtttgcttgagagatcggtagccaagctggaaaagacaatttgatgacctggaagatgagctcttttgcccagaaacttgaagtacaaggccctttagcgaggagctggaccacgccctcaatgacatgacctctatataattatcaccgcgttctgctctgttctggatctgccccctttactcctcggggaaacccaaggcccccactctcgctctggattccatttgggtcagcctggctggtccccaagggcattaggatgggggagcaaaaagcaacttatgtattttcttccacccccaccccaaattaaaatgttaagctgctggaaacctca

SEQ ID NO: 157246 - DNA, 642 bp, Homo sapiens; identical to SEQ ID NO: 121735

SEQ ID NO: 157247 - DNA, 1713 bp, Homo sapiens; identical to SEQ ID NO: 121733

SEQ ID NO: 157248 - DNA, 1206 bp, Homo sapiens
atggcccgttctcaatgcgctgttgggtacacctcccagacagtgctaggccagccagcagcagcagtgtggagccttgggggccacctgctctgccatgagcactgcattctgccctctccctgggctgtgtcccagcaccccaggggcagcatgcaggaccagcagaaccattgcaaatggaatactgaagaagaaagagatgacaagaaaatgccttcagcgaagaagagaaagaaatctgaagaaatgaaaggaaagagtggatgctttcaacatgctctttttgaatttggagctgtagaaaaagccatgaaaggaagttacttaaactctaagacttcggttctcccatttcaatacctggacatcagaggcagatgcagtcaagggaaggatcataaactttctttggaaagagaccatcttactaccaagccagtcgggggcttggatcttgccctaacagcaactgaaggatttgaggctttttctgaaaaggcagccccaggtcctagggaaacattcatgggcaaagtacaagagggaccagtggattttaatgggaataagtatgaagagtttattgatatattttcagatcccatgttgcaacaaacctcgaagatactgccccttagcagtgaggcgggaccagaagagctgaatacttctgtctaccagcccatagatggatcaccagattatcagaaagcaaaattacaagttcttggggccatccagatcctgaatgcagcaatgattctggctttgggtgtctttctgggttccttgcaatacccataccacttccaaaagcacttctttttcttcaccttctacacaggctacccgatttggggtgctgtgtttgtcataaaagcctcaattattggacaatattgcatagctagagaaagaaaagaattcactcaccccgtaggacgacttagttgtctaagacagaaactgtataatggtaccacagaaacagtcacttcgtggagttcaaatcacacagagagaaatccatttagtaaattcccaaagttgcgaaccgtgtggacccatccagagtcccaccgggactggacagcccccactggattatactggatatgtgggcatagagcttttgccaaattacctgacgagtcggcaggaattggtggacctaaacaaggtgctattggaattaaggaatag

SEQ ID NO: 157249 - DNA, 232 bp, Homo sapiens
tgatttttaactactgggtttaggccaggcaggcccaggcctggttttgggcctggcgctgggctgcctgtctttggttttacttccttgttgttttttcttaaaacaggtactgagtatcaaacaatataaaacaatataagaaggtctctctcttccctcaattctagctgcaagttttgagcactagacagcagaaataaattcctaaaatgttgagttgagcaaatag

SEQ ID NO: 157250 - DNA, 2169 bp, Homo sapiens
atgctaagtattcagtctacacatgcagagaaagaattagagaactttttccaaaacactgaagactggtatttccacacttcacatcacctttcttccctaagatttttctctgcgagggaatcaaactgctctatgaagctctatgaagaggcttatatggaaagatacagagactttctgccagcaaccatgtggtcagcccacacagaagtggatgttccaggccaggccacttggataaaacaaaaaagtgaaaaggatccagtccaccttcagaaaggaaaaaatggcccctcctgtaccaaaggacaatgtaaccccttagagctagtaataaccaatccccttgatccttgctggaaaaaagaggagcgtgtgaccttaggaattgatggggctggactggatcctcaagtacatatcttagttcgaggagaagtttacaaacactctcctgagccagtgtttcaaactttctgtgatgaactaaatgtgccagtaccagaaattccaggaaaaacaagaaatttgtttttgcaattagcctggcatgtagcccagtgtctcaatgtcacttcatgttatgtatgtggaagaactataataggagatcaatggccacaggaagcccaagaattagtacctacagacccagttcctgatgaattcctggctcaaaagaatcaccctgataatttctgggtcctaaaaccctcaattattggacaatattgcatagctagagaaggaaaagaattcactcaccccgtaggacgacttagttgtctgggacagaaactgtataatggtaccacagaaacagtcacttggtggagttcaaatcacatagagaggaatccatttagtaaattcccaaagttgcaaaccgtgtggacccacccggagtcccaccaggactggacagcccccactggattatactggatatgtgggcatagagcttacgccaaattacctgaccactgggcaggtagttgtgttattggcactattaaaccatctttcttccaactgcccataaaaacaggtgaactcctgggcttccctgtctatgcttcccgcaaaaagagaagcatagctatagaaaattggaaagatgatgaatggccgccccctgagagaatcatacaatattatgggcctgttacttgggcacaagacggcttgtggggataccagacccccatttacgtgctcaaccgaatcatacggttacaagctgccttagaaataatcactgataaaatcagcagagccttgactattctggcctggcaagaaactcagatgagaaatgctatctctcaaaatagattggctctcgactacttgctagcagctgaaggaggggtctatgggaaatttaaccttactaattgctgtctacacgtagatgatcaaggacaagtagttgaagatatagttagagataggacaaaactggcacatgtgcccgtgcaagtgtggcatgaatttgatcctggggccatgtttggaaaatggttcccagcactaggaggatttaaaactcttataataggagttttaatagtaataggaacctgcttactgctcccttgtttgctacctgtacttcttcaaatgataaaaagcttcatcgctaccttagttcaccaaaatgcttcagcccaagtgtactatgtgaatcactatcaatctattgcacaaaaagacataagtagcaaaaataagagtgagaactcccactaataaaaagtgagagtctcaaagggggaaaatgaggaaagagagcgaccctctcatattgttttatactcagtacctgtttaaagaaaaaaaacaaggacatgaaatcaaagacaggcagcctgatgccaggcccaaaaccaggcctgggcctgcctggcctaaacccagtagttaaaaatcaactcataacttagaaaccgatgttactcatagattcccaacattgtataaaaagacaattgtgcaactccctgccctgttctgtttctctgaccaccagtacatgggaggccctggtaccgtaccccctgctggctcaaatcaatcacgaccttttcatgtgaaatctttaggcgtgtgagcccttaaaagggacagaaattgtgtactcggggagctcagattttgaggcag

SEQ ID NO: 157251 - DNA, 448 bp, Homo sapiens
atatctcttggaattaatgttatttttaatgcagtaattataaatataaatacctgctgcgtttttggagggattggatatttaaactctccctatttattttgcttagggaactccaaattcagctaatacccaaggaaattcaacaccaaatcctcaggtaattttttttccatgtcgtgcttaccttaaaataagattgtaaaaattacagcagtggtataaaacaatttccatgtctccaaaaacaaaatgatttcatctacaagacacagtgcgttaaattgtctgccactgcaatgtaagaactcaactcctgaagaacattttaattcttttttagagagagaaaacgacacctgactttatttcttgttttccataatgaatcaatgacagaatcaaaatgacagactttatactctaagggctgggagcaaacattttg

SEQ ID NO: 157252 - DNA, 380 bp, Homo sapiens
cggacgcgtgggttttataattaagatgttaaagtcctgtggggtcatttcagaaaataatcaggactgtaatgatttttcagtctttccagtgtcagcctgcctttagctaagataattccaatagtaaacggacagatccattcagtttgcagtgaaacacctagtcattttgttcaggtaagaagaaagcttgggagtgttattaaaagcaaattatatttgtggtggtggtcatgtttgtctaacataaagttacattctctgctgagaggttttttcaaaaaatcacagaacttggaactacatgtagagtatggtagagtgtcccatgagagtaataacggaccatagcaaatgtgtaagtttggagtaccttt

SEQ ID NO: 157253 - DNA, 1986 bp, Homo sapiens
gaaacagtttcctggtgaagcagtccctcacccctagtcagcccacacccctagggcctaaagatgctgaggtctgtatggaattttctgaaacgccacaaaaagaaatgcatcttcctgggcacggtccttggaggagtatatattctggggaaatatggacagaagaaaatcagagaaatacaggaaagggaggctgcagaatacattgcccaagcacgacgacaatatcattttgaaagtaaccagaggacttgcaatatgacagtgctgtccatgcttccaacactgagagaggccttaatgcagcaactgaattccgagagcctcacagctctgctaaaaaacaggccttcaaacaagctagaaatatgggaggatctgaagataataagtttcacaagaagtactgtggctgtatacagtacctgtatgctggttgttcttttgcgggtccagttaaacataattggtggatatatttacctggataatgcagcagttggcaaaaatggcactacaattcttgctcccccagatgtccaacagcagtatttatcaagtattcagcacctacttggagatggcctgacagaattgatcactgtcattaaacaagctgtgcagaaggttttaggaagtgtttctcttaaacattctttgtcccttttggacttggagcaaaaactaaaagaaatcagaaatctcgttgagcagcataagtcttcttcttggattaataaagatggatccaaacctttattatgccattatatgatgccagatgaagaaactccattagcagtgcaggcctgtggactttctcctcgagacattaccactattaaacttttccataaaacagaagacatgttgggaagcccagattttagacagtttttgaatacctgttttaaaccgaggttttagtagacttctagacaatatggctgagttctttcgacctactgaacaggacctgcaacatggtaactctatgaatagtctttccagtgtcagccctgcctttagctaagataattccaatagtaaacggacagatccattcagtttgcagtgaaacaccctagtcattttgtttcaggatctgttggacatgggagcaagtgaaagactttgctgctaatgtgtatggaggcttttaggtacccctcagcaactggagaaatgatttttccttcaagaaaaactacagtgggattcatttactttttaaaatacactgggtaaatcacctatacttagagtaacagtttgttatcaaaatgcctgataaaatatattcttaataaaagtcttcatttcataatgaaatcaatttatttggcatcttaatatatttttttagattcatcaacagaccagtttttgtgggcatatatatatacacgtgcaaatatcagaattgttaataatttgttacacatggacatttgttccaaactgactaaaaatcaatatagatattttatatacatatatatatatataaatacaaaattcagtgtactttaccatattaatactgaggaaaaatctgttggagacataggtctaggatgtgtgaagtttggaaaaatatgctatttaattataatgttccctagactgctgtaaacagaagtgaatcagacttttctccagctacctttcaaaataataaattatttgtctcaaatataccttgatggaggacttttttattcttatggaaatggtgaattccaacaactatgatgaactatgttctttgctatttcttcactatattttttaaggttttattaaaaagccttagaaagttacatattggtttagaggctaaaattgtgttgatgctgtttactcacctaattacatagttttaatcatttgtacataattttaaaaacttactttgtattgattttgaatacagtgaaaatcttattgcaataaactattttagtaaaaaaaaaaaaaaaa

SEQ ID NO: 157254 - DNA, 867 bp, Homo sapiens
ttaatacagcagaaaccagtcactgagttccaccttttcccgttgccctcttccttcctccagccccgctgccaccttcccaagcacttgacctaggtgcatggtggggccatggtggaggtgcactgggtaactgaatggttccttctccatttggctgttccagcttggagccgtcggggccgaaggaggcacggggattggccaactggggctcttaaggcacattggcttgactgagtgcccttggtgtaacaaggagaaagtatgattatgaggtgcaaagggtatctctgactgtgagctgaatgcttgtgcccatagtagtggctgctggtcattgggtcccttgaccccttcctttctctggttccccacatctgactgtccgcaaatcctgtctggtccacactgtacatacacagggataagaccaacacttctacatgctccttcttctcctgcctgagcctcagtcggccttgcctggcttactgcagtttctcccacctgttcttctgtgtccacacctgctctgcagcccatccccactggcagtggagataccatgatcacgaaggtggttttcccagggcgaggcttatccatcgcactccggatatgctgacccctgcgattttcccaaatgtgggaaactcgactgcataatttgtggtagtgggggactgtgcttgcgctttcccctctgctggcatagtcaatgtacatctgtgttaacatggataagccagtccaatctggatgatcaactagatgcaggaaagttccagagtcgtcttgaactcttagcaacacccattgatcacaggctaacttgtattttctgtagaggtggggtttcgccat

SEQ ID NO: 157255 - DNA, 1332 bp, Homo sapiens; identical to SEQ ID NO: 119171

SEQ ID NO: 157256 - DNA, 1024 bp, Homo sapiens
tgcctcctgcagcaaccaggccagggggaatctggattcctattacacttctgaggaaggtggtcagggagtgtggaggatgtgggtgggagggggtgaggttgagggcaggagtacactgtggtcttctgtcttctacctcattggcccaggtgctgctctccctccggttgtctgctttcagccctgcctgggaaatcaggccggcgccctgatcttcctgactctcattttgtgaggaacctgaacggatgagccatcgctcttgtcccacacgttctgtccaaaaggtgccctcctctctgcttgctcgggggcctgccctctgagctctggcactcaggctgggatgccgcccagtacagaggctctgcagccctgcaggggtctgactgttccacaccagcaggataaaggccacagggcatgctgtggtggaaggctctggcagcagattggtcggttgagtggcagaaaggcagacggggactgggcaaggcactgtcggtgacatcacggacagggcgacttctatgtagatgaggcagcgcagaggctgctgcttcgccacttgctgcttcgccacgaaggagttcccgtgccctgggagcggggataccatgatcacgaaggtggttttcccagggcgaggcttatccattgcactccggatgtgctgacccctgcgatttccccaaatgtgggaaactcgactgcataatttgtggtagtgggggactgcgttcgcgctttcccctgccttactggaagttgaaaggtagttgttattatgatcggtgctgggtctggtacgtgtggtgtttaaaacacgggctgctgggcagttcgctttcgttttcacgtttttgtgggggtagggcgattgcagctttttttctcaccccgcgggggatcctttagtaacgcgccaattatactgtgggtttatgttctccagggtattgtcgtgaaaacgtcacgatctcgtgctttctccaggccaaagccgcgtttttcctgcaag

SEQ ID NO: 157257 - DNA, 2489 bp, Homo sapiens
atgactgtgccagagctggctggggagactgagcactgtcagtgcttgattaataatgtgctgatgtatggacagccgtatcgtgttaccttagagcttgagctgccagagtcccctgtgaatcaagatttgggcatgttcttggtcaccatttcctgctacaccagaggtggccgaatcatctccacttcttcgcgttcgtgtaatgtgtacaattctggccaacggcggaagctattgctgttcaagaccttctctcggaaagtggtggtggttgtccctaatgaggaagattggaagaagaggctggagttgaggaaggaagtagagggagatgatgtgcctgaatctataatgctggagatgaaagctccagttccatcccaggctccagccccagctgaagctgagctggtccaggtgaaagttgaagctattgtgatctctgatgaagagactgatgtgtcagatgaacagcctcagggtcctgagagagctttcccatctggaggagcagtgtatggggcacagccctcccagccagaggcttttgaagacccaggggcagcaggactggaggaggtggggccaagtgaccacttcctgccaacagaccctcatctaccctaccatctgctgccaggtgcagggcagtatcatcgaggactggtgacctcacctctgcctgcacccgcatccctgcatgagccactttacctgtcttctgagtacgaagcagctccaggaagctttggggtttttactgaggatgttcccacctgcaagacatgtgggaagaccttctcatgctcttacacactacggcgacatgccacggtgcacacacgtgagcgaccctatgagtgccgctactgcctgcggagctacacgcagtcaggggacctctaccgccacatccgcaaggctcacaatgaggacctggccaaacgcagcaaaccagatccagaagtgggaccccttctaggggttggactcttcacagaaattgggcccatgtcttgcttcatctctcgacatgatattgtgattcagcaggacgatgagatccgcttaaagattgtggggacccgtgtggacaagaatgacattcttcacttgctccttcacttcccagttccgcaagaaccgtgggcgacagttatggagaagcgtctgcaggaggctcagctgtacaaggaggaagggaaccagcgctaccgggaagggaagtaccgagatgctatctccctagagcacgaaatcctgctgcacccgcgctacttcggccccaacttgctcaacacggtgaagcagaagctcttcaccgaggtggaggggacctgcacagggaagtatggctttgtaattgctgtcaccaccattgacaatattggtgctggtgtgatccagccaggccgaggctttgtcctttatccagttaagtacaaggccattgttttccggccatttaaaggggaggtcgtggatgctgttgtcactcaggtcaacaagttccaggatccatgtgcaggatatgcaggctcactggctgatagttgcctggcggaccgctgtctctgggatcggctgcatgcccagcctcgtttgggcactgtccccaccttcgactggttctttggatacgacgaagtccaggggctcctactgccattgctgcaggaggcacaggctgccagtcctctgcgagtgctggatgtgggctgtgggacttccagcctatgtacaggcctctacaccaaatctccacacccagtggatgtgctgggggtggacttttctcctgtggctgtggcccacatgaatagcctcctggagggtggcccaggccaaacacctctatgccctggacaccctgcctcaagcctccacttcatgcacgccgatgctcagaacctgggggctgtggcttcttcaggctctttccaactactgctggacaaaggcacatgggatgctgttgcccggggagcccgaggacccgcccccgagttgcgattggcccgcggaaggccggggcggagccccgcggatccggcgctgagcggaagtacggaccgtgaactggagtggaatcgcgactatgggagctccggggggaaagatcaaccggccccgaacggtgactgtgtgggggccgcgactttgtttcctcaagcgttcctgagcccttttatctcgcacgagatgggatcagagctgaagaagaagctgttcaaacgccggcgggtgttgaatcgggagcggcgtctgaggcaccgggtggtcggggctgtgatagaccaagggctgatcacgcggcaccacctcaagaagcgggcgaaccaccagctgctgcatcccatggccaggggtggcgtccaggtggcagagcagctaggaacgcaaggcctgaacctggggccagacaccctgctctcccggccatggtcaacgaccctccagtacctgccttactgtgggcccaggag

SEQ ID NO: 157258 - DNA, 547 bp, Homo sapiens
aatttctgtgaagagtccaacctgcaaggaggattgagaaacaggaagacactgtgtgtccaagagcctctaaagacatctgcaataaaagtcgctgagctcttgggggtagggtcggggagagcaaaaggacaagtagatagcacctctgctcccagagagcttaatgaccaaaagaagacagaacagagatcagtatgtgtaagaccaaatgctgttctggtaatttcacaataaatgtccaagaaggctggagtccttgaggcaacagatctcaatcttcgggatgcctgagaatcatcttcttaaaatgcagattctcaggtctgccccagacagtcttgattttccctgtgcaggtcccctccacctcggtgaagagcttctgcttcaccgtgttgagcaagttggggccgaagtagcgcgggtgcagcaggatttcgtgctctagggagatatggtagaacatcttcccagaccaggtaggcaggcagagtccacacctccgacagtccctgggaatccaccggaaacacttagacgccgc

SEQ ID NO: 157259 - DNA, 433 bp, Homo sapiens
attttcaagtgagcaaagaccgctatggagggcagccacttttctcagagaagttccccaccctttggtctggggcaaggagtacttacggagtgacaaagggaaaagtttgctttgaggcaaaggtaacccagaatctcccaatgaaagaaggctgcacagaggtctctctccttcgagttgggtggtctgttgatttttcccgtccacagcttggtgaagatgaattctcttacggtttcgatggacgaggactcaaggcagaaaatggacaatttgaggaatttggccagacttttggggagaatgatgttattggctgctttgctaattttgagactgaagaagtagaactttccttctccaagaacggagaagacctaggtgtggcattctggatcagcaaggattccctggcagatcggctatccgt

SEQ ID NO: 157260 - DNA, 681 bp, Homo sapiens
tttcgtcaagcgcggaactggggttgcggcgtctaagtgtttccggtggattcccagggactgccggaggtgtggactctgcctgcctacctggtctgggaagatgttctaccatgtgagcagggctcagggtggcggcaagggctgggtggaaaggaagagcaaggccaggcgccggcgcgagactccccttgtcgtccaataacctgccagcgcctggcctggtcgccatcccacttttctccgcagatctccctagagcacgaaatcctgctgcacccgcgctacttcggccccaacttgctcaacacggtgaagcagaagctcttcaccgaggtggaggggacctgcacagggaagtgagtgtcgagctcaccgcaccgccagatcgttcgatgcgcacacggggcgctatacctgcaacccctccccaactcctactcgtcctgccacccactctggggacccctctcctctctcaggcagccagttgcttcctgctttgggttcccagggcgccctcttgcatgctggacaataagacttccttctctcagctgagatgggtcattcattgactcctcaaacattttaaaaacccttggtgtgtgccaggacccgtgttgggctcagaacaaggtagaatgggaacaagatagaatgaggacagcccctgtggag

SEQ ID NO: 157261 - DNA, 2539 bp, Homo sapiens
  misc_feature (1)...(2539): n = a,t,c or g
gcccagacagcatgctggacttttgcaaggcacattaggggtgcggccactgctttctggctgctgtggctgaatcggcctgaggggaaaatgaaagcaaaaacaagccccagttctactaggaaacccaaactgagcaacttcaggcttatccagctcctgggaagaccaggaagcaactgaggagcggtgcaccgagacggacagggtcgggggttaaccccctgccgctaatatttccgctccaaagggagcctctcctttcttggcaaaatgtagaaacctagattccctcgcaagatccacgcgaccagcgtcggccacgctgtgcttcctggggtccccttgtttagtgattcttcgttatggccgcccgtgtgccttcgactcaatcgggaggacaccgaaatccagatttcggggttgcagggcgcgggccccggcttggttagggcaggggcagccattttgagaccagaagagggcggaagggaccatattgagaacgccggttgcctgggggccgccattttaagagaagccctgtacggtaaactccgtgacgtgggggctgccatgttggtacggccatcttggaatgggagtggctgtgggcgcagccatcttaggtataaaatcggctccagtcgcggtgaagatgaattctcttacggtttcgatggacgaggactcaaggcagaaaatggacaatttgaggaatttggccagacttttggggagaatgatgttattggctgctttgctaattttgagactgaagaagtagaactttccttctccaagaatggagaagacctaggtgtggcattctggatcagcaaggattccctggcagaccgggcccttctaccccatgtcctctgcaaaaattgtgttgtagaattaaacttcggtcagaaggaggagcccttcttcccaccaccagaagagtttgtgttcattcatgctgtgcctgttgaggagcgtgtacgcactgcagtccctcccaagaccatagaggaatgtgaggtgattctgatggtgggactacccggatctggaaagacccagtgggcactgaaatatgcaaaagaaaaccctgagaaaagatacaatgtcctgggagctgagactgtgctcaatcaaatgaggccccgcagcaacactgtaaaagtccattgtcgccctcccatgaaggcaaactgttccaggctctcggtggattgtctcagttccgttgtcaaatggtccattaagtccgtgacagacagcacagctgccgagccatgcaaaacatccgcccccggagtgtcctcagaaaaggctttacacttccgccagctgcagcgggtactttttgaactggaactcttgggcaggaccgggttgcgcagcaatgtccttctcccgaatgacttgcaggactgggcatgcacctcccaccagcacagtcacaaacgcccatctgactctgcggcaaaggcatacttctcggtgctgtgcacttccaggtgcttcagctccttctccacactcatgggagaccagtgcaccgtctcccacgtttccactgggacccatccaagcagcaccactgccaccagatcctgtggtcaaggtccagcccatgctgaagtccgaggggagtgggtgaatgagcagaaagaacactcagggagccgtaggcagatctccctagagcacgaaatcctgctgcacccgcgctacttcggccccaacttgctcaacacggtgaagcagaagcttcttcaccgaggtgggaggggacctggcacagggaagtatgggctttgttaattgctgtcaccaccatttgacaatattgggtgctgggtgtgatcccagccagggccgaggcttttgttccttttattccagtttaagttacaaagggccattgttttccaggccattttaaaggggaggtcgtggactgctgttgttcattcaggttcaacaaggttgggactctttcacagaaattggggcccatgtcttggcttcaatcttctcggacattcccatccccttcagagatgggagtttgatccctaacttccaaccccaccatgtttacaagaccaatggatgaggatattgtggattcagcaggacggatgagatccgcttaaagattgtggggacccgtgtggacaagaaatgacatttttgcttatgggctccctgatggaacgattacttgggggctgtaaagctgagcctggtggccttcctacccttgggtcctattttaggaagtgtgattgtgcacacttatcgatgttgtccagaggtccagtctggctgctgttgtggaggcaaggaaggcaaactcatcccagaaggcatttggtggcttctggaggctgaactacggcctcttcattttccggaaggtgttctaagtttaaaaagtcctttggttctcatgaaaaaaataaaacacagaacctattgtttcntttttcccttttaaatttanntttttcaatttccttactcgagaattgttttttat

SEQ ID NO: 157262 - DNA, 939 bp, Homo sapiens; identical to SEQ ID NO: 126917

SEQ ID NO: 157263 - DNA, 1026 bp, Homo sapiens; identical to SEQ ID NO: 126918

SEQ ID NO: 157264 - DNA, 1137 bp, Homo sapiens
gagtttcactcttgttgcccaggctggagtgcaatggcacgatctcggctcactgcaacctccacctcccaggctcaagcaattctcctgtttcaacctcccaagtagctgggattacaggtgcccaccaccacgcctggccaatttttgtatttttaatagagacgggtttcaccatgttggccaggctggtctcaaactcctgacctcaagtgatccacccacctcggcctcccaaagtgctaggactacaggcatgagccaccacacccggcctagtatttttttttttaagagatggggtcttaccatgttaccaaggttggtctcaaactcctgagctcaagcgatccacctgcctcagcctcccaaagtgctgagattacagggcccgagccaccatgccggcccaacataacttttatatgcactgcaaaacaaaaaaatccctgtgactcactttattatgatattggctttattgtagtggtctggaacccaacccacagtatcttccaagtttgcctgtacattttagctatctattattaaacaacttagtggcttaaaactacaataattttatttatttgcttgtaattttgcaatgtgggctcaaatagcctttctttgcttcacacgcagtcacctgaggtggcttcagtgggctggagaatccacttttttaaatgggcttctttacgtggctggcaaaagttggtgttgactgctggctgggagttcaactgaggctgttggcccaaacctcagttcttcttcacatggttggttgggcttttcacaggcagtaagtctgagaagtcaaacttctaacacagcagctggcttcccccgaatgcaaaaacagaagctatcaggccttcttaaggcatagtcccaaactggcataacatcacttccaacgcattctactattgattaaagcaagttacaggcccaatcagactcaagagaagagaactcctaaaggtgcaaatattgggaagcctggttcatttggggccaccaaagtagcagtgtactgtaagatagtcaccctgccaagtgttctgtagctgtatatttgtaattacttataattgaattgagttttaaaagtaatctctaaaaaaaaat

SEQ ID NO: 157265 - DNA, 412 bp, Homo sapiens
cactgctcgagtttgccaatgtatataaattcagtaagcataaacccaggcttctgtgatattctcaaagcctttttcgcgcctcttgtataaaagtctttcgatgttaccactccaggccgtggtgaaatgttttccttctgtttatttccaggggatgcaggtatgttctgctactcctggtgcccgagcgtgtatcacttagtgtagtggtgatgactgcagacattttgggctgttgcggtaggctcttcacgttacctttgttttcacgtgccctttgtctgtttagagtttgtggcagtcatttctttacccaagaatcacctgctgcagagtcttgatggtgagcattctccagcccgccatccagttttagcagttctcccagtccccatcccatcattttggg

SEQ ID NO: 157266 - DNA, 750 bp, Homo sapiens
cccccctcgagttttttttttttttttttgtggttaaaaggtaagtttttatatgttctgtatattttacataatacgcagattcatatctataaaaatatacatactatcgaatatgctttaaattttgctacttaacattatgtggagaacaataacttcatactgctcgagtttgacaatgtatataaattaagttagcagaaacccaggcttctgtgaaattctcaaagcctttttgacgcctcttgtataaaagtcttccgatgttaccactccaggccttgctgaaatgttttccttctgtttatttccaggggatggaggtatgttctgcaactcctggtggccgagcgtgtatgacttagtgtagtggtgatggctgcagacattttgggttgttttggtaggctcttgacgttagctttgttttcacttgcactttgtctgtttagagtttgtggaagtcatttctttacccaagaatgacctgctgcagagacttgatgctctggtagctgaagaacatctcacagtggacgccagggtctattcctacgctctagcgctgaaacatgcaaatgcaaagccatttgaagtgcccttcttgaaattttaagcccaaatatgacactggccatttttgtaaacgagaccaccaggccttcttcactaagactttgtattcaacttagtttaatgtagatttgccattagctttttcgtaaaataaaagcacagaacaaaaaa

SEQ ID NO: 157267 - DNA, 1131 bp, Homo sapiens
atggagagccaagaaccaacggaatcttctcagaatggcaaacagtatatcatttcagaggagttaatttcagaaggaaaatgggtcaagcttgaaaaaacaacgtacatggatcctactggtaaagctagaacttgggaatcagtgaaacgtacaaccaggaaagagcagactcgggatggtgtcgcggtcatccccgtgctgcagagaacacttcactatgagtgtatcgttctggtgaaacagttccgaccacccaatggggggctactgcatagagtcccctgccaggcctcaatagatgatggtgaaacccccagaaagcagctgctctcccgggagcttgaagaagaaactggcctacaaaggggaccattgcccgaatgttcctcccagcggtctgtatgggaccccaggcttgtccaaactgtacctatacacatcgtgacagtccacccattaacggagatgatgccgaaaacgcaaggccgaaacccaaagcccaggggatggagagtttgtggaaagtcatttctttaccccaagaatgacctgctgcagagacttgatgctctggtagctgaagaacatcctcacagtgggacgcccagggtctattccttacgctctagcgcttgaaacatgcaaatgcaaagccgatttgaagtgcccttcttgaaattttaagcccaaatatgacactggccattttttgtaaacgagaccaccaggcccttcttcactaagactttggtattcaacttagtttaatggtagatttgccagtgagctttttcgtaaaataaaagcacagaacagatgtggtggtggtatgtgaattgtaattacaggtaggttgtgaccttcctttaaatttgttataacttccagctaaaatttaacaaagaatataaatggcaagttatgtttactccaatttttttaaagctcaacagcagttaactacagctcagttacttttctagtccagtctggtagacaggggtatttgtatagagaaatagacctgagttctcaattaggtcatttccactctcaacccccaatataaaattctaagctgggtatgcaaataaccatgaactccgttagtgtttaaaacagcgttaa

SEQ ID NO: 157268 - DNA, 618 bp, Homo sapiens
tagagatggagtctcactatgttgcccagagtggtctcaaactcttgagctcaagcaaagctcccaccttggccttccaaagtgcttggattacagatctgaaccacgacacctggccctgggctctacttttcataaagtttcacattttagactttaaatccaaacccagaaactatctcaacaagagttaataaatagactcaactctggggaatttttaagattacttttttgatacgtaaagtggcatagtcacacataggaaggcaaggaattttttttatttatactaaaaaataactaaaaaggcactatttccctaacatttttgaaactttgacttaaaagcacttctacagagatcaactgtaagtggtctgaatcataaaccaaaatgaaaagcacatacatcaaattgaaagcatataactttgatttacctatttttgaccatataatttgaaatgaccactctctctccctgctcagcctttgtcttaagtaattatgttaacatctcaagtctccttcaaactgtcaatatttttcccaaggaggaaatgctactgcatagctgatgatgcccaggcatcaggcttctgcattcctttcttt

SEQ ID NO: 157269 - DNA, 2145 bp, Homo sapiens
  misc_feature (1)...(2145): n = a,t,c or g
ccactcagcgaggatcagaggacagcactgcaggaggtgtacacactggcagagcaccgacggacggtggcagaggcaaagaagaagattgaacaacagggaggcttcacctttgaaaacaaaggagtcctctccgcatttaattttgggactgtgcccagcaacaactgaaggaaagaacatcagctgaccaaatgtcatcgctgcattttatttcacaagaggagtgtgaggggtcaaggggatgaaatgaggggctgcttttaggggcccctccctgctgtgcccagtacccatctggcattagggcagcacttttatcctactctttccccctttgacctttgtcaccctgaaatttatattttaaacagctactgtaagtatgaaatgaaagaaaaacaatcattggacggaaaaggacaaaccatatgttccaaaggctgaatgcccaaggttgttttagaggattggatagacttgcacgtctcaggtttttgccatgcagaatcaatggatttatgcggataacagtgccttctgttgtacatgaattatcagaaaaaaattttttggagtgcattgcaattttttttaaagcataaaacatatttctagatacaacataaaccttggttatatgtcaactattctgcattttactccgtgaatttattgttaggcagttactgcaagtcactctggtttcaaaatcttcacggctccctctgctcaccctgctgctggggggcttttttcaggggttgtacttataaaatatgcactggctgtggtttttcataagatgttttgtggctttttaaagaagtgtcttactccctcttctctcatttttttctgccttgaaaaggggtggtatttcttttgggggtcaacaaaatacacatatcagtttcactcctaacctggtaagttcaggactcattttcttggcagcaagtggcaggggctctttagtcactggagttaacagtaagtctgagtatattctgaataatgtaattatgcaattaattgataatcatacctaaagcacattgaacttctaagagacaggtgctacgtaagcacactgtctttcttggatggggacttgtattttaaataacttatcattccaagcatatgttggactagggtccaaaagcattttataatatttttttttaatctagggaaaaagacccaaacaaatctaacttcttgctttctcacctatttgaattttctcctacctaatttgtttgtgtctttattatagctcagtttgacttctcaaacttttcaagggttgggggcagctgcacttttagggttggcctataggaaaatattggcatatgggaggatttacagtggttttttcggacctagtttcaaggaccagaacatgggtcataaggtttttattcagcaaaatgaaaaccgtatcttcagaacttaaccaatattactggatgtgagatacagattttgctttctgtgggaattgaaaatttcacaaaaattcacagcttaatttccccatcagtgactggaggaattttttttcaggtgcttcctatattacccatccctccgtgcatattaaccctttaggaatttagggttaagtgatgccctataggaagttgccctggaaaacccatggagttttgggaagttccagtgaccccccctgcctttccctctgccccctccctttccccaagggcatttgaaggctggaatggtgnccaactgggcagtttaggaaggcgaaagatggcaattgggagccaattttagagagcttttcaaactcctttattcctccatgttcccacatggtcctaatttttaaccataaataataatggccttcacactgggattgtaaaaggccatgtgatttttgagattttattttgtgatgtattggtccttctgcagtattaaaagggaaagaggtattaatgtgcattaccctttcttgtttttgaagccagggtaagttgtatggattttgttacccagcagtgctaacctgaatgtgacctggttaccttggaaatgcaggaacttatatgaatgtactataaaataaaatgcggactgattcccaggaaaaaaaaaaaaaaaaaa

SEQ ID NO: 157270 - DNA, 549 bp, Homo sapiens
gacggatctttcatattgtggagaatgatctgtacatagattttggtggaaagtttcattgtgtatgtagaagaccagaagtggatggagagagtcccatttcgtggtatgctgtttggaggagattttcacaagtgatgataacctgtttttcttccaactctgactttggaaaacatcgtaaaagataaagaagttgtaatacaacatggatgaaccctgaaaacattatgccaaatgaaagaagccattcacaaaagatcatatattgtatgattccatttatatgaaatgttcagaatagacaaatccacagagacagaaagtagattagtcatccccagagtctagaataggggagggggagagattgctaatgagtacagggtttcttttttggggtgatgaaaatgttctaaaattaggttatggtaaaagctgtacagctctgagaatatattcaaagtcactgaattatacactttgggtagattttatgatatgtgaattatatctcaataaagcttttaaaagttttagtaaaaaaaa

SEQ ID NO: 157271 - DNA, 906 bp, Homo sapiens
gaggtaaagaagtcatggcggcgctgtgtcggacccgtgctgtggctgccgagagccattttctgcgagtgtttctcttcttcaggccctttcggggtgtaggcactgagagtggatccgaaagtggtagttccaatgccaaggagcctaagacgcgcgcaggcggtttcgcgagcgcgtatggagcggcacgtcggagcttctacagaaggtggagcccctacagaaaggtggagcccgggcggggttctcccaaaaaatgtggaatcctttgcatctatgctgagaccattctccctcttaccacagatgggaccctgcaaacgactaaactggtccattggaccggatctttcatatttgtggagaatgatctggtacatagattttggtgggaaagtttcattgtagtatgtagaagaccagaaagtggattgaagagaaatacccagaaaggaaccagggtccggtttgcggctattagatcttgaacttacgtctaggttcctgggagcaacaacagattacaactgtactagaggctaaatgcagttctctttgggaatccaggaagaagtaaaagactcaagattcgaaaagaagaacatcatgaaaaaataaaatggaactttgcttaagtgggattgactccctttgctgaagtccagttaattccatccaagaatgccaatttagactaattgtgatataaatgattgaatgaagatataataaataaaagctataattatagataactcttattagaattttctttagcaatattcccaccccccaccccttgttttgctcttaatgtttttttcctttggtggggatagtatacactgtactaagaaattgtcattcaataaatacgttttgagtggggtccacaaaaaaaac

SEQ ID NO: 157272 - DNA, 756 bp, Homo sapiens
aacttttttgagaagatggggtttcaccatattgcccaggctgttcttgaactcttgggctcaagaaatctgtctgccttggccccccgcctgcctcgggattacaggcatgagccactgtgcccagtcaagttggctttttaaaaataactttaaatttctgtggtttcaaagagccagagaccataaaccatcccacagttagtttctcactcattagctatagacagatccttctgcctcttgggcttgggtgtttctctattccttacccgaagattatttaaaaacgaacacatggaacccttctgcgaacaggaaggaatcagtgtgtagactaaacttacatttgccacctgctttcatgttcaactaaacaacttaggaactcaaagaacccaccctccctaaagtacaaaaaggaaatatccagagcaatccccacacttttacccattattttccagacttttcctttatactcaaggaaaaggaatataccagaacaattgaacatacagaaaaaaattgactaacaaggtctctttttattttcctgtcagtaggaagactcacttttttttcaggccctgaggaaaaaaaaggtggttggctctgcagaagccttttgtcaggttgcaaaattcctaacagactcctaaagaggtaaaaaggagcaatgacatggaaggagggagtacaaagtgagtcagctagaataaagctggttgcttgggaaacatttttcttccagtt

SEQ ID NO: 157273 - DNA, 5949 bp, Homo sapiens
ggaaggggacgaggacaacgagcgactgggcggcggaggacgaggaggaggaagaggaggccgagcaacaagatggcccctgctgcaggagcagcctcagcagcagcaggtgggaggccggagcggtgctggcggtggcggcggcagccgtgggcccggcggcctgggacagaatcagagtcaacggtggcctcggcggcggcggcggctgccgcggcggtggcgacggccgcggggactcggagctgagaggagctgctgctcggaccagcgcggtgagcgagcggcgggcggcgacttggggagcggggctgccgcggccggggcctcagtcgggaacaataggcagctgtggtcgggaagggtttgtcctcgcccgccctctgctcctccgcggcagcggcagcccggccggccccaggctcctcagggcccccgccggctgttctggggcttgtcagtggccggcgtcctttaggcctcaggcctctgcatgccgcctgtagggcctgtcggggtaggtaggccgagaggaggacgaagggaggctcggacgagagggagggggcgaaagggctacctggctcctgtggtactcccagggcctgggccaggcggggaatgcgcacgggaactgctttttggacccctagtctgtgggggtgggggagggcgaaggcgtctgtaaacaggcgccgcctcggcctcccagcacctcagggctgcttcctcccccagcccctgaagcgctccccttctttggccaagtggatttcacggtgtctgtttccctgaagtccctggagatctagcctggtagtcttctccctgctggcgatgggaaaattgtgtgtgtgcaggtgtctttaaaaaaaaaaaacaaaaaacttaaatgcaacaaaaacatataaaatgtggttatcggtaaaggatggagtggtaagggatgcgcctctctaaacatctctaagtatcagttctataaacatcagttatgcccgcatcccaggtgagagtggattgaaacaagggctcttttggaacagtaataacacaactcttgacataccagaatagcctatgaaactggaaacaaacactggcaacgcggagacaaactgtaatgtttaaagaggacttttattccagctaggcgttttgaattactaacatgcagtataagaagcaacattaactagcataaagtggacctcaggaagcacttcgaaaggagacaggtggttcatctccggccatagagcttcttgtgccttgtctcgtgtttcagtaatttttcctgaaattgttcaagaccagtcttttctctgagtttgaaatttgatttcgtttttgttttgttttgcgacggagtcttgctctgtcacccaggctggattgcagtggcacaatctcggctcactacagcctccacctcccggattcaagcgattctcctgcctcaccatccggagtagctgggattacaggcgcccgccaccatgcccggctgatttttgtatttttagtagagacggggtttcaccatgttggccaggctggtctggaactcctgacctcaagtcatctgccctcctccgcctcccaaagtgcttggattacaggcgtgagccacctcgctcagccttaaacttaatttttcaaggcttctaccacattttcttacaagtgagggaaaaggtagatttatttctaaagtactttctacctaggtatgcagaaatttatattaaaatcgcttggatacatccaaggagattgcttttcacttgttaacattcaactgcaaggcctaagggttataggttgtgttcttttcagcactgacctgtgctgaaaagatgccagttaatatctttcacctcttctaagggtaaatttctaagtagaattggtccaagtctgttctaattaaaaacattataagcagcactagtctagttcttagttcttccacaacaattgacactgaatagattagcaattgaataaacataaaggttgaattttcttgtttaggatttgaagtatagtgaatgaatatcaatactgaccttcattttatgcttagcataaataatgttggagatgttttgattttttgaatgatggagaaataacaactttctatggctcctgatgttgtgacttttttgcagatatttcagaaaggacaccgtttttcaggtgctcaaatctgtgatttttttttttttttctgtgctaattttgttaggtcagcacagattccaagtaaagtctgtgttataatgatacttaaatttatgtatggccctaaacctattagaacaattgtagtaatttataggttgtaagttttaagtggttcatgtgctgtgttatgaaaacaatctcaccgtgttatgtcaagggcagatttacctcatatttaatatcattttcctgaaaataaatatttttaagtggtaaggttttgtatttcagattggttattgacccagcaatttatgggcttagtctgggtccgtatttctgttcaataggaaaaaaaatttagggaattgtttttatttattttgtgtcaaaacagttttaagttttgacacaaactcaactgtcccttcttcagtatcaatacttattacttaagttcacattttctcaggtaataaaaatttacttctaagaagttttggaaccagagcttaagaattagatttatattttcttggtaatattaaaagttaatatatgcttgatttatttgaagaaataaaaaagggtaatttgtacacaacgcctttcagaacatatttgttgaatgaataaaaatatttaagcttcctcattatgctgcagtattagttctgttgtcctcattttttcatatgaagaatgtgaagctaagagtagctatgtaaccagcaaaaagatcacataattaataggtaaaagagcttactcagactcagatcttgtgacacaaattagattctttgccactaccacatgtgtcacagttaaactttgaagcatcttctgtgttgacagattcctttttttgcctgtgaacttaccctattatcattatttgtatcctgtcagatatctacttgtaagaccaagaaagtatttgttcatgtgaatcacaaaagaaacacttaaatttttgtttttagcatatctgaatgctataaaatataaaaactcatactgtttacataggacagatttatcatactgctgtaattgttttcatggttaatttgttacataggcaattactaaattgtgcctttgaaatactttataaatttttttaaataattaaagatattcaatgatgttaaagttgggtcagctaatatttgaagttcttaatttataattttttttctttaagccatagataatttagaattctgcagtatttttcatctccagatcttagggcttgaaatggattctgatgggtctaatcagtccactcttgcatatatcttgaaaatggtcagcatccaacaaagtgaagaataaactgataaatgatccctgtttggtgaacacctcagatcaggatgttccttggcagggtattctgacctggtttagctttggccccgtctgtgctcagggttcaggtattctgcaggattgggttcagagggattaaaattctcagattggcctgtatcaaaacagtcacagattttggtcagccttttcccagaaccgtctccaagattttttcttttgtgtaattctggaatctaggctggatttggactagctttagaggttatgataaaagattaattttgtcaggcatttatacaaaggaggttttcttactacagagtttcttaaggtagattccttctatttttgaagtgtgacatttaccaatctgaagtaatgttgccctacatcccccagacacttaactttagcatatttatttctgtccatttttggtcaggattgtgcctgtttacttatataatattcttgtttactttttgtttattagatacttcttattagtttatattgttttcctgattgaggcttggggaaagaattttcctcaaatttaaagtcaccttacttatttgcagatgtatgtcagagcaatattcttttgacagttatcaagcattttagcaatgctgtatgtatatattatgaatgaatgacagagtcactcatggtctgtcacccaggctggagtgcagtggcattatcatagctcacttcagcctcaaactccttggtttaagtgttattcccgccttacctggctactttttttaatttttattatttttatagagatagcattttgctgtgttgcccagggtggtctcaaactcctgggagcaaggtgatcctcccacttctgcctcccaaagtgctgagattacaggcataacaatgttttaaactgacactggtataccttcactgattattactgtgcacatgtggtaataatttaacttataagtgcattttatctaaaaaatttccaagatctaaatagcatttgaacatggtagcagttttttttttttttttttttttttttgagcaagaaaagagttctaaaggggtcagttttatctacagattaacataattttttttattgaggttaagtcacataacattaaccattttaaagtaaacagtttaggtggcactttatacattcacaatgttgttcaaccaccagctctaattccagaatgtgttcattaccccaaaaggaaacactgtacccattaagcagttactctgtattcccctcttccctaatccctagcaaacgccattctgctttctgtctctaatttgagccaacatcgaggaagagtactctgtacaattgaaattgcagaaaaaactttgggatgtgattgttaggaataaaaaaccacctaattctttgcatgcttctctaaggtacagtaggacatgctgccaggggactctttatgggaaggaaaagttgaggacttcataggaagtttggcagttttgtttaggatccaccccagagggtttttggctccaaactcttaggactcatttgtatttcttcattgggttataagaactaaaatttaatgttctatacaaatgtgaacaactaatacttggtctcctatctagaacttgtttgccttttaggttttcttaatgtatagaagaaactaggaatattcacaaaggatttatttgaagttacactgggaaacgatttttagaatttgaagctctttgatccctgtgaatctaactttatgactattttattcagctaatctttgagaatatttagagttttgatttgcgtggcactctgcttttaatcccttgttgaataagtgttagaaaccttgatcttggccctatacctgatcacctctaaaaacatgaacagtgttacaaaggcagttgtttagtaagcttttttggattgttttaattggctgactgagggagacaaaattagtttttttttttctttctagaataaagggtaataaacttggactttagagttactgctaagattgacatttccatttggggctttagaaatatattgttatcttaaattccaaaatgggtacctttatcctaattgaattgaaatccttaaaatttatgagaaacaaaagtcactttatgttcttagtaaatatttctaatggggttataggagatctaagtacaaaaaaaatttaaaattttgttattaatctcccctccttaaggaaaattttattaatatacataattataatttagttataagaacaacttaagttgagtacagtggctcaagcctgtagtcctagcactttgggaggccaaggcaggaggatctcatgaagccaggagttccagaccagcctgggcaatagagtgaaaccccacctc

SEQ ID NO: 157274 - DNA, 1137 bp, Homo sapiens
ggaatagtacaacaattatgagccgtcacagcctggtaagtatagaagaagaaggcctggatatggtgaacagagaaactgcacatgaaagggaaatgcaaacggcaatgcagataagccaatcatgggatgagagcttgagcctgagtgacagtgattttgacaagccggagaaattatattctcctaagagaattgacttcactccagtttctccagcaccttcacccaccaggggattcggaaagatgttccgtgagcagcagtggattgccaccaagtccagttcccagtccaagaccgattttcaagcaggagaagtcagagtccaagtcaagtgcattaagacccaagtgttcttgggtcctcttaaaaagaaaaaggtgaaatggagaccagaaagtcagccccaagagactctttccaaaggcactaccaatatgttatctccagatgccgcgcaactgtctgatctcagttcatgttcagatattttggatggcagtagtagcagcagtggcttatcctcagacccgctggctaaaggcagcgctaccgcagagtctccagtagcatgctccaattcatgctcttcgttcatcttgatggatgatctctcacccaagtgacttaaccatttctgattcaacgttttaactgctgtttcctacataaaatgtttagtggggaacgcagaggaacttggatccataatggaggattaaagttttacagatttcacacacttggaaggtaataataactctttggcatctctcttctcccaaagttcaattttgtgagcctagtgaccttactagtatctggttttgctgatctcattttggatttagtgattaaatctcaaatgctgatttttgattgcttagaggaatcttttttcttagtgcctcaaaaaacacctattttgagtctatacatttaagaaaggcactgatgtgtattgcctttaatggtccttttccgcagcagtgatatgacagatttgatcagaaattctcttgcttgagagatttttttttgtcctctgttgactacatagtttcaaatctctctttatttcatgatgatatataaattgcttttaattatattaaatttttatttttctgcatc

SEQ ID NO: 157275 - DNA, 347 bp, Homo sapiens
aaagaaaagggtagattttaaatgttctcacaacaacaaaaaatgataagtatgtaagattcttaaccacagttgatgtacctcacaggaagagcttctctttcaagatgtgtagctgcccgatgggttcttcctgcccactgcacaaaaaaatcagttcatggagaccatggcaaaatagtttccaaattcaggagaaatcaggcagagagaaacaaatatgctccaaattttgttcataggagtataataacttgttaaaagctgtcaatagctcaaaagaaaagtttcttgactcctgtggcaacaacagtgttctttgctcttatgtgatggatggacccgtc

SEQ ID NO: 157276 - DNA, 404 bp, Homo sapiens
taagctttagtgatttattgcatagaataatgactgtattaaataataatgcattgtatattttattttgttttgttatttattatttttgagacagagtctcacaatgttgtctaggctggtgtcaaacacctaggctcaagcgatcctctgggccccatcctcctgagtagctgggactacaggcatgtaccaccataccacaccatttgtatattttaaaattgcttgtgtacgatgctcacgatctggctgacaggatcattcactaccccaaacctcagcatcacacaatatacccatataggcaagcctgcacatataccccattaatctaaaggtaaaagttaaaaatactttttgcaaaataacaaaataaataaataaaattgctaaaagagtgg

SEQ ID NO: 157277 - DNA, 1166 bp, Homo sapiens
ggaaggggagagaaggagtacatcagataagaaggaatgagaagagaaggtgggagagacgcgagagggagagaggatcgtagagagaagggagaagagaatggaatgtcttaggaagtagtgaatagtcgtggaagatgtcagtgtaatacgatgtagtttaataaaatccagggaagtggggtggatggggaaagcggagaagttcatccaaagagtacaaagtttcagttagacaggaaaaataagctttcaccgatctattgcatagaataatgactgtattaaataataatgcattgtatattttattttgttttgttatttattatttttgagacagagtctcacaatgttgtccaggctggtgtcaaacacctaggctcaagcgatcctctggccccatcctcttgagtagctgcccgatgggttcttcctgcccactgcacaaaaaaaatcagttcatggagaccatggcactgcagtaaagaaagaggttaattgaccatgatgcccagcccacaccatgtgggacggcagagttattactcaaatcaaactcatctaaaggcttggaggttagggatttttcaaaggtaatttggtaggtagcaggctagggtatggggagtgctgattggttgggtcagagatgaaatcatagggtgtcgaagctgtcctctttctctgagtcgcttctgggtggggacacagaagccgttggctggtcccggtggagccatcggtcatcagacatgcaaaatcctgagaagatatctcagaaggccaatcctaggttctacaaaagtaacattatctgcaggggtaactgaggaagttgcatatcttgtggcttctggaataacgcctcacaattgtttttgtctacaccttagcagaatttaggctcctctcctcctcctagcctggtggtctctcagtattacaagggtggttgagtttcggggaagggttattataatttaaactatcaactaaatgactcccacatgtagcttggcttaaacccaggaataagtaaaagcagcttgaaagctaaaggcaagagggaggttggctagatcagctttctttcactgccattattttctcactgtgataatttttgcaaaggcggtttcagatgtgattggatttttggatac

SEQ ID NO: 157278 - DNA, 578 bp, Homo sapiens
cggcacgagggtcttgctgtctgaggggtggcagaggcagaagtattgcttgaacccaggaggcagaggttgcaatgagctgagatcgcatcactgcactcaagcctgggcaacagagcaagactgcgtctcaaaaaaaccaaaccaaaccaaaacaaaaatccatgaacaagtggacctgcccagttcaaatcattgttgttccaaggggtcaattgtatattattttcactggtaagttttgaaattccagaaatatgcttggaaaatccccgcttgaaatcttccttggttggaaaccagttccagtgggtgactggtcccagaatgatgtcttctcctcggtggaccccctgggcttgagcagcctgtgtttcctgcctcaacttcccttgaaccctcttgaactttctacacacatgtggggcactgggctttgatactgggcatttggaaaggggcacttggggaaattcaggaggaagttacccattattaagataaatgatgttttatcaatgaagcagacttttcatttctttttattgatcttcatgttttcacatcttgagatgcaa

SEQ ID NO: 157279 - DNA, 564 bp, Homo sapiens
tcaatatgtgaggccgatcagaacgcctatgctgccgtccaggtaccagaccgccgagtcatgcttgaacacttccgcgctcagaagaatggagaagcccatcacgccacccacgagggagttaaacccctgctctgccaccaggcaagctttaggagggggcagtggtccaggatgtctggaaagcctgtgatggtactggaagtttccagttccacagcgcaaatcttgaattgtagggtcctgtgaggggctttccatgcgctccttttgcatatagctctgggaggcttcatctcgggggagctctcgatggaccggagggccccgaggtccagctcctggaggactcgggtgggcttcctgaatcgccagcggcatcagcaccttgtcgccttgcgtataatatttgcccatggtgaaaacgggggcgaagaagttgtccatattggccacgtttaaatcaaaactggtaaactcacccagggattggcttggttggtttctgggctcctgcggcaactcgtagcgaaggctttgagagcacccacatgggccaggcat

SEQ ID NO: 157280 - DNA, 385 bp, Homo sapiens
ggattttgccgatttcggaaccaccatcaaacaggattttcgcctgctggggcaaaccagcgtggaccgcttgctgcaactctctcagggccaggcggtgaagggcaatcagctgttgcccgtctcactgttcgtaactctcttcgtgggtggcgtgaggggcttctccattcttctgagcgcggaagtgttcaagcatgactcggcggtctggtacctggacggcagcataggcgttctgatcggcctcaccatatttgcctatggggtcaaggaattcatgtccacggaacttggccagcttgatcagctgtggaagtttgatcagcttcccaaagggcacagtatggtgaattttaccagaggtcccaatgatggaagatga

SEQ ID NO: 157281 - DNA, 1443 bp, Homo sapiens
gcggccgctgtgcactctgcccatagggagtacatagcctgtgtcatcttgggggtgatattccttctgtcatccatatgtatagtggtcaaagccatccatgacctctcaactaggctgctcccagaagtggacgatttcctgttcagtgtctccattttaagtgggattctttgcagcatcctggccgtgttgaagttcatgctggggaaggttctgaccagtagagcactcataacagatgggtttaactccctcgtgggtggcgtgatgggcttctccattcttctgagcgcggaagtgttcaagcatgactcggcggtctggtacctggacggcagcataggcgttctgatcggcctcaccatatttgcctatggggtcaaactcctcatcgacatggtgccgagggtgaggcagacacgtcactacgagatgtttgagtgaagggggccagcatccgcatgagaccatcgagatgaggagtttccacataggcaaagggtgccaatatttaactgaacatctggtttctttttggaagttttctttcacatggtttgtcattacaagacaaggtctgcccagccaggtggatctaccttgcccccatcacctgccgcccccatcaaacatgttgggacaatgcccataggaatggacctccttccccgtctccagctgggactggcgttttttagtctctggagtatgatggttctcatgggtaggatgagatctttggcagaaaggtcttcggtggtgctctgagcctgcgctgcataggactgagcagacccacctcctccagcttgggtggccctgccactcctggttccaagtctctcccttcccccggcaggtccttaagggaagattgtacccccctcacccctttaacataccccagaatccatcagtatgtcacttccctaatttcctatcagtgtatcctcattatttccatactgtttttactaaatccctaagtctaaacaggatttggctcaaaaggaggaccatttctaattttttaaaagtacttaggtgatacacgtataagctttgcatggacgaattaaataagcacattgaccttttcttgtacattcagaacctgaacatccatgtgaaaactgggtccatttttgagagatgtgaaactacagtttattcgtaatacataaatataatctatccgtatatgcatatatctatatgctgtgttaagtggtaatgggtacattacagtctgtgagagatggatcgctccctctgtaaggaacaagacgttctcagctgatgtcacggtaggtttagattctgtagagtgttccccaacccgcaccgttctgtacctctcacaccactgcttgcccgggcagtagtggctgaccaataaagacctttacctgttttgtttggcaaaaaaaaaaaaaaaaa

SEQ ID NO: 157282 - DNA, 579 bp, Homo sapiens
  misc_feature (1)...(579): n = a,t,c or g
cgatggatagcagcagatgccgctaatgcccttcttccagctaacagagctatggcctatctgaagattcagaaatatgaagaagctgaaaaagactgcacacaagccattttattagatggctcatattctaaagcttttgccagaagaggaactgcaagaacatttttgggaaagctaaatgaggcaaaacaagattttgaaactgttttacttctgggaacctgggaaataaggcaagcagtaactgaactctccaaaattaaaaagggaattaattgaggaaagggacactggggatgatgtctttcttgattccacacaaagacaaaatgtggtaaaacccattgataatccaccgcatcctggatcatctaatccactcaggaaggttattattgaagaaactggtaatttgatacagactattgatgtgccagatagcactactgctgctgctccagagaataatcctattaatctagcagatgtaatagcagccacaggcaccacaagtaagaagaattcaagccaagatgacctttttcccacaagtngatactccaagagcaaaagtat

SEQ ID NO: 157283 - DNA, 989 bp, Homo sapiens
ggctggaagaattcgcggccaaaaaagattatgaaagagtattagaactagaaccaaataactttgaagcaacaaatgaactcaggaaaatcagtcaggctttagcatccaaagaaaactcatatccaaaggaagctgacatagtgattaagtcaacagaaggagagcgaaagcaaattgaagcacaacagaataagcagcaggccatttcagagaaagatcgggggaatggatttttcaaagaggggaaatatgaaagagcaattgaatgctatactcgagggatagcagcagatggtgctaatgcccttcttccagctaacagagctatggcctatctgaagattcagaaatatgaagaagctgaaaaagactgcacacaagccattttattagatggctcatattctaaagcttttgccagaagaggaactgcaagaacatttttgggaaagctaaatgaggcaaaacaagattttgaaactgttttacttctggaacctggaaataagcaagcagtaactgaactctccaaaattaaaaagaaaccactcaagaaggttattattgaagaaactggtaatttgatacagactattgatgtgccagatagcactactgctgctgctccagagaataatcctattaatctagcaaatgtaatagcagccacaggcaccacaagtaagaagaattcaagccaagatgacctttttcccacaagtgatactccaagagcaaaagtattgaaaatagaagaagtcagtgatacttcatccctgcaacctcaagccagtttgaagcaggatgtatgtcagtcttacagcgagaaaatgcccatagagatagaacaaaaacctgctcagtttgccacaactgttcttcctccaattcctgcaaactcgttccagctcgaatctgatttcagacaattgaaaagttctccagatatgttgtatcagtatttaaagcaaattgaaccatctttg

SEQ ID NO: 157284 - DNA, 318 bp, Homo sapiens
gacatcgtgatgacccagtctccttccaccctgtctgcatctgtaggagacagagtcaccatcacttgccgggccagtcagagtattagtagctggttggcctggtatcagcagaaaccagggaaagcccctaagctcctgatctataaggcgtctagtttagaaagtggggtcccatcaaggttcagcggcagtggatctgggacagaattcgcactcaccatcagcagcctgcagcctgatgattttgcaacttattactgccaacaccgaggggcgttcggccaagggaccaaggtggaaatcaaacgtgcggcc

SEQ ID NO: 157285 - DNA, 397 bp, Homo sapiens
gtccccgctcagctcctggggctcctgctgctctggctcccaggtgccaaatgtgacatccagatgacccagtctccttccaccctgtctgcatctgtaggagacagagtcaccatcacttgccgggccagtcagagtattagtagctggttggcctggtatcagcagaaaccagggaaagcccctaagctcctgatctataaggcgtctagtttagaaagtggggtcccatcaaggttcagcggcagtggatctgggacagaattcactctcaccatcagcagcctgcagcctgatgattttgcaacttattactgccaacagtataatagttattctcggatcaccttcggccaagggacacgactggagattaaacgaactgtggctgcaccat

SEQ ID NO: 157286 - DNA, 444 bp, Homo sapiens
  misc_feature (1)...(444): n = a,t,c or g
attttgttttctagtcggtaacctctattgaagaacgaactaggccaattctctccaaaacattgaaaggtattttacataagggtatttactaatcannnnnnnnnnnnnnnnnnnnnttggngaaagtaatcagtgcttgttctagatttcctcttaatgccttgtatatggtcaggtaataattacttacaactttagacatattaatagaattaattgctcttttagtagaatattttaaaatctctaagaaatcaaatattactttgattaaagaggattggattttgatgtttttctagaccgtaatactctatagtttgtttacatgtgtattatcctttctggtgagttttttttgcttgcattaattatattttttctgttttagaattggggcttgttgatggacaagaactggcgcgtgctgatgtcaccact

SEQ ID NO: 157287 - DNA, 1608 bp, Homo sapiens
  misc_feature (1)...(1608): n = a,t,c or g
acgggcggcacaccctgggggagaacatcgccgacaacgggggtctcaaggcggcctatcgggcttaccagaactgggtgaagaagaacggggctgagcactcgctccccaccctgggcctcaccaaaaaaaaagaaaagagaaacagctgtcacctcccgcaggacccaaatcctctctctgagcaccgtcatccaccacatggctgggcctggctcccaggaccagtccagtcctctagtgccttatctgaggctgcagccgctcagtctccaccccaaggcaggacagcccctgctcctaggatgcccttggcctccgcagtgcagcccccaggtgtcctgtactgaagcacaggtccatagccccatttccccggtgcctgcagggctaaacctccacgggagcccaggagctctggccggcaggtccatggcacagggcatcggaagactgcaaaactgctggacttaccctgggcttgcagtccattgtcggcccctgggttgaatcaagatagtacttgcagctagatgggatgcttttaagccagggggacattgttgagggggaagatttcttccacccagttcttggcctgtggtgtctgtctcctccctgagaccacagcttctccagtagcagactcatgggcgccaccaagtggaagcacctgggagcggcctctgccatccagtggggaagccaggccccgagacggaggtggggggcagcacgtgcccttccacagccaccgctttcccgccttcagcagcccagggcctcctggcccagccctgcctgggacagtgcttttcccttcacccggggaaagctggaatcctccttgncccgaggagggaagcagacgggcacagggacacccctgccaccttgggactctgccttcaagcttggtgcaagggtatcgagagtggattccagatggaggtcctggtcccagcacgcagcagtcctggtagctctgcagaggagacaggaacccgagaagtagctgaagcagaagccagccggcagtccccttgcccacatagaggcggggcttctcccagccatggtgtccccctctgcctccccctcccccgaccctccgtgccctttccgcgtggagggtggttggtccctgttagtgtcagcacccagcacccatgggccttggaacccccctcccctggacacaggcaggtgtcctaaaaanggagggggncttgggggtgccaagcccgagggaatggaaaaccacactcatgggctcagggttctgccggggccggcaggggggttggggaagaagagggctcagggcccagcaggggtggaagccccctgccccctgcccctacccgctccagagtctttaaggaaaatgaagtgagaccccctccccttaggccctggggagccatagggctggcttcctctgtgggtgcgtggaccgtggggttgggagtctgggaatcctattttttgtattatgtattgagctactgtacctcttacggggctctattgtaatggacatatcttaacttgtacggagagagcacaatatttggggccgcctgcttaaaaaaatccaggcttcct

SEQ ID NO: 157288 - DNA, 667 bp, Homo sapiens
gtgaagaaggaagaacgttgcttgtgcaaaaggagcatattctcaggagacggggcccctgcctgccacaccaagcattaggccaccaggaagacccccatctgcaagcaagcctagccttccagggagaaagagaagtttcttcaggacataactgatgctgagaagtattttattggcttaatttaccatcgtgaagagaaaaggtggcgttggatcaacaactctgtgttcaatggcaagtacgtgaacatgccacagtttcctggggatcttggtttgcttcaaaagaccaaacctgagattgctgggttcaccctggaatagctcaaacgctgacacttgactctgttctgctcttctcctttcttccaacccatctattccctatctgtctaccagtagcggtccttgcccatttgggaaactgagcttctttcttctgcactgggggactggatgctagccatctccaggagacaggatcagttttacggaaacaactcagttagtatagagatgaggtccgcttctgtagtactgagcatttctgactgatcaaaaaggcctagtctgttgacagggtttgttttattttagcctcagagtataccatactactagggagtaaccacacagcctcctgcaagaagtgggtgggaagttt

SEQ ID NO: 157289 - DNA, 1191 bp, Homo sapiens
ccacgcgtccgctgccactatgacgcgggagactgctgctcttccacactctcctccaagaaggtcattccatttgctgctgactgtgacctggatgagtgcacctgccgggaccccaaggcagaagaaaatcagtaactgtgggaacaagcccctccctccactgcctcagaggcagtaagaaagagaggccgacccaggaggaaacaaagggtgaatgaagaagaacaatcatgaaatggaagaaggaggaagagcatgaaggatcttataagaaatgcaagaggatattgataggtgtgaactagttcatcaagtagcccaagtaggagagaatcataggcaaaagtttctttaaagtggcagttgattaacatggaaggggaaatatgatagatatataaggaccctcctccctcatttatattctattaaatcctatcctcaactcttgccctgctctccgctccaccccctgccaactactcagtcccacccaacttgtaaaccaataccaaaatactagaggagaagttggcagggatactgttaatacccattttgaagtggattgccatctttcagagcttgtctgctctcaacttggctctttttctttttgtgtagtttcccttaaataatgaagttagttattaattctttataagtatttaaacataattatataaatatattatatatattatatttttgctgtttactaagctaaaaattattcattgttccacacatgctgctgtgaagttcacattcaagatgaatgttgagactttgaggacagaaaggcaacttattttcccatctttctatggatgcggattggcaggttggaatgggaagtacagaaggagaagagagtaattagatggaattctggatgctagcatgtaaagctaatcatctttttttttatgacctgggagctgggcccattttatgaccaaggagatggggagttggaatggtggtactaagaggcataggaagttgagtgtgaataccattggtgatgggtccaggagaactagactatggttcttgaatatctgtccacaaagaatatactaacttttgtcaacttctcagaactcccaactggagtcggtgagacctaggattttctgcacttccacacatgcctgttccaagtgtggctgtcagccagtcaac

SEQ ID NO: 157290 - DNA, 1797 bp, Homo sapiens
  misc_feature (1)...(1797): n = a,t,c or g
gttnccttgtaacactgtgaacatgaacatgaaaatgcctgttgttgcccccgggtgcctgcctggggtgcccaacngcacctcctcaactgaaatacgaatatccactgtgtgccagagaaaaacgggccaatcagggggataaacataacccttctcctgggctgggagacccatttcttgcgactttgctgcttgaattcactcattaaactgctcaaaggaaaagctctacccctgatttctgagagtctacagcaatatatgtaaccccaattatatatgaagactattgactaccaggacaatagcaccatgaacctttccttcaagagaattcaaccaagagaagagagtggttgccaataagctgggggccaaaaggaaggctctcaggaatattctctaccatccaaaatcaacagcaaaagccagaaaaggggcatgagctctaattcatttgaagagaacacccacaaaaacagtttaacaaagggatctctttcccaacacatgctccctctcccatgaggctcaaccgtcagttgcagggcttgcctgatgtggacaatgtggataccctcagccctgagttgaaacttggcatgccacctttgattccccatgctgcaaaaagaattggaacgctgttcaggtcctggcacagtggtaatggctatatcctatttcactcacacacgtccttttaaagtctcccttcctcaagctattaaatagaaccctctagggatcctgtatgcagtgagggtctgaactgatgatccatatgtcaatcagtagttggaggaggatgactttttttttttttttttgagatagggtcccactttgtcccccagactggagtgcagtggcacgatcatggctcactgcagcttcagtctcccaggttaaaggaatcctttcacctcagcctactgagtgtgcaccaccaggtccagctaattgtttttttaactttttttttttttttttttttcttggtagagacagggtctccctctggttgcccaggatggtttggaactcctgggctcaagcaatcctcccactttggcttcccaaagtgctgagattaccaggcatgagccactatgccccaacctgagcaggatgacttaaacctgaatcaatcctactcccaaaacagcaactatcattaagtcaggggtgtcaaggaggactctgtgaaggcaaagactagactgggatgtgtgcgagagtggggataagaaggcccatccctaggcagactgcagggagtgactctgggcataggaattcatgggccagccctaactaagtgtgatggggtgggcagggagggagggcatctgcttcaggtgtttcaaaccaaaatccttaacaagttctgggggttgggacctcttgttgttcactcctggaatcccaatgtaatccgttacctttacaagaaactggtgtggttctttgtctgctaagggcaagacctgttttctgaatttactttctgataataaagtaacaccatggaaaagaagaacctcagaaaaatatggggtcaccacatgggctttcccagtgctagctgcctgttttggaaagctgcaatgtaggctacagagggcagtctgaaaagagtccttctgctttcgcttcctggagcttaagaagaaaagaggaattaccaaggttgtggtgggttatttactctggaaatatcttggtcacactgtccgtggcaaaagcggaaagcctagcttatgtggatagttgaaggtgactgtgtgggcc

SEQ ID NO: 157291 - DNA, 1509 bp, Homo sapiens
cccacgcgtccgaaacacttctcttcatttccaatgacaaaaaagtagttggctgcctaattgcggaacatatccaatggggctacagagttatagaagagaaacttccagttatcaggtcagaagaagaaaaagtcagatttgaaaggcaaaaagcctggtgctgctcaacattaccagagcctgcaatctgcgggatcagtcgaatatgggtattcagcatgatgcgtcggaagaaaattgcttctcgcatgattgaatgcctaaggagtaactttatatatggctcatatttgagcaaagaagaaattgctttctcagatcccactcctgatggaaagctgtttgcaacacagtactgtggcactggtcaatttctggtatataattttattaatggacagaatagcacgtaaaacaaattcttgcctacaccactagaagacatctattgaagagaatggattggttgctgactttaaccaggaactagggccatttttattacaatgaactcaggactggcaacaaccatatggttgttccattttcataaaattggaaacaatgcagtaatagcttattgttttgttttttaaagaagatattttattatcttttacagaaatttatgattgatgtattttatctatagttatttagacatgtttacatgcagcagataattgttcatagtggactgaaaactaatgcaaggactatggtctcagtgataagtatattttgaagttcttaatatggaaatataccagtgtagcttggtactgtatttttttatattgatctgctgataccagtgataggcttaaagattgtattttcacagagtgggaaaccaatttttttagttattgttcaaggaggggtgcaatattaagtgttttgggaattttgaaggctaatttttaaaagggcctgaactatactttggaagggaaccccctatagggaaaggggaagctccccgcctaaatagggaaggaattaggaatattggagctttttttttcctgatttttctctttcctatctttgatgggaaggagggaagtaggaaagtgggtaaaggaattgaggctttccttcttgggagagctgttaaatggacaagcattagggaaaggtaccctcctagattcattattctttcattctggcttcacttttaaaataaatggcaacttgggcacaccttaggctgttaacaaaatctcaaagaggtttataaaaacgtatagaatacttggaagcaaagtatggatgactcggtatctgctttgttattcctcagaaatactgcactgagtatatgccctcattactggacttcattttgatacttgtctatccttcatagtgccctctacttttaaagggtttatatgttgaaaaactgctgtggcccttttatgacctgtatataatgtagaataaaaataataaaatacttgatagctttttctcagtgaccaatgtactaactaaaaa

SEQ ID NO: 157292 - DNA, 411 bp, Homo sapiens
  misc_feature (1)...(411): n = a,t,c or g
ntgaactccagcttgcgcaagctctaccccaacagtgggaaagcccagttcctcctgaatcatactctggtacctggcctgtgcatcggcctcctgcttcatgtcaacctcctactcctgccagggaatgtggacacctggctccctggtgtccaaagaccctggcacctgggtgggtttgagctggacagaagcttagagacaaaggcttcaagaagcagtggctgcagggagtcacagaagggcaggacctgaacgctgtctgcttccctggaatccaagatgctgagtggaagtggaccctgggtggcccggccctgtctttttcaggagtgcagtaccagggacacctcaggacagattctctggccaggcccttccctgacccgaataaatcctgaagaggttgtt

SEQ ID NO: 157293 - DNA, 455 bp, Homo sapiens; identical to SEQ ID NO: 148541

SEQ ID NO: 157294 - DNA, 1593 bp, Homo sapiens
atggtaacagtgactcagtgctcagtccgccctcagtggcccgagtccgaggtgggcatcatggcaccagtttacatctcggaaagggaggctcagagaggctatgccaatgaggtgggcgaggctttccgctctcttgtgccagcggcggtggtgtggctgagctatggcgtggccagctcctacgtgctggcggatgccattgacaaaggcaagaaggctggagaggtgcccagccctgaagcaggccgcagcgccagggtgactgtggctgtggtggacacctttgtatggcaggctctagcctctgtggccattccgggcttcaccatcaaccgcgtgtgtgctgcctctctctatgtcctgggcactgccacccgctggcccctggctgtccgcaagtggaccaccaccgcgcttgggctgttgaccatccccatcattatccaccccattgacagggatcatccactctccagtgatgagagtggatcatccagtctccaggtcggtggatttcctcctggactccagcctgcgcaagctctacccaacagtggggaagcccagctcctcctgatcatactctggtacctggcctgtgcatcggcctcctgcttcatgtcaacctcctactcctgccagggaatgtggacacctggctccctggtgtccaaagaccctggcacctggctcagagaggtagagaggtgggagcacagggctgaagcagacctgggcccctctcagccctgccccaagcaccaaatcagctcccaccaagaccctggccccatcccttgcagcccagtccctgccatacctggctatgaggtcttcactgccccattcaaagcttatggcttcatccaactggtgagggggctgttggaggctcacgaggacaaggctgccaagagccagggagtacccgggagattcgggggagaagagctggggtgtctgggctggaaagaagggtgcctggtgaacggcaagaacttccactcccacttcgtgccccaagaggtccccaagagactggagctctccttccaggccttcagctttactggtactcctgctgatgtcccatctgatgctaccaagaaggcctgttccttccacaggggcactcatggctggtatacctgcaccctctcccatgtgaacaacatggttctgggtaatgggggctgtcatccagtctcctccctgcccctgctggtgcacttcctgcctctgctggtgcactttctgcccctactggtatatttgctgcctctgctggggcgcttcctgcctcggctggtgtatctcctgcccctgctggtgcactttctgcccccgctgatgcacttcctgcctctgctggtgcacttcctggctctgctggcgcacttcctgcctctgctggtgcacttcctggctctgctggcgcacttcctgcccctgctggtgtatttcctgcccctgctggtgtacttccttcccctgctggtgcacttcctgcctctgctggcgcacttcttgcctctccaggccctacctagcctctccctcttatatatggaagtcttcccagttcactga

SEQ ID NO: 157295 - DNA, 595 bp, Homo sapiens
ggcacgaggcgattagcgccaacagctcagagaaaacgtgacgaaaaccagtctgtaaaacccgagcctgggagaggggcttcggtgcgcggggggaatttgcagacgctccctgctggcggagatttcctgacctgtccttcggcgcgggactttcggcgggtcccggccgggcagacccaagtgccggcggcggagactgcagtggagccagtaccggctgtagtggccggggcccgtggcgggagagtcatgtcagagccgcagccgcggggcgcagagcgcgatctctaccgggacacgtgggtgcgatacctgggctatgccaatgaaggtgggcgaggctttccgctctcttgtgccagcgcgggtggtgtggctgagctatggcgtggccagctcctacgtgctggcggatgccattgacaaaggcaaagaaggcttgagaggtgcccagcccttgaagcaagccgcagcgccagggtgactgtggctgtggtggacacctttgtatggcaggctctagcctctgtggccattccgggcttcaccatcaaccgcgtgtgtgctgcctctctctatgtcctgggcactg

SEQ ID NO: 157296 - DNA, 944 bp, Homo sapiens
cggcggagactgcagtggagccagtaccggctgtagtggccggggccgtggcgggagagtcatgtcagagccgcagccgcggggcgcagagcgcgatctctaccgggacacgtgggtgcgatacctgagctatgccaatgaggtgggcgaggctttccgctctcttgtgccagcggcggtggtgtggctgagctatggcgtggccagctcctacgtgctggcggatgccattgacaaaggcaagaaggctggagaggacggtggatttcctcctggactccagcctgcgcaagctctacccaacagatggggaagcccagctcctcctgatcatactctggtacctggcctgtgcatcggcctcctgcttcatgtcaacctcctactcctgccagggaatgtggacacctggctccctggtgtccaaagaccctggcaacctgggtgggtttgacgctggacaagaaaccttagaagacaaaggcttccaaagaaagcagtggcctgccagggaagtccacagaagggacaggaccctgaaacgctgttctgcttcccctggaatcccaagatgcctgagtggaagtggaccctgggtgggcccggccctgtctttttcagggaaaattaccatcctccccatgaaggatgagagactgaggctcagggagggcaaggaataggcccaagatcacttggcaagctgggcacccaggacccccaggtgcttgacagagtcaccccatggtggtatggctgaacaaggagcggcagacaactcagggagaaactcaggagtgcagtaccagggacaccttcaggacagattctctggccaggcccttcccttgacccaataaatcctgaagagcaaaaaaaagaaaaaaaaaaaaaaaaaaaaaaaaagtcgtatcgatgtcgagcgatcatgatgatgatgatgt

SEQ ID NO: 157297 - DNA, 550 bp, Homo sapiens
gaggaggggaaagcgggggctgcgggagggggaggtggtagttgcggcgctggttcccgggagcagccgtcgagccacaactgcggaggaggagttcgggaaagcggccgtcgggactcctcccctccgtcgtctccgccccggttgagaggcgcctcggcgcatcggagggaccctcccccgcgcttcctcaggctgctgtcgccgctgctgggagatgggcctactcgcccgccaccctgcgctgccgccgctctgaggagttaaagaacatccatgatagcagtcttctgtaaatcgaacttttcaagaattctctgaaggaaccaagtaggatattcttacatcatgacttaatgtgaatgcaagaacaagaaataggttttatctctaaatataatgaagggctgtgtgtaaacactgaccctgtctcaattctaacaagcattttagacatgagtttacatcggcaaatgggttcagatcgagatcttcagtcctctgcttcatctgtgagcttgccttcagtcaaaaaggcacccaaaaaaaa

SEQ ID NO: 157298 - DNA, 623 bp, Homo sapiens
aaataaatgtgctcccccaccacggtgaaattctcacacccttgaaaggaccacgcggcttttttcacaatacccaagaggtggagacagccctcatccccttctatagatgaatggagaaatataatgtggtccagccacacagtggaatattatacagccatgaaaaggaacaagcagctttattcacaatagccaagaggtggagacagcccgtcgtaccatatctcatagatgaatggagaaatataatgtggtccagacacacagtggaatattatacagcccatgaaaaggaacaagcagcttttattcacaatagccaagaggtggagacagcccctcataccccccatctatagatgaatggagaaatataatgtgggtccagccacacggtggaatattacacagccatgaaaagggacaagcagctttattcacaatagcccagaggtgggagacagccctcatacccatcttatagatgaatggaaaaatataatgtccatccacacagtggaatattacacagccatgaaaaggaacaagcagctttattcacaatagccaagaggtggagacagccctcataccccatctatagatgaatggagaaatat

SEQ ID NO: 157299 - DNA, 477 bp, Homo sapiens
tgagacaggttttgtgtcgccgaggctgaagtgcagaggtacgaccatagctcagttcagaagcctcgacctcccatgcttaagttatcctcctgcctcagcctcccaagtaactgggattatgagattacaggtgcaccaccacacccagctaatttcttaactttttgtagagacaagggtctcacactgtgttgcccgggctggtctcaaactcgtggcctccagtgatacttccacctcaacctcgcaaagtgctgggattttaagtgtgagccaccgcacctgggccaaatctttactctgttaagcaactgcagccaggggacttttgggttactgcagcataacccaacctgtttctgcccaattctgggtacatgagagaatgcaaggaagaaaaaaaggaggggaggcaggagaaaggagggaggagatgagagttgctgggctctctcggaggcctgctgtgaccat

SEQ ID NO: 157300 - DNA, 762 bp, Homo sapiens
gctttaatttactggcagaggaagataagcatatggccggctttgacccaggttgccatccagtatctaagttgccccatgtgtagttggcaatctgaatgtatctttactaaaaatagccactttcatccaaaacagatcatgagcctggactttgacaatatagaacaactgatgtttctgaaaatgaacttgaaaaatgttaactacgattattctacgttggttctgagctgggatcctgagcagaatgaagttgttcaaagcagtgaaaaagaaatactgccttaatttctttttctccatttaaaatgggcaactttttgctgtgttactgtatcttaatagctgtagttgttaaatataatcattatctttataaacacatctggggaaacctgaaatcacacaagggctgaaaattcctcagaggcaatataattttgataaaatgaagattaaagatttcatagctataactgtggcgctacgacttggaaaattttgcttataccaatgagagagaagatatttttaattaaaaaaaatatagtgcagcattgaaaggccttaggctttcttcctggtagattgaactagtaattggttttaagtaaaacttcccccaccatgggaaattttattgctctgaaatcaacgaaatgagaaaaaagtacactggctggcattcctcctgcccctgtttttctgtttccttaaaaaccctgatgcttaattacaacttggcaaaaagaaaacccg

SEQ ID NO: 157301 - DNA, 888 bp, Homo sapiens
atggatgacttcctacaaaaattgaggcagaagatcaaaatcggagtggtaggcggatcggactttgagaaagtgcaggagcaactgggaaatgatgcctttaagccccagtcagaccggtcttcatattgtccctctgacagcccccctcacctccccatcactgaaacagaatctccagcacaggaccccgaaaaaccagagaggcttattgaccccttcactggagagtctgacttgataggattgtatctccagagctattcgctgtacgacgtcaatgatgatgacgcgagcgcaactcgagtgatgcgatgtcaaactcgttacgatagcgtactgctgctagaaattgtaagctacaaaatcattggtgttcatcaagaagatgaactattagaatgtttatctcctgcaacgagccggacgtttcgaatagaggaaatccctttggaccaggtggacatagacaaagagaatgagatgcttgtcacagtggcgcatttccacaaagaggtcttcggaacgttcggaatcccgtttttgctgaggatacaccagtttaaaattgcaattgtaatgatggaccgacaccagtacataaatgaagacgagtatgaagtaaatttgaaagactttgagccacagcccgtctgctccgcaaaagaaacaggattatctgctcaactgtgcagcacaatgcaagtagaagttgcagcacgcaccggccggaaccgagctgcacagatgcagttagggcaagggatgcccctacctggatggagatctgtgacacacaagagccaaaggatcaacaccgagaatgcagggccccaatgccatgagaaacacaaacgactaaccaacaggctccacctccctcgttaa

SEQ ID NO: 157302 - DNA, 810 bp, Homo sapiens
ctgatatacagaaataacggaggagttttaattttttttcttttagtttaaatttgcaattgtaatgatgggccgacaccagtacataaatgaagacgagtatgaagtaaatttgaaagactttgagccacagcccggtaaggtatctccccccccccgggtctggtgtgggtttcagactaagaaaccagtggtctggggctgggaggggcagccccagggttcaagtgccagctcctctctctccactggccgacctgtggaaccaggagcaatagcattccataacctacgagttcttaacagatccttacatcctttgtaacctgtgagatcttcaaggagagaagcttggatatgtgtgcagggtgattgagactcagggttgtgagggcagtggctctgaggcgcagtcagggtgtgggcctccttagctccaggtgggcgtgtagctcaggtcctggcttccctgcgaacttaccccttggggagccacagggatgcatgcctcactggccaccaccccgctgaggggttccagggctgctctgtggcctcacttgcttttcttcatccccaccaggtaatatgtctcatcctcggccttggctagggctcgaccacttcaacaaagccccaaagaggagtcgctacacttaccttgaaaaggccattaaaatccataactgatttccaagctggtgtgttcaaggcgaggacggtgtgtgggtggccccttaacagcctagaactttggtgcacgtgccctctagccgaagtcttcagcaagaggattcgctgctggtgtaa

SEQ ID NO: 157303 - DNA, 4080 bp, Homo sapiens
  misc_feature (1)...(4080): n = a,t,c or g
gtacgtgcgcgtctccctgccgccgccgccgcccgccgcgggccgccccggggccgccgtcgccgacgacgcgcgggaggaggaggaggaggccgccccgccgccgccgccgccgccgccgccccggctcgccgccgcccgcccgccgggctcgcagccccggcccccggccgcaggcgaggcccaggccgcggccgacatgaaccaccagcagcagcagcagcagcagaaagcgggcgagcagcagttgagcgagcccgaggacatggagatggaagcgggagatacagatgacccaccaagaattactcagaaccctgtgatcaatgggaatgtggccctgagtgatggacacaacaccgcggaggaggacatggaggatgacaccagttggcgctccgaggcaacctttcagttcactgtggagcgcttcagcagactgagtgagtcggtccttagccctccgtgttttgtgcgaaatctgccatggaagattatggtgatgccacgcttttatccagacagaccacaccaaaaaagcgtaggattctttctccagtgcaatgctgaatctgattccacgtcatggtcttgccatgcacaagcagtgctgaagataataaattacagagatgatgaaaagtcgttcagtcgtcgtattagtcatttgttcttccataaagaaaatgattggggattttccaattttatggcctggagtgaagtgaccgatcctgagaaaggatttatagatgatgacaaagttacctttgaagtctttgtacaggcggatgctccccatggagttgcgtgggattcaaagaagcacacaggctacgtcggcttaaagaatcagggagcgacttgttacatgaacagcctgctacagacgttatttttcacgaatcagctacgaaaggctgtgtacatgatgccaaccgagggggatgattcgtctaaaagcgtccctttagcattacaaagagtgttctatgaattacagcatagtgataaacctgtaggaacaaaaaagttaacaaagtcatttgggtgggaaactttagatagcttcatgcaacatgatgttcaggagctttgtcgagtgttgctcgataatgtggaaaataagatgaaaggcacctgtgtagagggcaccatacccaaattattccgcggcaaaatggtgtcctatatccagtgtaaagaagtagactatcggtctgatagaagagaagattattatgatatccagctaagtatcaaaggaaagaaaaatatatttgaatcatttgtggattatgtggcagtagaacagctcgatggggacaataaatacgacgctggggaacatggcttacaggaagcagagaaaggtgtgaaattcctaacattgccaccagtgttacatctacaactgatgagatttatgtatgaccctcagacggaccaaaatatcaagatcaatgataggtttgaattcccagagcagttaccacttgatgaatttttgcaaaaaacagatcctaaggaccctgcaaattatattcttcatgcagtcctggttcatagtggagataatcatggtggacattatgtggtttatctaaaccccaaaggggatggcaaatggtgtaaatttgatgacgacgtggtgtcaaggtgtactaaagaggaagcaattgagcacaattatgggggtcacgatgacgacctgtctgttcgacactgcactaatgcttacatgttagtctacatcagggaatcaaaactgagtgaagttttacaggcggtcaccgaccatgatattcctcagcagttggtggagcgattacaagaagagaaaaggatcgaggctcagaagcggaaggagcggcaggaagcccatctctatatgcaagtgcagatagtcgcagaggaccagttttgtggccaccaagggaatgacatgtacgatgaagaaaaagtgaaatacactgtgttcaaagtattgaagaactcctcgcttgctgagtttgttcagagcctctctcagaccatgggatttccacaagatcaaattcgattgtggcccatgcaagcaaggagtaatggaacaaaacgaccagcaatgttagataatgaagccgacggcaataaaacaatgattgagctcagtgataatgaaaacccttggacaatattcctggaaacagttgatcccgagctggctgctagtggagcgaccttacccaagtttgataaagatcatgatgtaatgttatttttgaagatgtatgatcccaaaacgcggagcttgaattactgtgggcatatctacacaccaatatcctgtaaaatacgtgacttgctcccagttatgtgtgacagagcaggatttattcaagatactagccttatcctctatgaggaagttaaaccgaatttaacagagagaattcaggactatgacgtgtctcttgataaagcccttgatgaactaatggatggtgacatcatagtatttcagaaggatgaccctgaaaatgataacagtgaattacccaccgcaaaggagtatttccgagatctctaccaccgcgttgatgtcattttctgtgataaaacaatccctaatgatcctggatttgtggttacgttatcaaatagaatgaattattttcaggttgcaaagacagttgcacagaggctcaacacagatccaatgttgctgcagtttttcaagtctcaaggttatagggatggcccaggtaatcctcttagacataattatgaaggtactttaagagatcttctacagttcttcaagcctagacaacctaagaaactttactatcagcagcttaagatgaaaatcacagactttgagaacaggcgaagttttaaatgtatatggttaaacagccaatttagggaagaggaaataacactatatccagacaagcatgggtgtgtccgggacctgttagaagaatgtaaaaaggccgtggagcttggggagaaagcatcagggaaacttaggctgctagaaattgtaagctacaaaatcattggtgttcatcaagaagatgaactattagaatgtttatctcctgcaacgagccggacgtttcgaatagaggaaatccctttggaccaggtggacatagacaaagagaatgagatgcttgtcacagtggcgcatttccacaaagaggtcttcggaacgttcggaatccccgtttttgctgaggatacaccagggcgagcattttcgagaagtgatgaagcgaatccagagcctgctggacatcagggagaaggagttttgagaagtttaaatttgcaattgtaaatgatgggccgacaccagtacataaaatgaagaccgagtatgaaagtaaatttgaaagactttgagccacagccccgntaatatgtctcatcctcggccttggcttagggctcgaccacttcaacaaagccccaaaagatgagtcgctacacttaccttgaaaaggccattaaaatccataacttgatttccaagctggtgtgttcaaggccgaggacgggtgtgtggggtgggccccttaaacagcctaggaactttgggtgcacgtgccctctaggccgaagtctttcagcaagagggatttcgctgctgggtgtttaatttttatttttatttgagggctgtttcagttttggctttcttctgtatctatttgaacttgccctttttttgaggcaaaattgaaggatgtttttataaaagcttgggatgccaatgaggagttattttatgggtaaccacagtgtcaaggcaactgttcagcgcaatggggggagaagaggttagtgggatcggggggtccctggctcaaaggtctcctgggcctgtccctagtgggcacgagttggctcggctgccttcctggggggtcccgtgcaaccatccctgcagctagcaaagtcttgtgtttaaggctcgtctgacctatttccttcagttatacttttcaatgaccttttgtgcatctgttaaggcaaaacagagaaactcacaacctaataaatagcgctcttcccttcaaaaaaaaa

SEQ ID NO: 157304 - DNA, 840 bp, Homo sapiens
ggaggcaggagaaacggaggaaagagggtgtaaagagaaggagagaagggggcgagaggtatagggggtgggtggagggaggggccacccccacgtctcagagtggccctggcttctcccaccacagtgtgctttcatgttgccagggcactgttggaaaagaggcacagtcacattcatatttccgcaatcccagcccaaaggccccccaaagccagcttcaaccgcagagtgtctgtgctgtcagagtgggtaggctggttttggaggttgcccaccttgctttttctgtgctcagattccatccctttgtagtcctagagaggctgtgttcccgcccctctcatattactggtaagtattatggaccaggtatctggaaaaggcctacagtttggatcctagatgaggctggcaccaaagaggaggaggaaggactgttccattaggcctgaagctcccacagtgttggacttagcaggctttcttgctgaggcggctgggataccatttggtgtcacccaagggagttgaccacgtgggctgagcaccaggagcagctaatgcctgttccacccaggcgcctgaggctgggaccctctccgaccccataattttctacccaggtggacgtgcacccagagcagcatcagcccccagtacaatatctgcgagcagatggttcagacctccgatgatctactccgcttcatcttccagcttgctcgctcatagaacagtgacgcgcagcacacctccacgtcgtgtaactatctcacatcatcgacgcgtaattaatcacgtgcccctcatacctccgcgttgtctcgcgcccgcacg

SEQ ID NO: 157305 - DNA, 2947 bp, Homo sapiens
gggagactgaatgtgaaattgttgtataattcttcagtagaacagatctggatcacagttttacagtgcagagatttaagttggccctctagttatggagacactcctactgtttctataaaaggaatacttacattgcccaaaccagtgcatttcaaatcttcagccaaggaaggttccaacgctattgaatttatggaaacgtttgtatttgctattaaacttcaaaatctacaaactgtaagacttggatttaagattcaaacccagactcccaggaagaaaaccattggagaatgctcaatgtcactcagaacccttagcacacaggaaatggattactctttggatataacaccaccttcaaaaatttctgtttgccatgcagaacttgaattggggacttgttttcaagcagtaaatagcagaattcagttacaaattcttgaggcacggtaccttccaagctcatcaacacctctgactttgagttttttcgtgaaggtgggaatgtttagctcgggagagttgatttataagaaaaagacacgcttactgaaggcctccaatggaagagtcaagtggggagagactatgatttttccactcatacagagtgaaaaagaaattgtttttctcattaagctttacagtcgaagctctgtaagaagaaaacactttgtgggccagatttggataagtgaagacagtaataacattgaagcagtgaaccagtggaaagagacagtaataaatccagaaaaggttgttatcaggtggcacaaattaaatccatcttgaagacttcacacattaatttggtgaagaacttgacattcttttagaagacttatgatttcaatttgctaccaatgagaagaggcaaatcaacaaatttgtcaatttatgggggctataattatggtatataatgtatctgatagaaaatttgataagaaaatgtaatgaattttatcagatatccaaagtaaaggaaatgttttaaaactgcaacaagagacacagacagtaaaatcaaagtattattaggatgactaaataaattataaagtctgtgagaatatcaaccatagatagttctttctatattatgtttttgcttttgtattttaagctttacttaggatattcaaaacctgggtatatcaagtctctgttagtactattgggcatttaggaagactttaccattatttcagtgctagggcattattgattagggtcttgggctccactgtttacctcttgctatgtattttctcccggtaaaaatgaattgaaccatttcaactattttctatatttggagaaagtttgtgccctgtgttttataatttttttacccataagacatcacattatccctttgtaagctacttatctccaaaaaaacttcagaaatagaaaactacattttggcaggaataattgaaaacaccagaaggttgaagtttaattggaaacccagaatatacatactttgctgttttcttccctcaaatattttactatttgttttatttgggagttaaaataagagtatcatccatatgggtccatcctaattcacagaattaaatgagcttaaataggaaaattcagtattttatggataatcacttcgtttttagtttttaaaatttagattattctataatttaccgtgtttgagtattttccccattttttccataaccctacccgattatactgtgtagcaaatattttctattgcagttttctttccagtacttattagaactcagtatttggaaataatttcagcttaattgaccataaggaactgtgggccaaaaaggaacagttttttgggagagggcagatgacattatacctgattttaggaaaatctcacttttatttttggcttaataagtaggacttaaggtgctctgtgttctccaggtcttcccctttttttctggccccccattcttactttgtcccaggcatgcagagaaagatggtgatattttaggccaggagtataccttgctataacctaagcatgccttctttattccagctcctatgttctgtgtatatcattaacattttcccaaataaacacttaattctcttttccctaggtgccatctcctcaagctacaaaatgtccacatcttatatcgcctttgctggtactgctctgattttgtggtaccagtactctctgccactgaacattttgaaatatttttgttttagatttgcaaaaaatgacatataggtcagtactcacatggatttttaagataaatcacctgtgtgataatattttgaatctgagaccgaatacaacttttaaaaattgtttttaaaaatagactttttttttttagagccagttgtaggttaacagaaaaattgagaggaagatagagatttcctttctcccctgacaaagccctcaacagcctcccaggctatccagtatcctgcaccacaatggtacatttgttacaatcaatgaacctactctgaaacatcattatcatccaaagttcatgggtttacattagagtcccctcttggtgttatacatgctagaggacaaatatatgatgatatgtatgcatcattataatatagtatagtttcgctgccctaaacatcctctgcaaatgcaactattttaatgggtaccaaagaagtaaatgtatttactggcttttagataataaataacgggctttattgtttattttaaaagctacaatttgttttagctggtttctctgttctattaatgctttgaatttccaaatttaatatatgtagtcatgcatttaacttaatatttaattatttgatttatttaattttctatattcttacaatgtatgtatgatgtataatttaagggaaagctatgacttctcagtttcttagaatcctaggtaaa

SEQ ID NO: 157306 - DNA, 610 bp, Homo sapiens
cccacgcgtacgcccacgcgtccgctcattggctgctcttttggtcctgatactgcgaggcaatgagcttcggagcctgcatggcctaaagcaactgaggaatctgcggcacctggatttggcatacaacctgctggaaggacaccgggagctgtcaccactgtggctgctggctgagctccgcaagctctacctggaggggaaccctctttggttccaccttgagcaccgagcagccactgcccagtacttgtcaccccgggccagggatgctgctactggcttccttctcgatggcaaggtcttgtcactgacagattttcagactcacacatccttggggctcagccccatgggcccacctttgccctggccagtggggagtactcctgaaacctcaggtggccctgacctgagtgacagcctctcctcagggggtgttgtgacccagcctctgggtgctggccagtgaggtcccaaatgacccagggcttaagggagaggcgagagaatgatctggcctcaggggacaggccacctggtcaggaggaatatttttcctgcactttttctcaggtatcaataacgttgtttccaactcaaaaaaaaa

SEQ ID NO: 157307 - DNA, 454 bp, Homo sapiens
  misc_feature (1)...(454): n = a,t,c or g
ttggagaacaagcatgcactcacacatggggggcgcgcacacacatgcgcccacacatgtgcacacatactcacacaggcacatgcacgcacgcacatgcacgcacgcacatgcacacgtacacacatatgtgcacacacgcatggcttggtaggcttcacctgagagttatgaatgcaccattttccttggtgcattcataacactgtttgtgcctctcnnnnnnnnnnnnnnnnnnnnnnnnnnnnnnnnnnnnnnnnnnnnnnnnnnnnnnnnnnnnnnnnnnnnnnnnnnnnnnnnnnnnnnnnnnnnnnnnnnnnnnnnnnnnnnnnnnnnnnnnnnnnnnnnnnnnnnnnnnnnnnnnnnnnnnnnnnnnnnnnnnnnnnnnnnnnnnnnnnnnnnnnnnnnnnnnnnnnnnnnnnnnnnnnnnnnnnnnnnnnnnnnnnnnnnnnnn

SEQ ID NO: 157308 - DNA, 563 bp, Homo sapiens
attgtgtgacacttgatagttattagaaagaggcagatcagggcaaaaacatttggaaaggatgatctcatctgtataaaagttctaagatgatacacaagaaatggtaattctgtagcttctagagagctttatgtatagtttgtacactgaataaatgtaattggccatccgtatgacaggaagacaagggttttggtcggcagccatctcaaggtgatccattgagacaaggtgccaagacctgaacaaggctgccgccgccccagcttgcattaggagaggaagagcatcctggcctcctccatactggtcacaccatgtgtgtctggggtccctcagtagctctgagggccgctctcttaagagcatagcacactgaagctcccctaccacacacaggaagccggagcagctccaggtccaacaggaactgacagccacgaggtggaccacctggagggcggtgcggggaaggaggcagggccctgtgcctgaagcctgggcaccatggtggccccagtcaggagcaacagtggtagccctgagtaaaacccattgtc

SEQ ID NO: 157309 - DNA, 1322 bp, Homo sapiens
agttgtttaataactgtatttgagtattatctttttcctttgtattttatacatttggaaacattattctgaggattgtccacaggcttaaccagacagccaaaggcaccatggccccaaaatggttacaagccatggtccaaagagaccactggagggagccctggaggctgctttctctgcatgttccagctcaccttggggccgaccttcccactttagttacccgtgtttacatttctctttatgccagtcaccagctgaccctcctacgtggccctcttcttaactcatggtttctctacccatcaggcaatgtttacaagtttcagactggttcccgatttcatgcaatactgtggcacaagcatttggatgatgcatgtaaaagcaacaggcctcaggaagccggagcagctccaggtccaacaggaactgacagccacgaggtggaccacctggagggcggtgcggggaaggaggcagggccctgtgccctgaaagcctgggcacccatggtggcccccagtcaggagcaacagtggtaaccctgagtaaaacccattgtcccctctttggaggagcggccagaggatgacagcagccccagcaggcagcagtgcctgggcaggctgatccagcagagcactaatgggtcagtttcatgtattggcagatgtggtgtagcatggcaaggctacaagttttaaggttttttgtctgattttcagacctggaggaggggatttttcttcctactttcccccttttttatttctaatttactttcaaccaaatattcccactatgtgctatatgtaataataaaaagttgacaacaactgaaatattcaacagcagaggatgatttaagtgaatcacagtacatccgtgtgatggaatgccaggagggtgtaagaaagagtgtgacagaaatgcatctattcacgaggaaacatcgcagtgactagagtgattttctgttctgtggaactgcatgtcctaaacttgtttttattaacactgaatacacttaaaccttatctataacatatgtataggtataaacaacagcaataaaaccccttattgcccccatgagcctaacagcagagcccccagggccttggaatgctgtccctccccatggccttttcctaattcggtttctctccctcccacctgtgccccagcccccctttcctgatttgtttgctgattattcctttaaaattgcaggtcacggacttgattccttcatgtgttgtttggggggcatttttaaacttttttataaatagaaccataaagatgaaaaaaaa

SEQ ID NO: 157310 - DNA, 1188 bp, Homo sapiens; identical to SEQ ID NO: 126769

SEQ ID NO: 157311 - DNA, 704 bp, Homo sapiens
caacatgcctacaaagttgcagaagttggacctgagtagttatccagaagcgacagaaaaaaacgtagaaaggattttgggattgttgcaaacctactttcgaaagtatcctgatactcctgtgtcctattttgagtttgtgattgatccaaactctttttctcgtactgtggagaatatattttatgtttcttttattgtaagagatggttttgcaagaataaggcttgatgaagacaggctgcccaatattagagccgatgaatgttaacccagatgggtgagggaaatgattcccagttgccatggcaggaaacagggagttatatctttgactttacaggagtggaaaaacattgtggcagcttttgaaatttctgaggctatgattacatactcctcatactaaagatttcttagtatagcatcctttttgtgtttttttttctgaagttagatggagagtaaaatgtaaactgaagcacatattgtatctcttgtaaagtgaaaaagtattttcaagaacatcagacattgttttactgtgcagcatatttttcttagtaatttataaggtcatgatcttctgttattaaaacaaattcactggcatatttatgggaacgttttattgaatgccctttaagactattaataaaaacaagttttggataccaaaaaaaaaaaaaaaaagggcggccgct

SEQ ID NO: 157312 - DNA, 425 bp, Homo sapiens
  misc_feature (1)...(425): n = a,t,c or g
caaaggtttgcttgatgttacatgcaagactgttgccaatatgatcaaggggaaaactcctgaggagattcgcaagaccttcaatatcaaaaatgactttccctcttttttgtaaagcaatgtctgcctagtttattgtccagttaactttagtgaccttttaaaagttggcattgtaaataaaacaacttgcaaaaaagttttctggaatagaattaacaaaatattatctttattcatgagttggaaactggaaaaaggcttcttgaagtaaatgttctgagtggagctactaggatgtcttccagcctcctgcagtcaaggagtaccactgtattgattagcctgtatgtagcagggctcccttcattgcatctgaggactngntttctttttctttattnntaagtctcgtagttctaaaa

SEQ ID NO: 157313 - DNA, 985 bp, Homo sapiens
ttttcctcttccttcgctaacgcctcccggctctcgtcagcctcccgccggccgtctccttaacaccgaacaccatgccttcaattaagttgcagagttctgatggagagatatttgaagttgatgtggaaattgccaaacaatctgtgactattaagaccatgttggaagatttgggaatggatgatgaaggagatgatgacccagttcctctaccaaatgtgaatgcagcaatattaaaaaaggtcattcagtggtgcacccaccacaaggatgaccctccttcctcctgaagctgatgagaacaaagaaaagcgaacagatgatatccctgttggggaccaagaattcctgaaagttgaccaaggaacaccttttgaaactcattctggctgcaaactacttagacatcaaaggtttgcttgatgttacatgcaagactgttgcccaatatgatcaaggggagaaactcctgaggagattcgcaagaccttcaatatcaaaaatgactttactgaagaggaggaagcccacggtacccaaagagaaccacgtggtgtgaagagaagtgaaatgttgtgcctgacactgtaacacttgtaaggattgttccaaatactagttgcactgctctgtttataattgttaatattagacaaacagtagacaaatgcaggcagcaagtcaattgtattagcaagaatattgtcctcaattgcatgtgtagtttgaggcacagatccccaaaccttgacgggccaagtttcttcttaggtatggatggaaagtttctttttttctttgctctggaattaaaactggaactgtgggggttctctataagtggcattttgggctttccctctttttttgtaaagcaatgtctgcctagtttattgtccagttaactttagtgaccttttaaaagttggcattggtaaataaaacaacttgcaaaaaagttttctggaatagaattaaaaaa

SEQ ID NO: 157314 - DNA, 683 bp, Homo sapiens
cccctgtagacccgcgctgcaggaattcggcacgagggaagctgctggaaggcgaggagagcaggatttctctgcctcttccaaacttttcctccctgaacctgaggggtaagcattttatttccctttaggaaaaacgtcagctgcttgtaaccactgtgtttatgtcaaagcattcattttttttaggatatctgaaaaaatgccatataagagaaaactctataaaacatctataattttcgaacccaagtacactcttgcattctatgctttaagttaaatgcaaactcctttttccttcttcctgctgcaagtactatctcatcctgatgctcaagagtgtcagggcctgggtttccaaacagagactaccctaaaattatttggggagtagtactttacacaattgcctctcccccacaaatcataattgtttcagtaaaatggttacttggtttttccaagaaaaaactcgtttttactcatttttggcctgtttgtttatttagaaactaatctggattcactccctctggttgatacccactcaaaaaggacacttctgattaagacggttgaaactagagatggacaggttatcaacgaaacttctcagcatcacgatgaccttgaataaaaattgcacacactcagtgcagcaatatattaccagcaagaat

SEQ ID NO: 157315 - DNA, 1949 bp, Homo sapiens
gggcgcgccagagacgcagccgcgctcccaccacccacacccaccgcgccctcgttcgcctcttctccgggagccagtccgcgccaccgccgccgcccaggccatcgccaccctccgcagccatgtccaccaggtccgtgtcctcgtcctcctaccgcaggatgttcggcggcccgggcaccgcgagccggccgagctccagccggagctacgtgactacgtccacccgcacctacagcctgggcagcgcgctgcgccccagcaccagccgcagcctctacgcctcgtccccgggcggcgtgtatgccacgcgctcctctgccgtgcgcctgcggagcagcgtgcccggggtgcggctcctgcaggactcggtggacttctcgctggccgacgccatcaacaccgagttcaagaacacccgcaccaacgagaaggtggagctgcaggagctgaatgaccgcttcgccaactacatcgacaaggtgcgcttcctggagcagcagaataagatcctgctggccgagctcgagcagctcaagggccaaggcaagtcgcgcctaggggacctctacgaggaggagatgcgggagctgcgccggcaggtggaccagctaaccaacgacaaagcccgcgtcgaggtggagcgcgacaacctggccgaggacatcatgcgcctccgggagaaattgcaggaggagatgcttcagagagaggaagccgaaaacaccctgcaatctttcagacaggatgttgacaatgcgtctctggcacgtcttgaccttgaacgcaaagtggaatctttgcaagaagagattgcctttttgaagaaactccacgaagaggaaatccaggagctgcaggctcagattcaggaacagcatgtccaaatcgatgtggatgtttccaagcctgacctcacggcttccctgcgtgacgtacgtcagcaatatgaaagtgtggctgcccaagaacctgcaggaggcagaagaatggtacaaatgtcaagtttgctgacctcttctgagggcttccaaccggaaccaatgagccccttcgccaggccaaagcaggagtcccactgagttaccggagaacagggtgcagtccctcacctgttgaagtggatgccctttaaaggaaaccaatgagctccctggaacgcccaattgcgtgaaatggaagagaacttttgccggtgaaagctgctaactacccaagaccactattggcccgcctgccaggatgagattcagaattattgacggagggaaatggcctcgctcaccttcgtggaataccaatgacctgctctaaatgttaagatggccccttgacatttgagatttgccaccctacaggaaagctgctgggaaggcgaggagagcggggatttcctctggcctccttcccaaacttttccctcccctgaaccctgaggggaaacctaatctgggattcactcccctctgggttgataccccactcaaaaagggacacctcctgatttaaggacggttggaaacttggagatgggacagggttatcaacggaaactttctcagcattcacggatgacctttgaataaacaattgcacaacactcagtggcaggcgatatattacccaggcaagaataaaaaagaaatccactatcattaaagaaacaggcttcaaagtgcctttactgcagtttttcagggagcgcacgatagatttggcctacggactcagctctagttctctaacaaccgacactcctacaagatttagaaaaaagtttacaacatacatcatacgtttacggcaaaatcttgtgctagaatactttttaaaaaggtattttgaattccattaaaacctgctttttttttttttccagtatagatctcaaccaacttggttctgcttcaataaatctttggaaaaactcaaaaaaaaaaaaaaaaaaa

SEQ ID NO: 157316 - DNA, 605 bp, Homo sapiens
cttttgaggcagaatcttactctgtcacccaggctggagtgcaatggcatgatctcagctcactgcaacctccgccccccaggatcaagcaactctcctacctcagcctccagagcagctgcgactacaggcacttgccaccgtgcccagccaacttttgtatttttagcagaaacggggcttcaccatgttggccatgctggtctcgaactcctgccagatggatccattgattccttcctgaacatgctttgaatagttacctcctgcatgttagtgccctacaaggcaggtaccatgtgcacacctctccatatctggaaatcatagccattctataaaccaaaccccttttcagatgctccatgaagccctgctgaccacactggaccttcctaaacgctctatagcacttacaacaatcacacatacacacatacacgcatcgttttactgacagtcctcttctgacatcaaattgataaatatcaacaaccaactacatacaaggcagtaagtatgcagaatacagaaaatgtgtaacacaaggactgtgcctcctccagaaagagccagtatcagtggtggttaataacaaaggttcc

SEQ ID NO: 157317 - DNA, 514 bp, Homo sapiens
  misc_feature (1)...(514): n = a,t,c or g
cagttttggtcttcagttaaggagaaagtgatttttgagttccaaagtaaggtccatggtactcaacgaaatgcctgactaagccacaattaattttttcagcaagtagactacagtagtcctcccttcccagaagatttccttcccccctgaggaagtgatatttagatcattcgacctggagaaaaaatagaagttagccctgaggtgaaagagagcaggctacactggaggcgctgaagaaagcataggacagctggagtgagcaagtcataaaacccccattccagagagggtcctgccccatacccagaaggaaagaatgctgctcagagaggccaagaagaatctggacggacaggccttgtgttgtcttctcttgagcagtagatcatacctttttgtccagtcatgtttctgcangcctgtacatatttcgttaaacctaaacatagtagacaatttctcctccnnnnnnnnnnnnnnnnnnnnnnnnnnnnnnnnnnnnnnnnnn

SEQ ID NO: 157318 - DNA, 917 bp, Homo sapiens
ttctgatcatgatatgtttctctttttttttacttagtgtcttagaaaataaaaattctgggccttacttgttttttcaacgacagttttggtcttcagttaaggtacgtgtccatagactatctaaaagactcagatttcgtttgacttcatatattacattttttagagtgttttgttttttattaactccataggcttagatctatttatatctatacccaaaatctccattttacaaagtattttattccaaaagttcattcaagtttgatattttcacaggagaaagtgatttctgagttccaaagtaaggtccatcgtactcaacgaaatgcctgactaagccacaattaattttttcagcaagtagactacagtagtcctccctgtatccatggggtatatgttctaagatgcccagtggctacctgaaaccacagatagtaccgaaccctatatatactgttttttcctctacatacatacctatgataaagtttaacttataaattaggcacagtaagagattaacaataactaataatagaacagttattaataatatactgtggtaaaggttatatgaatgtagtttctctctcaaaatatgttattgtactgtgccacagctgactgaaaccacagataaggagtactgctgtagcagatactcttctgaggttcggggatatagcactgagtaagctagaagtggaatctttgtggagttcacagtccagcacagttgacaacaaataggtaatctcaggtgtgatgagttatgaaaggggacattcaaggtaatgtggaacatatgacaaggggcacagagaccttgactagctagtcccagaagatttccttccaccctgaggaagtgatatttagatcattcgaaatgaagaaaaaataga

SEQ ID NO: 157319 - DNA, 2997 bp, Homo sapiens
atggcccaagttgcaatgtccaccctccccgttgaagatgaggagtcctcggagagcaggatggtggtgacattcctcatgtcagctctcgagtccatgtgtaaagaactggccaagtccaaagccgaagtggcctgcattgcagtgtatgaaacagacgtgtttgtcgtcggaactgaaagaggacgtgcttttgtcaataccagaaaggattttcaaaaagattttgtaaaatattgtgttgaagaagaagaaaaagctgcagagatgcataaaatgaaatctacaacccaggcaaatcggatgagtgtagatgctgtagaaattgaaacactcagaaaaacagttgaggactatttctgcttttgctatgggaaagctttaggcaaatccacagtggtacctgtaccatatgagaagatgctgcgagaccagtcggctgtggtagtgcaggggcttccggaaggtgttgcctttaaacaccccgagaactatgatcttgcaaccctgaaatggattttggagaacaaagcagggatttcattcatcattaagagaccttttttagagccaaagaagcatgtaggtggtcgtgtgatggtaacagatgctgacaggtcaatactatctccaggtggaagttgtggccccatcaaagtgaaaactgaacccacagaagattctggcatttccctggaaatggcagctgtgacagtaaaggaagaatcagaagatcctgattattatcaatataacattcaagcaggcccttctgaaactgatgatgttgatgaaaaacagcccctatcgaagcctttgcaaggaagccaccattcttcagagggcaatgaaggcacagaaatggaagtaccagcagaagattctactcaacatgtcccttcagaaacaagtgaggaccctgaagttgaggtgactattgaagatgatgattattctccaccgtctaagagaccaaaggccaatgagctaccgcagccaccagtcccggaacccgccaatgctgggaagcggaaagtgagggagttcaacttcgagaaatggaatgctcgcatcactgatctacgtaaacaagttgaagaattgtttgaaaggaaatatgctcaagccataaaagccaaaggtccggtgacgatcccgtaccctcttttccagtctcatgttgaagatctttatgtagaaggacttcctgaaggaattccttttagaaggccatctacttacggaattcctcgcctggagaggatattacttgcaaaggaaaggattcgttttgtgattaagaaacatgagcttctgaattcaacacgtgaagatttacagcttgataagccagcttcaggagtaaaggaagaatggtatgccagaatcactaaattaagaaagatggtggatcagcttttctgcaaaaaatttgcggaagccttggggagcactgaagccaaggctgtaccgtaccaaaaatttgaggcacacccgaatgatctgtacgtggaaggactgccagaaaacattcctttccgaagtccctcatggtatggaatcccaaggctggaaaaaatcattcaagtgggcaatcgaattaaatttgttattaaaagaccagaacttctgactcacagtaccactgaagttactcagccaagaacgaatacaccagtcaaggaagattggaatgtcagaattaccaagctacggaagcaagtggaagagatttttaatttgaaatttgctcaagctcttggactcaccgaggcagtaaaagtaccatatcctgtgtttgaatcaaacccggagttcttgtatgtggaaggcttgccagaggggattcccttccgaagccctacctggtttggaattccacgacttgaaaggatcgtccgcgggagtaataaaatcaagttcgttgttaaaaaacctgaactagttatttcctacttgcctcctgggatggctagtaaaataaacactaaagctttgcagtcccccaaaagaccacgaagtcctgggagtaattcaaaggttcctgaaattgaggtcaccgtggaaggccctaataacaacaatcctcaaacctcagctgttcgaaccccgacccagactaacggttctaacgttcccttcaagccacgagggagagagttttcctttgaggcctggaatgccaaaatcacggacctaaaacagaaagttgaaaatctcttcaatgagaaatgtggggaagctcttggccttaaacaagctgtgaaggtgccgttcgcgttatttgagtctttcccggaagacttttatgtggaaggcttacctgagggtgtgccattccgaagaccatcgacttttggcattccgaggctggagaagatactcagaaacaaagccaaaattaagttcatcattaaaaagcccgaaatgtttgagacggcgattaaggagagcacctcctctaagagccctcccagaaaaataaattcatcacccaatgttaatactactgcatcaggtgttgaagaccttaacatcattcaggtgacaattccagatgatgataatgaaagactctcgaaagttgaaaaagctagacagctaagagaacaagtgaatgacctctttagtcggaaatttggtgaagctattggtatgggttttcctgtgaaagttccctacaggaaaatcacaattaaccctggctgtgtggtggttgatggcatgcccccgggggtgtccttcaaagcccccagctacctggaaatcagctccatgagaaggatcttagactctgccgagtttatcaaattcacggtcattagaccatttccaggacttgtgattaataaccagctggttgatcagagtgagtcagaaggccccgtgatacaagaatcagctgaaccaagccagttggaagttccagccacagaagaaataaaagagactgatggaagctctcagatcaagcaagaaccagaccccacgtggtag

SEQ ID NO: 157320 - DNA, 350 bp, Homo sapiens
taaacttataaggtcacggataatacttctcattgtagtacgtagatgacgggggctagatatgagttgaataaacaggtatacctgtaaattcttacagagtgaaaataaattggtatactttacaatttgtttctctctttagaccatttccaggacttgtgattaataaccaactggctgatcagagtgagtcagaaggccccgtgatacaagaatcagctgaacccagccagttgggaagttccagccacagaagaaataaaagagactgatggaagctctcagatcaagcaagaaccagaccccacgtgggagacctctttccttctaggggaaatcagcttctg

SEQ ID NO: 157321 - DNA, 3199 bp, Homo sapiens
atggcccaagttgcaatgtccaccctccccgttgaagatgaggagtcctcggagagcaggatggtggtgacattcctcatgtcagctctcgagtccatgtgtaaagaactggccaagtccaaagccgaagtggcctgcattgcagtgtatgaaacagacgtgtttgtcgtcggaactgaaagaggacgtgcttttgtcaataccagaaaggattttcaaaaagattttgtaaaatattgtgttgaagaagaagaaaaagctgcagagatgcataaaatgaaatctacaacccaggcaaatcggatgagtgtagatgctgtagaaattgaaacactcagaaaaacagttgaggactatttctgcttttgctatgggaaagctttaggcaaatccacagtggtacctgtaccatatgagaagatgctgcgagaccagtcggctgtggtagtgcaggggcttccggaaggtgttgcctttaaacaccccgagaactatgatcttgcaaccctgaaatggattttggagaacaaagcagggatttcattcatcattaagagaccttttttagagccaaagaagcatgtaggtggtcgtgtgatggtaacagatgctgacaggtcaatactatctccaggtggaagttgtggccccatcaaagtgaaaactgaacccacagaagattctggcatttccctggaaatggcagctgtgacagtaaaggaagaatcagaagatcctgattattatcaatataacattcaaggaagccaccattcttcagagggcaatgaaggcacagaaatggaagtaccagcagaagattctactcaacatgtcccttcagaaacaagtgaggaccctgaagttgaggtgactattgaagatgatgattattctccaccgtctaagagaccaaaggccaatgagctaccgcagccaccagtcccggaacccgccaatgctgggaagcggaaagtgagggagttcaacttcgagaaatggaatgctcgcatcactgatctacgtaaacaagttgaagaattgtttgaaaggaaatatgctcaagccataaaagccaaaggtccggtgacgatcccgtaccctcttttccagtctcatgttgaagatctttatgtagaaggacttcctgaaggaattccttttagaaggccatctacttacggaattcctcgcctggagaggatattacttgcaaaggaaaggattcgttttgtgattaagaaacatgagcttctgaattcaacacgtgaagatttacagcttgataagccagcttcaggagtaaaggaagaatggtatgccagaatcactaaattaagaaagatggtggatcagcttttctgcaaaaaatttgcggaagccttggggagcactgaagccaaggctgtaccgtaccaaaaatttgaggcacacccgaatgatctgtacgtggaaggactgccagaaaacattcctttccgaagtccctcatggtatggaatcccaaggctggaaaaaatcattcaagtgggcaatcgaattaaatttgttattaaaagaccagaacttctgactcacagtaccactgaagttactcagccaagaacgaatacaccagtcaaggaagattggaatgtcagaattaccaagctacggaagcaagtggaagagatttttaatttgaaatttgctcaagctcttggactcaccgaggcagtaaaagtaccatatcctgtgtttgaatcaaacccggagttcttgtatgtggaaggcttgccagaggggattcccttccgaagccctacctggtttggaattccacgacttgaaaggatcgtccgcgggagtaataaaatcaagttcgttgttaaaaaacctgaactagttatttcctacttgcctcctgggatggctagtaaaataaacactaaagctttgcagtcccccaaaagaccacgaagtcctgggagtaattcaaaggttcctgaaattgaggtcaccgtggaaggccctaataacaacaatcctcaaacctcagctgttcgaaccccgacccagactaacggttctaacgttcccttcaagccacgagggagagagttttcctttgaggcctggaatgccaaaatcacggacctaaaacagaaagttgaaaatctcttcaatgagaaatgtggggaagctcttggccttaaacaagctgtgaaggtgccgttcgcgttatttgagtctttcccggaagacttttatgtggaaggcttacctgagggtgtgccattccgaagaccatcgacttttggcattccgaggctggagaagatactcagaaacaaagccaaaattaagttcatcattaaaaagcccgaaatgtttgagacggcgattaaggagagcacctcctctaagagccctcccagaaaaataaattcatcacccaatgttaatactactgcatcaggtgttgaagaccttaacatcattcaggtgacaattccagatgatgataatgaaagactctcgaaagttgaaaaagctagacagctaagagaacaagtgaatgacctctttagtcggaaatttggtgaagctattggtatgggttttcctgtgaaagttccctacaggaaaatcacaattaaccctggctgtgtggtggttgatggcatgcccccgggggtgtccttcaaagcccccagctacctggaaatcagctccatgagaaggatcttagactctgccgagtttatcaaattcacggtcattagaccatttccaggacttgtgattaataaccagctggttgatcagagtgagtcagaaggccccgtgatacaagaatcagctgaaccaagccagttggaagttccagccacagaagaaataaaagagactgatggaagctctcagatcaagcaagaaccagaccccacgtggtagacctcttccctcgctagcagagccttgagttacggtgtttattttccaatcaagtgaagatatctcctacttctcctactggaacatctcagcttctgcagtgaagaaaaattcctgtgatagttcagttctttagtttttctatttgaaaaaaaaaaatcatttaaatgatcctttgttcacggctctccttaatgactgagtgaacagttcctatctgtatatttgactaaaccttttcctaagctaaaaaaaaaaaaaa

SEQ ID NO: 157322 - DNA, 454 bp, Homo sapiens
  misc_feature (1)...(454): n = a,t,c or g
acctagataacctaagtgtgtcctttaaatgcatgtaagccagaagatgtatgttactttgaaaacataagtaacaaaattttgaatgtattgctaaagagatgtctctctgaagctcttttgatgtttggtgtcttgtccttcttattaaaccatatcttagtaaatagtttggtacgaatggatttatcactgagcaggtctgcaaaataattaatcggtaccgttttgtttctgttgatagaaataaaagagactgatggaagctctcagatcaagcaagaaccagaccccacgtggtagacctcttccctcctagggtaaatcagcttctgtgtcagggatgctgtgtgggcgtccatctggaaccccctggcatacgcgtagctaatgtgatctccccactttcacataagatgggtggccctgcctttcangggaatgttgggagcca

SEQ ID NO: 157323 - DNA, 3647 bp, Homo sapiens
atggcccaagttgcaatgtccaccctccccgttgaagatgaggagtcctcggagagcaggatggtggtgacattcctcatgtcagctctcgagtccatgtgtaaagaactggccaagtccaaagccgaagtggcctgcattgcagtgtatgaaacagacgtgtttgtcgtcggaactgaaagaggacgtgcttttgtcaataccagaaaggattttcaaaaagattttgtaaaatattgtgttgaagaagaagaaaaagctgcagagatgcataaaatgaaatctacaacccaggcaaatcggatgagtgtagatgctgtagaaattgaaacactcagaaaaacagttgaggactatttctgcttttgctatgggaaagctttaggcaaatccacagtggtacctgtaccatatgagaagatgctgagagaccagtcggctgtggtagtgcaggggcttccggaaggtgttgcctttaaacaccccgagaactatgatcttgcaaccctgaaatggattggggagaacaaaggagggatttcattcatcattaagagaccttttttagagccaaagaagcatgtaggtggtcgtgtgatggtaacagatgctgacaggtcaatactatctccaggtggaagttgtggccccatcaaagtgaaaactgaacccacagaagattctggcatttccctggaaatggcagctgtgacagtaaaggaagaatcagaagatcctgattattatcaatataacattcaaggaagccaccattcttcagagggcaatgaaggcacagaaatggaagtaccagcagaagatgatgattattctccaccgtctaagagaccaaaggccaatgagctaccgcagccaccagtcccggaacccgccaatgctgggaagcggaaagtgagggagttcaacttcgagaaatggaatgctcgcatcactgatctacgtaaacaagttgaagaattgtttgaaaggaaatatgctcaagccataaaagccaaaggtccggtgacgatcccgtaccctcttttccagtctcatgttgaagatctttatgtagaaggacttcctgaaggaattccttttagaaggccatctacttacggaattcctcgcctggagaggatattacttgcaaaggaaaggattcgttttgtgattaagaaacatgagcttctgaattcaacacgtgaagatttacagcttgataagccagcttcaggagtaaaggaagaatggtatgccagaatcactaaattaagaaagatggtggatcagcttttctgcaaaaaatttgcggaagccttggggagcactgaagccaaggctgtaccgtaccaaaaatttgaggcacacccgaatgatctgtacgtggaaggactgccagaaaacattcctttccgaagtccctcatggtatggaatcccaaggctggaaaaaatcattcaagtgggcaatcgaattaaatttgttattaaaagaccagaacttctgactcacagtaccactgaagttactcagccaagaacgaatacaccagtcaaagaagattggaatgtcagaattaccaagctacggaagcaagtggaagagatttttaatttgaaatttgctcaagctcttggactcaccgaggcagtaaaagtaccatatcctgtgtttgaatcaaacccggagttcttgtatgtggaaggcttgccagaggggattcccttccgaagccctacctggtttggaattccacgacttgaaaggatcgtccacgggagtaataaaatcaagttcgttgttaaaaaacctgaactagttatttcctacttgcctcctgggatggctagtaaaataaacactaaagctttgcagtcccccaaaagaccacgaagtcctgggagtaattcaaaggttcctgaaattgaggtcaccgtggaaggccctaataacaacaatcctcaaacctcagctgttcgaaccccgacccagactaacggttctaacgttcccttcaagccacgagggagagagttttcctttgaggcctggaatgccaaaatcacggacctaaaacagaaagttgaaaatctcttcaatgagaaatgtggggaagctcttggccttaaacaagctgtgaaggtgccgttcgcgttatttgagtctttcccggaagacttttatgtggaaggcttacctgagggtgtgccattccgaagaccatcgacttttggcattccgaggctggagaagatactcagaaacaaagccaaaattaagttcatcattaaaaagcccgaaatgtttgagacggcgattaaggagagcacctcctctaagagccctcccagaaaaataaattcatcacccaatgttaatactactgcatcaggtgttgaagaccttaacatcattcaggtgacaattccagatgatgataatgaaaggctcttcgaaagttgaaaaagctagccagcttaagaggaccaagttaatgacctctttagtcggaaattttggtgaagctatttggtatgggtttccctgtgaaagttccctacaggaaaatcacaattaaccctggctgtgtggtggttgatggcattgcccccgggggtgtccttcaaagcccccagctacctggaaatcagctccatgagaaggatcttagactctgccgagtttatcaaattcacggtcattagaccatttccaggacttgtgattaataaccagctggttgatcagagtgagtcaaaaggccccgtgatacaagaatcagctgaaccaagccagttggaagttccagccacagaagaaataaaagagactgatggaagctctcagatcaagcaagaaccagaccccacgtggtagacctcttccctcctagggtaaatcagcttctgtgtcaggggatgctgtgtggcgtccatctgaaccccctgcatacgcgtagctaatgtgatctccccactttcacataagatggtgggcctgccttcaggggaatgtgggagccaggtgggagccttgcccgatatttaagctagaagattctacagggaggattctccttgggatcaatattttgtctctcactcaaagatgtaaaagcacttttgccttaaaaagaatgttctgtttctaaatagagtcaacgttgtcctcctcattggaattcactatgagtcagaatcattagactgactttttttttttccatagtaatagtatttttgcagagtctcacagagctgcagatcttttgttcatcttggcagagttaacaagtctgatcctgttagtccagatttcttaaatttggccaggttataataggagcagtagcttgagacccgaattcaggaaactttgacaatggattttttttttttaatccagagacttgtactggaatttgccttaccctgtcagctcatggacttaaggtttcatcccgctttatgagtgcttcttgaatccaagtcattgttacctgaatttgcaaattaagtttgtgatattcgtgactgttaaattcctgtaattagattaacctctttgcttgcttggttgttttctctcctattttagcttaaagtatcagtggttgagaagagcttttcggacctgttactacc

SEQ ID NO: 157324 - DNA, 406 bp, Homo sapiens
  misc_feature (1)...(406): n = a,t,c or g
cccacgcgtccgcccacgcgtccgcccacgcgtccgctgttttctcctttggttaaagattgggctcccaaagcatttataatttcctttaagttggagactgaccccgccattgtaattaatcgagctcggaaggctttggaaatttatcagcatcaagtggggggggctaatatccttgagtcacgacagtcctttgtgtttattgtaaccaaagactcggaaaccaagttattgctatcagaggaagaaatagaaaaaggcgtagagatagaagagaagatagtggataatcttcagtctcgacacacagcttttataggtgacagaaactgaagtaaaaagcccttataggatcaaaaattgttccagggctcttagagatggtgaaaactacaaaaaaacn

SEQ ID NO: 157325 - DNA, 958 bp, Homo sapiens
  misc_feature (1)...(958): n = a,t,c or g
acgtaattgtgcatgcgcggcccatccgcacgcgggctagcaagtactacatccccgaggccgtgtacggcctgcccgcctatccggcctacgcgggcggcggtggctttgtgctttccggggccacgctgcaccgcctggctggcgcctgtgcgcaggtcgagctcttccccatcgacgacgtctttctgggcatgtgtctgcagcgcctgcggctcacgcccgagcctcaccctgccttccgcacctttggcatcccccagccttcagccgcgccgcatttgagcaccttcgacccctgcttttaccgcgagctggttgtagtgcacgggctctcggccgctgacatctggcttatgtggcgcctgctgcacgggccgcatgggccaccctgtgcgcatccactgcctgtcgctgcaggccccttccaatgggactcctagctccccactacagccccaagctcctaactcagacccagaatggagccggtttcccagattattgccgtgtatgtggtttcttccctgatcaccagggtgcctgtctccaacaggaatccccagggaatgggggtttaagcttggctcctggggggttccaccctgctgggaaccagttgaaaacccgtgtaaatnggtgaacccttttgaaggcgagccaaggttggggtggtagatgaccatctcttgtccaacaggtcccagagcaggggatatgtctggtcctcctagtagcacagaggtgtgttctggtgtggtggcagggacttagggaatcctaccactctgctggatttggaaccccctaggctgacgcggacgtatgcagaggctctcaaggccaggccccacagggaggtggaggggctccggccgccacagcctgaattcatgaacctggcaggcactttgccatagctcatctgaaaacagatattatgcttcccacaacctct

SEQ ID NO: 157326 - DNA, 1010 bp, Homo sapiens
caaaaaaaaccacaaacaggtatcaccaatacaaaagtaagcagttgaagagacgagacgaacttgcctgtttacactctggggattgcataagaaaaaacaggtttctcccttaaagggagcctggtgccttctctgttctctttaaggaaccccaggctattataaactatttcagttccctcatgcagcagagggtgcaagagaaaggagagacagcagaagtaaatgaagaaaacagaattcagtcaactgagaagaaaaaccttgctcaaaagaatgacaagcctggaactcctggggtcaagcggtcttcccacctaagcctctccgtgctgggactccggacgcgctccacctcacgcagccgtattcctgctttcaaagcagatggaagagaacaaggacagggggacatccctacattttacacctatgaagaaggattatcccatctaacagcagaaggccaagccacactggagagattagaaggaatgctttctcagtctgtgagcagccagtataatatggctggggtcaggacagaagattcaataagagattatgaagggggctggagccctgggccaagggagacctgtgaccccaggtgccgccgggagaacttcagcccagaggggaaatcagctctccgtgacccagcacccctacccagcagcgcaacagatcctgagaggagctacaggatgattctagaaacagcgcacttcaggaatcatggttggttccgcggaggcacgagcatcctcatctcacacacgggaagcgaggttcggggagaggaacagctggctgggtcacggagctttgaaggggcagaaccagaaacgaacaccttctgcccatctcaggggctcccccttgtggccatcgtgggaggtggccctgcacacagccatcacactctaaatggtcatgcaactggagccttggatgatggccctttttgccagggacctttagataggcctctgagggagatctga

SEQ ID NO: 157327 - DNA, 1388 bp, Homo sapiens
gtgactgcctcttccagggcgggcggtgtggtgcacgcattgctgtgctccaactccctcagggcctgtgttgccgcactctgctgctatgagcttcctcaaaagtttcccgccgcctgggccagcggaggggctcctgcggcagcagccagacactgaggctgtgctgaacgggaagggcctcggcactggtaccctttacatcgctgagagccgcctgtcttggttagatggctctggattaggattctcactggaataccccaccattagtttacatgcattatccagggaccgaagtgactgtctaggagagcatttgtatgttatggtgaatgccaaatttgaagaagaatcaaaagaacctgttgctgatgaagaagaggaagacagtgatgatgatgttgaacctattactgaatttagatttgtgcctagtgataaatcagcgttggaggcaatgttcactgcaatgtgcgaatgccaggccttgcatccagatcctgaggatgaggattcagatgactacgatggagaagaatatgatgtggaagcacatgaacaaggacagggggacatccctacattttacacctatgaagaaggattatcccatctaacagcagaaggcccaagccacactggagagattagaaggaatgctttctcagtctgtgagcagcccagtataatatggctgggggtcaggacaagaagattcaataagagattattgaagatggggatgggaggttggataccacacccaacagtttgcttgggacagttttgaggatgcagatgtttgatccacttgaaaatgatttatgcaagtttaagatcctgctccctaagtgtaggagagaacttggtgcctcttccactctggagtgaagttaatgaaagtctttttccttttccaaaacccaacctggaaccagttctttcttgagacagactatactgagacaacaagttgtcaccagcagaagatagataatatgacctttattaacttgatgaattaactttaccaagagggtatttgtagtttactatttaccctaaaactttctgtgtctggggtaccctctgagtaggcctataattcctaccttgactgtgtgcatcatttgtaagctagcagatctatgtggtgaaaatgcacaggagcttggtagactgcgggggaaagagagagctcctttcgccatgttttaccagtctgctgttataacctcttaggttgtatcctttaatttccagccttttaggttagtttctgtaacagaacaagtgagtctgggatgaagtcctcaaagtacttcaaatggtaattgttttgtttttgtaatagcttaacaaataaacctaggttttctatatta

SEQ ID NO: 157328 - DNA, 554 bp, Homo sapiens
  misc_feature (1)...(554): n = a,t,c or g
aaaaccacttgttgaaaagcgggttcttnaagaaacaccaagagagcccggactctgaccatggtgtcccctggnctgtgncttttgtggcccctgtggtaggaggctggtacanggttttgaatcggttcatccctggcacccacccaaagtggatgcactgaaagaagatgttgttggaatccaagggggtttgccccgtgttttctaggctgctttctcccactggtaggggcacttaatggactgtcagcccaggacaactgggccaaactacagcgggattatcctgatgcccttatcaccaactactatctatggcctgctgtgcagttagccaacttctacctggtcccccttcattacagggaggatcctgcttctaccacccttgtctccgatcccacctgagctccgtctttgatggcatatctggagggacagtggctggggtgctgcagcctaggttagacagagaggtagaccagaaggccaagtaggagcctggtcagacactcacaataaagacagttgctgaactgcacccgaaaaaa

SEQ ID NO: 157329 - DNA, 690 bp, Homo sapiens
atcctgatgcccttatcaccaactactatgtaagagctgacacctcaactgcttgttctcctgcttccttaagtctagaactgtcctgggattggggggtcctcctgacatgggaaacccttccgttgggattactctttcattcccaggatgggcaccataaatagggaagccatcacccaactgttcacctttttcttgtgtgcagaagttggggtagggccaggcaagacagtgagtctggggtcaggtggtggggcagccatccaacctttacattttctcttgcagctatggcctgctgtgcagttagccaacttctacctggtcccccttcattacaggtatgttgcacccctaccccacccatcaaggaagacccacgttaccaacagttggagacaaaatgattctcatttcaaccttgagctaccttagacccccaaacggaacactgagccgtgatcagagttcctcagattcccaagcgtgttattcagaatgtcttgccatttccggaaactgtcccagagtgtctgcccactgaccttcttcatctccctagggaggatcctgcttctaccacccttgtctccatcccacctgagctccgtctttgatggcatatctggagggacagtggctagggtgctgcagcctatgttagacagagaggtagaccagaaggcc

SEQ ID NO: 157330 - DNA, 408 bp, Homo sapiens
caccactcagggtcctgtggacagctcacctagcggcaatggctgcaggaagaagcctatatcacaaaggaacagaagtattcattcctgcatgactcccagacctccttctgcttctcagactctattccgacatcctccaacatggaggaaacgcagcagaatccaacttagagctgctccacatctccctgctgctcaatcgagtcgcggctggagcccgtgcggttcctcaggagtaccttcaccaacaacctggtgtatgacaactcggacagcgatgactatcaactcctaaaggacctagagggaggcatccaaatgctgatggggaggctggaagcggcaaccaactgactgggcggacctcaagcaaactacaacaagtttgacaaaactcgcacaaca

SEQ ID NO: 157331 - DNA, 542 bp, Homo sapiens
gtataaaaagggcccacaagagaccggctctaggatcccaaggcccaactccccgaaccactcagggtcctgtggacagctccaggctcccggacgtccctgctcctggcttttgccctgctctgcctgccctggcttcaagaggctggtgccgtccaaaccgttccgttatccaggctttttgaccacgctatgctccaagcccatcgcgcgcaccagctggccattgacacctaccaggagtttgaagaaacctatatcccaaaggaccagaagtattcattcctgcatgactcccagacctccttctgcttctcagactctattccgacaccctccaacatggaggaaacgcaacagaaatccaatctagagctgctccgcatctccctgctgctcatcgagtcgtggctggagcccgtccggttcctcaggagtatgttcgcaacaacctggtgtatgacacctcggacagcgatgactatcacctcctaaaggccctagaggaggcatccaaacgctgatggggaggctggaagacg

SEQ ID NO: 157332 - DNA, 600 bp, Homo sapiens
atggctgcaggctcccggacgtccctgctcctggcttttgccctgctctgcctgccctggcttcaagaggctggtgccgtccaaaccgttcccttatccaggctttttaaagaggctatgctccaagcccatcgcgcacaccagctggccattgacacctaccaggagtttataagctcttggggaatggactctattccgacatcctccaacatggaggaaacgcagcagaaatccaacttagagctgctccacatctccctgctgctcatcgagtcgcggctggagcccgtgcggttcctcaggagtaccttcaccaacaacctggtgtatgacacctcggacagcgatgactatcacctcctaaaggacctagaggaaggcatccaaatgctgatggggaggctggaagacggcagccacctgactgggcagaccctcaagcagacctacagcaagtttgacacaaactcgcacaaccatgacgcactgctcaagaactacgggctgctccactgcttcaggaaggacatggacaaggtcgagacattcctgcgcatggtgcagtgccgctctgtggagggcagctgtggcttctag

SEQ ID NO: 157333 - DNA, 793 bp, Homo sapiens
cccagacctccttctgcttctcagactctattccgacatcctccaacatggaggaaacgcagcagaaatccaacttagagctgctccacatctccctgctgctcatcgagtcgcggctggagcccgtgcggttcctcaggagtaccttcaccaacaacctggtgtatgacacctcggacagcgatgactatcacctcctaaaggacctagaggaaggcatccaaatgctgatgggggtgagggtggcaccaggggtccccaatcctggaagcccactggcttcgagggctgggggagagaaacactgctgccctcttttcagcagtcaggcgctgacccaagagaactcaccatattcttcatttcccctcgtgaatcctccaggcctttctctacaccctgaaggggaagggggaaaatggataaatgagagagggagggaactgggcccaagcgctgggcctctccttctcttccttcactttgcagaggctggaagacggcagccacctgactgggcagaccctcaagcagacctacagcaagtttgacacaaactcgcacaaccatgacgcactgctcaagaactacgggctgctccactgcttcaggaaggacatggacaaggtcgagacattcctgcgcatggtgcagtgccgctctgtggagggcagctgtggcttctaggggcccgcgtggcatcctgtgacccctccccagtgcctctcctggcctgaaggtgccactccagtcccaccagccttgtcctaataaattaaggttgtattgtttc

SEQ ID NO: 157334 - DNA, 822 bp, Homo sapiens
aggatcccaaggcccaactccccgaaccactcagggtcctgtggacagctcacctagctgcaatggctacaggctcccggacgtccctgctcctggcttttggcctgctctgcctgccctggcttcaagagggcagtgccttcccaaccattcccttatccaggccttttgacaacgctatgctccgcgcccatcgtctgcaccagctggcctttgacacctaccaggagtttgaagaagcctatatcccaaaggaacagaagtattcattcctgcagaacccccagacctccctctgtttctcagagtctattccgacaccctccaacagggaggaaacacaacagaaatccaacctagagctgctccgcatctccctgctgctcatccagtcgtggctggagcccgtgcagttcctcaggagtgtcttcgccaacagcctggtgtacggcgcctctgacagcaacgtctatgacctcctaaaggacctagaggaaggcatccaaacgctgatggggaggctggaagatggcagcccccggactgggcagatcttcaagcagacctacagcaagttcgacacaaactcacacaacgatgacgcactactcaagaactacgggctgctctactgcttcaggaaggacatggacaaggtcgagacattcctgcgcatcgtgcagtgccgctctgtggagggcagctgtggcttctagctgcccgggtggcatccctgtgacccctccccagtgcctctcctggccctggaagttgccactccagtgcccaccagccttgtcctaataaaattaagttgcatca

SEQ ID NO: 157335 - DNA, 1221 bp, Homo sapiens
atggagctgggtatgtggaacatttgcagggaagtttgtttctccgcttgtttttccaggggtattcgagatgacattgaagaggaagatgaccaagaagcttattttcgatacatggcagaaaacccaactgctggtgtggttcaggaggaagaggaagacaatctagaatatgatagtgacggaaatccaattgcacctaccaaaaaaatcattgatcctcttccccccattgatcattcagaggttgaccaacatggcctgcggccagagggcacccacctgacccttaaagagaggacaagttgggtggagtctgtggctgacactctgtgcacaatccttacaacactggtgatggatcccaaggcccaactccccgaaccactcagggtcctgtggacaggctcacctagtggcaatggctccaggctcccggacgtgccctgctcctggcttttgccctgctctgcctgccctgggcttcaaggaggctgggtgccgtgccaaaaccgttccgtatatccaggcttttttgaccacgctattgctccaagcccatcgcgcgcaccagctggccattgcacacctaccaggagtttgaagaaacctcatatcccaaaggaccagaagtattcattcctggcatgactcccagacctccttctgcttctcagactctattccgacatccctccaacatggaggataacgcaacagaaatccaatctagagctgctccgcatcgtccctgctgctcatcggagtcgtggctggagcccgtgcggtttcctcaggagtattgttccgccaacaacctgggtgtattgacacctcggacagcgattgactatcacctcctaaaggacctagagggagggcatccaaccgtttgatggggaggctggaagacggcagccgccggacttgggcagatcctcaagcagacctacagcaagtttgacacaaactcgcacaaccatgacggactgctcaaggaactacgggctgctctactgcttcaggaaggacatgggacaagggtcgagacattcctgcgcatggtgcagttccgctctgtggagggcagctgttggcttctagggtgcccgagtagcatcctgtgagccgacccctccccagtgcctctcctggcccctggaaggtgccactccagtgcccaccagccttgtcctaataaaattaaggttgtatcatttc

SEQ ID NO: 157336 - DNA, 411 bp, Homo sapiens
cagccttccaaggtagggcacaccaaggcctaaggaatcagaaagggcccgagggtgggctgtgtcctggctttcaggccctggggcgaccaccagcctctgctcactctgaggctccagccagggcgccaagcctcaggaccgtgggtggggcccaaggacactctggacccccgttccattcatgagaggccctcagcacgccacgtgtctgctgtggcagcccgcagggagggtggaagccttctgtaaattccacatgtggccccagggcatgacgtccttgatgaaggccgcgctggacctcacctaccccatcacgtccatgttctccggagccggcttcaacagcagcatcttcagcgtattcaaggaccagcagatcgaggtgcacccccacccacgaaagat

SEQ ID NO: 157337 - DNA, 1784 bp, Homo sapiens
  misc_feature (1)...(1784): n = a,t,c or g
ggggagggggagcaagaggctgtgcccatgtggtcgttctcaaggccttggcggagtgcggcatccgtgtggacatggtgggaggcacgtccatcggggccttcgtgggtgccctgtactctgaggagcggaactacagccagatgcggatccgggccaagcagtgggccgagggcatgacgtccttgatgaaggccgcgctggacctcacctaccccatcacgtccatgttctccggagccggcttcaacagcagcatcttcagcgtcttcaaggaccagcagatcgaggacctgtggattccttatttcgccatcaccaccgacatcacagcctcggccatgcgggtccacaccgacggctccctgtggcggtacgtgcgtgccagcatgtccctgtccggttacatgccccctctctgtgacccgaaggacggacacctgctgatggacgggggctacatcaacaacctcccagcggatgtggcccggtccatgggggcaaaagtggtgatcgccattgacgtgggcagccgagatgagacggacctcaccaactatggggatgcgctgtctgggtggtggctgctgtggaaacgctggaaccccttggccacgaaagtcaaggtgttgaacatggcagagattcagacgcgcctggcctacgtgtgttgcgtgcggcagctggaggtggtgaagagcaaagactactgggagtacctgcgcccccccatcgacagctacagcaccctggacttcggcaagttcaacgagatctgcgaagtgggctaccagcacgggcgcacggtgtttgacatctggggccgcagcggcgtgctggagaagatgctgcgcgaccagcaggggccgagcaagaagcccgcgagtgcggtcctcacctgtcccaacgcctccttcacggaccttgccgaaattgtgtctcgcattgagcccgccaagcccgccatggtggatgacgaatctgactaccagacggagtacgaggaggagctgctggacgtccccagggatgcatacgcagacttccagagcacctcagcccagcagggctcagacttggaggacgagtcctcactgcggcatcgacaccccagtctggctttcccaaaactgtctgagggctcctctgaccaggacgggtagaggcctctgctaaagagcccggatgcagcgtcttcccgtgggactgtcccccaaggctgaggctcctgccaagtcctaggggcctctggtacctgcccctgctgaaagccctgacttccccgggggccccaggctgtgttaagggttctctgggccctcttctttgtaccagcagccctgcatacagggccctgtgagcccccctgcagtcctgtgaggcccctgaagctttgtgaggcccctgaagctctgtgaaccccctgcagccctgtgaggccccccgaagccctgtgaggccccccgaagccctgtgaaccccctgttgccctgtgaggcccccaaagccctgtgaactgcctgctgtcctgtgaactgcctgctgccctgtgaggtgtggggacccctgatgctgcccgtgggatgtttaaataaagggggatctcactgtggaaaataaggaaggaggtcgcggctgggggtgctgatctcgcccccccctcctcaaaaaaaaaggggggggaataaccctctgatgggcccggtggtggcttattgggagtgcgcacacnnnnnnnnnnaccgcccgcccgctgcggttgttgtcccctggtaggggccccc

SEQ ID NO: 157338 - DNA, 1842 bp, Homo sapiens
tcgactgatgcagtgtgtttcatccttcagcaaaaatggagctttacaggcgagacttgaaatctgtgctttgagggacactgtggctgtttacctgacacccgaaagcaagtcaagttttaagcaggctttggaagccctgccccagctttccagtggagcagataaaaagttactggaagagctcctgaacaaagtcaagagtagcatgcacttgcagctcaactgtttccaagcagcttcttcaaccatgatgaaaacataaatatctgccacataaaaggagtccaggaaaataacacgtaataagactgttcactctctaagtaccctaaaggtatttggtgtattaaacatagggtttggcatttttctcttttttcttcctctgacttcgaaaattgttggtatacatttcaaccaaaatgacctcatttgaaatgcccatggaagtatttgttttgccattcttactagatcagatcctgtatgactttaaaatacattttaaaatatattttgcatctcagcagaaggttgagtgctgcaggaagagctgcttctgcaggggagttttctggaatggcgtggcacatattgaagcatttctcagtgtcccgttcacggaaagcgcaggcagctcccacgacacacggagagactgactgatacgagatttggaaagctatgtagacatctttgggagctcttactgtcctaaactgtacagctgtgcttaaaaccctcatttcatataaatggccctaagttttctaattcaagcggggttttggaaaaatttatggtctccattaaaatactttatttttactggggtagattatttgtggtccaggtgtctgtgatttaactttgcgttttgctatctgatttttatttttcacagggctaagcatgagctttcattctcactcactcttaatttgtcgtgcgtcactacacatgcacgtgttgcagtccctgaggccctgtgtgttatctgtgatggagtgtgaatgtgtaacgggcactgtgttacactctcaggtgttggcggggcggtcgcagactttcagggtcccctaacggaaaggccagggtccgcgtgggacgggccaactccctgcccgctcctttcagcaggtgactgtcttctggccacttcttacctgctgaaggatcttgctcagtagctggaacaatgctgctgtcacacagtctcttctctggaaactttcaggatgctccttggtcaccaggcaatggggagctgtaggaccagccgcatgcacttgccccacattcactgctgactggcttcactggaataggttcaggtcaccgggacttctctcagagtcagcagccccaccccaactccctcaaaaccgtcgcacctgaaaattttccagagaggaattcctctttgtagtcggcttgtccagggttttcaagtttttctatggttattttttaaaatcccctttttttaaatgcctaaaattaaatggccctcattaatggcaagtaattttaggaggcacagtgtaggccatgtacagtttccatttattttaaaataaattaaatgtgttgggttcatttggtgtatgggggggacatcatggtaactggaaatgaaagtttaatctttcaccaaatgtgctttgataaagcgtgttaagaattgtctttcctaagtatggttaactgttgtatctaactcaactgtgagctaagtttaaaaactgcaatcatgaatgtttgtgatattttaaatatctactacagcacattcagccaataaagaatctgcctttaatgtaagttgtaatttacttg

SEQ ID NO: 157339 - DNA, 365 bp, Homo sapiens
  misc_feature (1)...(365): n = a,t,c or g
cgatactgccactgcctctgcagaacgccacggtggaagcggggaccagatgccaggtggccggctggggaaggaaatggagccaggggagggtggccctggtgactggggcctcatggggacccctgggagcagaaaagtcagcgacatgaactgtattctgtaagtggcccgcgtttaattcccggtannnnnnnnnnnnnnnnnnnnnnnnnnnnnnnnnnnnnnnnnnnnnnnnnnnnnnnnnnnnnnnnnnnnnnnnnnnnnnnnnnnnnnnnnnnnnnnnnnnnnnnnnnnnnnnnnnnnnnnnnnntttttanattccttaatggatatccttgagattaaggccaacgcggccgccg

SEQ ID NO: 157340 - DNA, 372 bp, Homo sapiens; identical to SEQ ID NO: 139277
  misc_feature (1)...(372): n = a,t,c or g

SEQ ID NO: 157341 - DNA, 377 bp, Homo sapiens; identical to SEQ ID NO: 139278

SEQ ID NO: 157342 - DNA, 256 bp, Homo sapiens
gtacgaagatgccctggtgctcctgctcacagaggtgttgaatcgaatccagttcagatacaaccaagcccagctggaggagttggatgatgagactctggatgacgatgtccaagacaagctgctgctatctgcgtgccacttactggtctcactggccaccaccgtgcggcccgtctttctgatcagcatccctgcagtgcagaaagtattcaacagaatcactgatgcctctgccctgcgacttgtcgataag

SEQ ID NO: 157343 - DNA, 350 bp, Homo sapiens
gcccaggtgttggtgtgccgagccctctctaacatcttgctgcttccgtggccaaaccttccagagaatgagcagcagtggcccgtgcgctccatcaaccatgccagcctcatctctgcactctcccgggactatcgcaacctgaagcccagtgctgttgccccacagagaaagatgccactggatgacagacacaggttgaacatcacggcggagaacgactgccggcggctgcactgctccctgagagacttgagctccctgctgcaggccgtgggccgcctggccgagtactttatcggggatgtgtttgctgcacggttcaatgatgccctcacagtcgtggaaag

SEQ ID NO: 157344 - DNA, 6098 bp, Homo sapiens
  misc_feature (1)...(6098): n = a,t,c or g
aagatcttccggactgccatgctgttccagtttgtgaacgtgctgctccaggtcctggtccacaagtcccatgatcttctgcaggaggagattggcatcgccatctacaacatggcctcagtcgactttgatggcttctttgccgccttcctcccagagttcctgaccagctgtgatggtgtggatgccaaccagaaaagtgtgctggggcggaatttcaagatggatcgggtgtgcgagggaatcagttctctaagtcgactgcagaatgagctcagctatatcgagaagtttactgactttcttcggctctttgtgagtgttcacctaagaagaatcgagtcttactcccagttccctgtggtggagtttttgacacttttgttcaagtacacatttcatcagcctactcatgaaggttacttctcttgtttggatatctggacgctgtttttggactatctgacaagtaaaattaaaagtcgtcttggagacaaggaagcagttctcaacaggtacgaagatgccctggtgctcctgctcacagaggtgttgaatcgaatccagttcagatacaaccaagcccaggctggaggagttggaatgatgagactctggatgacgatcagcagacggagtggcagcggtacttacggcagagcttggaggtggtggccaaagtgatggagctcctgcccacgcacgccttctccactctgttccctgttcttcaggacaatttaggaagtttatttgggattacaacagtttatagtcacttcagggtcaggacacaggttgaacatcacggcggagaacgactgccggcggctgcactgctccctgagagacttgagctccctgctgcaggccgtgggccgcctggccgagtactttatcggggatgtgtttgctgcacgggttcaatgatgccctcacagtcgtggaaaggttggtcaaagtcactctgtacggatctcagataaaattgtacaacattgaaactgctgtgccatcagtattgaaacctgacctcattgatgtgcatgctcagtccctggctggcggctgcaggcttagtgctcactggttagcacagtattgcagtgaaattcaccggcagaacacgcagcagttcgtgacactcatctctactaccatggatgcaatcacacctctaatcagcaccaaggtccaagacaagctgctgctatctgcgtgccacttactggtctcactggccaccaccgtgcggcccgtctttctgatcagcatccctgcagtgcagaaagtattcaacagaatcactgatgcctctgccctgcgacttgtcgataaggcccaggtgttggtgtgccgagccctctctaacatcttgctgcttccgtggccaaaccttccagagaatgagcagcagtggcccgtgcgctccatcaaccacgccagcctcatctctgcactctcccgggactatcgcaacctgaaagcccagtgctggtgccccacagagaaagatgccactggatgacaccaaactgattatccaccagacacttcagcgtcttaggaagatattgtgggagaatatctcggggggagtccaccaagtcttcgacagattttgcttaccagttcggttgcagggaatctgtttcaggtctccctgggcctctttccagctttttatccatcagtcagatgtgactgatgagatgctgagcttcttcctcactctgtttcgaggccttagagtacagatgggcgtgccttttaactgagcaaatcatacagactttcctcaacatgtttaccagagagcagttagccgagagcatcctccacgagggcagcacaggctgccgggtggtggagaagtttctgaagatcctgcaggtggtggtccaggagccaggccaggtgttcaagcccttcctccccagcatcatcgccctgtgcatggagcaagtgtatcccatcattgccgagcgtccctcccctgatgtgaaggcccgagctgtttgagctccttttccggacgctccatcacaactggaggtacttcttcaagtccaccgtgctggccagtgtccagagggggatcgcttgaggagcagatggagaatgagccccagttcagtgccatcatgcaggctttcggacagtcctttctccagcccgacatccacctttttaaacaaaatctcttcttacttgggagactctcaacaccaagcagaagctgttaccacaagaaggatcttccgggactgccatggttgttccagtttgtgaacgtgctgctccagggtcctgggtccacaagtcccatgatcttctggcaggagggagattgggcatcggcattcttacaacatggcctcagtcgactttgaatggcttctttgccgccttcctcccagagttcctggaccagctgtggatggtgtgggatgccaaccagaaaagtgtgctggggcggaattttcaagatggatcgggtgaggagagaaagaggccgggctaagaggagggcagagtgggcacgcaagcctggcacctgtgcagcaaggagggggcacattgaggcctctgggcgtggtctgtgcccaccctgcagcttggcggcagctcacgagatgcctgctgacctggtgctgtagcctgattgaggggcacagccttttccccagtcttggtgtctgtagcacgtatgttcttagtctcagccatggaggtcccgagttcctggctctgcagcccctccatttgtcttggcatctttgttcatacccaggaccctgccgttctccctcctgggtgatgagccccggtggggccagcattggagtgtgcccaggcttgcattcaagctgagatggttggtgcttgggagctgcacttctgggtccccagggttagaggtgggacccaggttccccggctgtcttgggctctttccagaccagccccagctcagcttgggctgagttgctgccaggtcctgggaggagccctcctagtactcaccctcttgtcccactgctgccacctgtgcagggactgtcaggtgggctgtccccacccgtgcagcacctcggtgggagctgggtgctgctggctcttggtgtccatgaggccatcttgttggagcctgacagtgcctgggacctccttccccatggggctcacctgttctcttcttcctgtgtcaggtgaccaggcctctctcttgcctgataggaacttctgggaacttttccttgtaccgttttatacttgatgaaattaggaaaagaaatcgctttctccctggtcctcttggggttcttgacctgagtcctctgtgaagcagcttgtccacggctccaccgtagtgctcagatgcacacattgctctcactggtgcaaacctggccgcctgctttcctcatttgccacgtgtggcagggaagcttttgcttagactcatcctgttctcctttgtcttggggtcttccttttcttgggacttgttctctcctaagcctcttccagttcacttcagcccctggatatgttttttcctttttctagaggccagatcctaatacttaatgatcagcttctaacgacatcaatatcagtcaactttttgatttaaagctgtggtttcaaaatctagttataggccaggcgcggtgtctcacacctgtaatctcagcactttgggaggccaaggcgggcggatcacttgaggttagggggtttgagaccagcctggccaacatggcgaaaccctgtctctactaaaaataaaaaaaattagtcaggtgtggtggcacacgcctgtaatcccagctgcttgggaggctgaggcacaagaatctcttgaacccgggaggcagaggttgcagtgagcggaggttgtgccactgcactccagcctgggcggcagagtgggactttgtctcaaaaaaaaaaatctagttatatcagaagcacctggggtacttattaaaaatggagaaacagacttctgtgttctacccaggaaattctggtttggcatttgggagccactgatttaaaagacatcccttagttggttttttgagggtaaaataaaagaatcaccaccttccattcagtcacgcactgtgtgtttgaagccagctgcttctcaagccccgggccaggaactggggcaccagtcccagccttcaccaagtctttcatggtagacaggccaatacagcaccctctgtggaccacatagtgccaagcatgtgacatgtcttggctcgagtaagccttctaacaagcctctgaagtgtgggtcctgttactcccccatttcacagatggtgggggctcagaaggtgagcagttcacagaacttggaagtggtagagctgcgaagcaggaggcagacctgggtgttctggccccagagcctgcacacactccccagaagcagattgctcaggacagaggcgctgagctggctgctggggccaggaaataggaggcatctgtgcagactttgggaagaggcaggctttgaatggagttctggaagaggaatagtggttgggcaggaaaatgaacttggtcctgctcatggctctgctggggcttgctgggcctgtttgagtcctcaccgggacctacactgaaaaaaaaagcagggtctcaccagtgtgcatgatggcggaggtcagggcctcacttctggcccagggccttccatggcccacgctgcgcccagtgggacaggccttgggactgtgtttgctgctgctcgggtggctctcgaggggcaggggcggcctgggagccccgttgggtaaagggtcttgcagacattgctcggtgttgcgcgttcacctcaaggggccatggtgaagaagagggttttcaccacagccatgtctgcgtttgaggggccggactcaggagcaagtgtgctggtctcttcagtgtgagctggggccagcttcttcatggtgcagcgctttggtctttctgtccttagactagtggttctggtaaggcttggtggcagccttgtggtgaggactcagtgagttgatgtctgtatgttgattgcagcagtgtctggcacccgagaggccctagggacgtattcctcttgttctttttctcccacagcgcctggcacagagtctctgtgacacgcagtgcaacagtgaatagaagttttgagttttagaaagtgctcccctatcttcagtgcacactctgggatggaagtagctgttggggtctggtgggtgggtgacctggtgtgttgttggctgcagctatgcccctgccttccaggacctgccctcattcacccagaatgtgcacaggctggtcaacgacctgcgctactacagactctgcaacgacagcctgccccctggcactgtgaagctctaggcctgctactgcctggggaacacggacttctgctgctgccacctgcgccagccctaccttccaccacagatgtctcccagatgggccttggtcacactccttggcttttcccacccgcaagcaacgctgcctgcctctgccgctcctccacatcttgcccgcttgcccagcagagctggcttctgggtcccacccttgagcacttggacggtgctccccagggcgttggagcaggcggaggggtgtgtggcccaggtacctaggaggcacccaggaaattcccgcggggtggcccatgcagacccaggcgcacgtggctcatggggcagaatttgccaaggacagctcacgacagtgccacctttctcaccattccagccaaggagagatgtgacgttggaactgctctggcacttctgtcaagcctcccccgccccaattgccttgagatctctgctctttgtcagagatttgcaaatgactcacgtttttgttgttttctcatcattccattgtgatactaagaaactaagaagcttaatgaaaagaaataaaatgcctatgttgttgttctagaannnnnnnnnnnnnnnnnnnnnnnnccctcgggggggggccgggaccccatttccccttataggggggggtataacaattccggggcggcggtttaa

SEQ ID NO: 157345 - DNA, 321 bp, Homo sapiens
aattcaaaaataatggaattgcttcaggtggtaccaagctgtgttgcttcattagatgatgtggctgaaactgaccgcaaggagtatgtcactgttaagatcaggaaaaaatggaggcaaagtgtcacactgagacagaataacctgccagctcagagtggatctcatgctgctgagaaaggcaacagcgactggccagagaggcctggactgacacagactggccctggacacagacggatgctgcggagacacacggtagaggatgcggtcgtgtcccagggcccggaggctgctggccccctctccactccccaagag

SEQ ID NO: 157346 - DNA, 1873 bp, Homo sapiens
  misc_feature (1)...(1873): n = a,t,c or g
cacggggcctccattaacgcttctaacaataagggcaacacagcgctgcacgaggctgtgattgaaaagcacgtcttcgtggtagagctgcttctgctccacggagcgtcagttcaggtgctgaacaagcggcagcgcacggctgtagactgtgctgaacagaattcaaaaataatggaattgcttcaggtggtaccaagctgtgttgcttcattagatgatgtggctgaaactgaccgcaaggagtatgtcactggttaagatcacgaaaaaagggaactcaaaactgtatgatctaccagatgagccttttacaagacagttttactttgtccactcagctggtcagtttaagggaaagacttcaagggagattatggcaagagatagaagtgtccctaatttaaccgaaggttctttgcatgagccagggaggcaaagtgttcacactgaggacagaataacctgccagctcagagtgggatctcatggctgcttgaggaaagggcaacagcgactgggccagaggagggctggggacttgacacagactggccctggacacagacggatgcttgcgggagacacacggtagaggatgcggtcgtgtcccagggcccggaggctgctggccccctctccactccccaagaggttagtgcttcccggtcctaacaggaatgaggagttgttgaacccactgctaggaagcaaggatgcaacaagatgatgctgagcgtggaacacatcttgagaactaaatgttgctttccatgagattggctttgaggaagtctttcagcaccaaagttcctcgaaggcttttcctgtgggcagggaaagattgcaacaaaaaagtttaaccaccaccatctctctcctcttcaaagctaatgaataccattggaaacagacaaaaattccagtagcatccagatccttaagccagaggtgcatgcttctttttaagtatgagggtttgttggtcacagtgggagaggtttcaccaccgcattctgacctcctcctcccaaaaggtgctaaacctctctgacctgtgtacattcacaaaccacagctagaattcctccacctaggattaagctggagagaagtaagtaatttaggtttcatggtactgtagaggccaggctgaaatgtcatatctgaaaggaagaaagcagcagctggacaatgtttctttgcaaagcaacactccgaaccaaaagatgcctcaatcccatttttgatattccattttagtgaaaggatgcatccagacctgttccacatcatgcacatggggaaaggggtgggttatcattttccttctaacaagtgggtacagatattccggttactacacgtgcacctgtagcagtatttctagaaacatcccctttttggttggagaccctccccttgaatgtctgtcacactccaccacctgaccgggatggttactggattagagagtagatttggcacatcttttcttagtcttttgattcaaattcaaaacttaacagcacaaaccaggtcaagagttactttcggttagaatttattgccatttattcctttttataaatttctatagattatactgttatttttatgttattggcctagagcctacacgtatatgggtttgnccctgagtcccgttttcaaatgaccttgtgattgatagggaaatggttttgtcccatgttcttggaaactacttgtgtatgtacagaaggaagggagggattatttttctacaaagtaatttatgatttctaattttctaatgtgccttggatatgtgccacaatgatggaaaagaaacagtaaactttatgattccttaaaaaaaaaaaaaaaaaaa

SEQ ID NO: 157347 - DNA, 3377 bp, Homo sapiens
  misc_feature (1)...(3377): n = a,t,c or g
atgcctgactgcacatcaaagtgtcgatccctgaagcatgctttggatgtcctttctgtggtaacaaaggggagcgaaaaccagattaaggcctttctctccagtcattgttacaatgctgcaactatcaaggatgtttttggcaggaatgccctccaccttgtttcctcctgtggaaagaaaggagtgttagattggcttattcagaaaggagtggatctgttggtgaaagacaaagagtctggatggacagcattgcacagaagcattttttatggacatattgattgtgtttggtctctattgaagcatggtgttagtctgtatattcaagataaagaaggcttgtcagctttggatcttgtaatgaaggatagaccaactcatgtagtattcaagaatactggttgtttgctagatcccaatggagaaaagtgtgtaactgctcctcgtcaggtctctgcccttcaccataaagacattgctctgtctttggttgctgcaagtgatggagctacagtctgtgttaccacaaggggagatatttacttacttgcagactatcagtgcaagaagatggcttctaaacagttgaacttgaaaaaagttcttgtgtctgggggtcatatggaatacaaggttgatcctgaacatttgaaagaaaatgggggtcaaaaaatttgcattcttgcaatggatggagctggaagggtgttttgctggagatcagtcaacagttctctgaagcagtgtcgatgggcctatccacgtcaggtcttcatttctgatattgctttaaatagaaatgaaattctatttgttacgcaagatggagaaggatttagagggagatggtttgaagagaaaagaaagagttctgaaaagaaagagattttatcaaaccttcacaattcctcatcagatgtgtcttatgtctctgatataaatagtgtgtatgaaagaattcgacttgagaaacttacctttgcacatagagctgttagtgtcagcacagatccaagtggatgcaactttgcaatcctgcagtcagatcctaaaacaagcctttatgaaattccagctgtgtcctcatcatccttttttgaagagtttggcaaactgttgagggaagcagatgaaatggacagcattcatgatgtgacatttcaagttggcaatagactcttccctgcacataaatatattttggcagtgcattctgatttttttcagaaattgtttctttcagatggtaatacttcagaatttacagatatttaccagaaagatgaagattctgcagggtgccatctctttgtggtagagaaggttcatcctgacatgtttgaataccttttacaatttatatacacagatacttgtgactttttaactcatggcttcaaaccaagaatacacttaaacaaaaacccagaagaatatcagggaactctgaattctcatttgaataaagtgaatttccatgaagatgataaccagaagtctgcatttgaagtttacaaaagtaatcaagctcaaacagttagtgagaggcagaagagcaaacctaaatcttgtaaaaaaggaaaaaatattagggaagatgatcctgtaagaatgttgcaaactgttgcaaagaaattcgacttcagtaatttgagtagtaggttagatggagtcagatttgaaaatgaaaaaattaatgttattgccaagaacactggtaataaactgaagctaagtcagaaaaaatggtataatgtatacaaagaaaaagtgatgcttgttttctttctttttttagaatctcaaaatgtagattttatttgtagtgttcttgtggtggctgatcaacttctcataacccggttgaaagagatttgtgaagtagcattaactgaaaaacttaccctgaagaatgctgctatgctactggaatttgcagcaatgtatagtgcaaaacagttgaaactgtcttgtttacagtttataggattgaatatggcagctttacttgaagcaaggtctcttgatgttttaagcgatggtgttttgaaggatctttctgagttttaccggaaaatgattccagcaatggatagaagagtcattacaccatatcaagatggaccagatattagctatttggaagtagaagatggagatatcttcttgaaagaagaaataaatatggaacaaaatcattcggaaactatgttcaagaaagcaaaaacaaaagctaaaaagaagccacgtaaacgttcagatagttctggaggttataacctttcagatattattcagagtccatcatctacaggattattaaagtctggtaagaccaattctgtggaatctcttccagaactgttgacatcagactctgaaggaagctatgcaggagtgggtagtcctagagatttacagtcccctgatttcacaacaggatttcattcagataagattgaggcgaaagtcaaaccgtatgttaatggtacatctcctgtgtattctagggaagatttaaaaccatgggaaaagtcaccaatacttaaaatatctgctccacagcctattcccagtaacagaattgatactaccagctctgccagttgggttgctggttctttcagtcctgtcagccctcctgttgtggatctcagaactatcatggaaatagaagaaagtagacaaaaatgtggagctacaccaaagtcacatttaggcaaaacagtttctcatggagttaaactttctcagaagcaacgaaaaatgattgcattgactaccaaggaaaacaattcaggaatgaatagcatggaaacagttttattcactccttcaaaagcccccaaaccagtgaatgcatgggcatcttctctgcattcagtttcatccaagtcattccgggatttcttactagaagaaaaaaagtctgttactagccatagttcaggcgatcatgtcaaaaaagtttcttttaaaggaattgaaaattctcaggcaccaaaaattgtcagttttgtaggaggagagagaaggtgacatttgagccaactgtaaaagagtgagaagacatttgaagtggaatatattccagaataaggggaatagtaaaaataaagatgctctacccatggtaccccaggaccagaaggcaaccatatttcagatttaccacttctagacagtcccaatccctggctatcttcttcagtgactgctccatccatggtagccccagtcacttttgcatctattgtagaagaagaactaccacaagaagcagctcttattagaagtcgagaaaaaccgtngctctgattcagattgaggagcatgccatacaagattattggttttctatgaggcatttg

SEQ ID NO: 157348 - DNA, 1542 bp, Homo sapiens
ggggaaactatgttcaagaaagcgaaaacaaaagctaaaaagaagccacgtaaacgttcagatagttctggaggttataacctttcagatattattcagagtccatcatctacaggattattaaagtctggtaagaccaattctgtggaatctcttccagaactgttgacatcagactctgaaggaagctatgcaggagtgggtagtcctagagatttacagtcccctgatttcacaacaggatttcattcagataagattgaggcgaaagtcaaaccgtatgttaatggtacatctcctgtgtattctagggaagatttaaaaccatgggaaaagtcaccaatacttaaaatatctgctccacagcctattcccagtaacagaattgatactaccagctctgccagttgggttgctggttctttcagtcctgtcagccctcctgttgtggatctcagaactatcatggaaatagaagaaagtagacaaaaatgtggagctacaccaaagtcacatttaggcaaaacagtttctcatggagttaaactttctcagaagcaacgaaaaatgattgcattgactaccaaggaaaacaattcaggaatgaatagcatggaaacagttttattcactccttcaaaagcccccaaaccagtgaatgcatgggcatcttctctgcgttcagtttcatccaagtcattccgggatttcttactagaagaaaaaaagtctgttactagccttagttcaggcgatcatgtcaaaaaagtttcttttaaaggaattgaaaattctcaggcaccaaaaattgtcagatgctctacccatggtaccccaggaccagaaggcaaccatatttcagatttaccacttctagacagtcccaatccttggctatcttcttcagtgactgctccatccatggtagccccagtcacttttgcatctattgtagaagaagaactacaacaagaagcagctcttattagaagtcgagaaaaaccgttggctctgattcagattgaggagcatgccatacaagatttattggttttctatgaggcatttggcaaccctgaagagtttgtcattgttgaaaggacaccgcagggaccactggcagtacctatgtggaataagcatggatgctagttcactgtggagttgagatgcattttacataattatgagtttgttcatatgaaagaaaagctgtgggaaaagagtcttgagagattttgtaatatcattctaaatagattaagaaaagatataatttctttactgcagttaaatcatataatgtttgtatgattaaaaataaatttctcagaattgtgattttagtaactttatataaaatgtgtgagacaaaaacttattaaggttaaatagaattgtttcttctgaataatctaacaaaggaaaatataagtgattgaatcataagatataaaggggggtaaagtattagaaataacttttttgtttgataacttgagaatttagaagattttgccaagtatgtgttgttgcttgact

SEQ ID NO: 157349 - DNA, 2970 bp, Homo sapiens
ggggccgcgtcgacgcggaaaagaggccgtggggggcctcccagcgctggcagacaccgtgaggctggcagccgccggcacgcacacctagtccgcagtcccgaggaacatgtccgcagccagggcgcggagcagagtcccgggcaggagaaccaagggagggcgtgtgctgtggcggcggcggcagcggcagcggagccgctagtcccctccctcctgggggagcagctgccgccgctgccgccgccgccaccaccatcagcgcgcggggcccggccagagcgagccgggcgagcggcgcgctagggggagggcgggggcggggaggggggtgggcgaagggggcgggagggcgtggggggagggtctcgctctcccgactaccagagcccgagggagaccctggcggcggcggcggcgcctgacactcggcgcctcctgccgtgctccggggcggcatgtccgaggctggcggggccgggccgggcggctgcggggcaggagccggggcaggggccgggcccggggcgctgcccccgcagcctgcggcgcttccgcccgcgcccccgcagggctccccctgcgccgctgccgccgggggctcgggcgcctgcggtccggcgacggcagtggctgcagcgggcacggccgaaggaccgggaggcggtggctcggcccgaatcgccgtgaagaaagcgcaactacgctccgctccgcgggccaagaaactggagaaactcggagtgtactccgcctgcaaggccgaggagtcttgtaaatgtaatggctggaaaaaccctaacccctcacccactccccccagagccgacctgcagcaaataattgtcagtctaacagaatcctgtcggagttgtagccatgccctagctgctcatgtttcccacctggagaatgtgtcagaggaagaaatgaacagactcctgggaatagtattggatgtggaatatctctttacctgtgtccacaaggaagaagatgcagataccaaacaagtttatttctatctatttaagctcttgagaaagtctattttacaaagaggaaaacctgtggttgaaggctctttggaaaagaaacccccatttgaaaaacctagcattgaacagggtgtgaataactttgtgcagtacaaatttagtcacctgccagcaaaagaaaggcaaacaatagttgagttggcaaaaatgttcctaaaccgcatcaactattggcatctggaggcaccatctcaacgaagactgcgatctcccaatgatgatatttctggatacaaagagaactacacaaggtggctgtgttactgcaacgtgccacagttctgcgacagtctacctcggtacgaaaccacacaggtgtttgggagaacattgcttcgctcggtcttcactgttatgaggcgacaactcctggaacaagcaagacaggaaaaagataaactgcctcttgaaaaacgaactctaatcctcactcatttcccaaaatttctgtccatgctagaagaagaagtatatagtcaaaactctcccatctgggatcaggattttctctcagcctcttccagaaccagccagctaggcatccaaacagttatcaatccacctcctgtggctgggacaatttcatacaattcaacctcatcttcccttgagcagccaaacgcagggagcagcagtcctgcctgcaaagcctcttctggacttgaggcaaacccaggagaaaagaggaaaatgactgattctcatgttctggaggaggccaagaaaccccgagttatgggggatattccgatggaattaatcaacgaggttatgtctaccatcacggaccctgcagcaatgcttggaccagagaccaattttctgtcagcacactcggccagggatgaggcggcaaggttggaagagcgcaggggtgtaattgaatttcacgtggttggcaattccctcaaccagaaaccaaacaagaagatcctgatgtggctggttggcctacagaacgttttctcccaccagctgccccgaatgccaaaagaatacatcacacggctcgtctttgacccgaaacacaaaacccttgctttaattaaagatggccgtgttattggtggtatctgtttccgtatgttcccatctcaaggattcacagagattgtcttctgtgctgtaacctcaaatgagcaagtcaagggctatggaacacacctgatgaatcatttgaaagaatatcacataaagcatgacagtcctgaacttcctcacatatgcagatgaatatgcaatcggatactttaagaaacagggtgtactgcaaagaaattaaaatacctataaccaaatatggtggctatatcaaggattatgaaggagccactttaatgggatgtgaggctaaatccacgggatcccgtacacaggaattttctgtcatcattaaaaaggcagaagggggataattaaaaaactgattgaaagaaaacaggcacaaattccgaaaaagtttaccctgggactttcatgttttaaagatggagttcgacagattcctatagaaagcattcctgggattaaaaaagccaggctggaacccgagtggaaaagagaaaagtaaagagcccagagaccctgacccagctttacagcaccgctcaagagcatcctccagcaggtgaagagccatcaaagcgcttgggccttcatggaacctgtgaagagaacagaagctccaggatattatgaagttataaggttccccatggatctgaaaaccatgagtgaacgcctcaagaataggtactacgtgtctaagaaattattcatggcagacttacagcgagtctttaccaattgcaaagagtacaacgccgctgagagtgaatactacaaatgtgccaatatcctggagaaattcttcttcagtaaaattaaggaagctggattaattgacaagtga

SEQ ID NO: 157350 - DNA, 1192 bp, Homo sapiens
ggaaaagagaaaagtaaagagcccagagaccctgaccagctttacagcacgctcaagagcatcctccagcaggtgaagagccatcaaagcgcttggcccttcatggaacctgtgaagagaacagaagctccaggatattatgaagttataaggttccccatgggtaataccattaacattttctaagtatagatttaaaactctggatggcggtgtgggggacaaatggttgctgaggttgatttgtactcctctgcttagggtatgaagtgtatgacgggtggtgggattccatgcaccgtggcgggtcagtgatggcagagaagtgggtggctgtgttcattagagacattcttgcagctgtcgtttaagagcccacatgagcttaacgacactagaccgcagaaaatcccaccggtaactgcagacagcacctagattttgaaagctggcactttagatataactttgcttatattctaactctttggtgcaaatagaaaaacatcagcttatcctcttgatatgctttgcgtctgtcgtaaataggtattcctttgaataattattcaggataataatgaaagaagttagattaaactacttgactgctgtactttcagagggagaaattctacttaccacaattcttgattttccatgcccttgatgggtactgttaatgtcactgtatatactctttattttacgctttgtctcatatccaaaatcaaacaaaaaaggatgtcttcagaaatgtagaattgtgcagtttggtgctgtgcccacaccactctaaaattaatgattaattgaatcatttggaggtcgctcaaattaaactaatttggcattgtgtgggtgaacaaccaagttgaaatgttttctttttatcaagctatgtggccatatttttggagagagccagagtcttctgtctcttttctacctgtaatctattccaggtgctaagaactgtgaaagtccagcttgggtaatgtagtgagaccctgtctctacaaaaagtaaaaaattagccaggtgcagtggcacacgcctgaggccccagctacttgggaggctgaggttggaggatcacttgagcctgggagtttgaggctgtagtgagctgtgattgcaccactgcacttcagcctgggcactggagggagaccgtatctaaaaaaaaaaa

SEQ ID NO: 157351 - DNA, 1006 bp, Homo sapiens
atattttttaacattttaagtttaacagattgtattcctttcaagtttctatacttgcttaagcaatcttgatttgagtaagggtcttgatttgtgctattatgttctgttagttttggcatgaatatactaaagcttttttttttttttttagcatgtgttttctcctctttggttctctttgtatttactacttttctctttttcttgtgtttttttttttcctgtttttgttttgtttggtgttttgttcctgtcttcattgtttcaggtatttctttacccctctggattccccacgggctggatcgagatggtccagttatgcccagctccttcctcctcctcctcctcctctggtagagcactcttgcgattgctgacactgccaacctccagtatcctcaccctcgcagacgatatctctctcggcctcttaatcccttacctgagaatgaagggatttaaaacactgatttaacattgaaaggccttattcaagtgcttgtaaatgctttcatttcggggctgcctttttggtttttccattttcctttcaggaagattttttctaactttagggtctgtcttgccatgtaattaccaacccagaataacagtgtttgggaacctaaaatctgtttgtggcgtctgcgtctgaaatcaaaaggaacatttgccttcacctgggtgaataaccctttgatgaaaatgaagatatgtcccaagtaacggttaactgtgaagttacacacagtagcctgacttcaaagtgccctgttcctgtaaattttattttaaactgttaccatagtccttaagttgtttatgcctttatccagactggctaaatgtggaaaggcataatattatggaagtttattctgccttatgagaccttaaaaaatggatttcattttacaggctaatgttgtaactgacgtagtatgtaaaataaatcattcctgtgtataaagcagcaaaacccaaaaaaaaaaaaaaaaag

SEQ ID NO: 157352 - DNA, 1742 bp, Homo sapiens
ctaacacaagtccctttcctggtccggaccctggctttcctggccctggtggtgaggatggggggaagcccgttgaatccacctgcttctactgcttttccccaggagccccactcaggctccccggctgctgctgttaatgggaaccagcccagtttccccccgaacagcagtgggcggggtgggggcactccagatgccaacagcttggcaccccctggcaaggcaggtgggggctccgggccgagcctcccccaggcttggtgtacccatgtggtgcctgtcggagtgaggtgaacgatgaccaggatgccattctgtgtgaggcctcctgccagaaatggttccaccgtgagtgcacaggcatgactgagagcgcctatgggctgctgaccactgaagcttctgccgtctgggcctgcgatctctgcctcaagaccaaggagatccagtctgtctacatccgtgagggcatggggcagctggtggctgctaacgatggcccatctgttgcacattatactccgtgtgttcttcaactttcggcgcccttattcccctgccttcctggcttgattgaaggaaagcttgaaaaggcgcagagccctatacctcatttcctccatgataaaaggatccaaagcctgccagtggagacactgggcccggcatccaggatggacccagaatctgagagagccctgcaggcccctcacagcccctccaagacagatgggaaagaattagctgggaccatggatggagaagggacgctcttccagactgaaagccctcagtctggcagcattctaacagaggagactgaggtcaagggcaccctggaaggtgatgtttgtggtgtggagcctcctggcccaggagacacagtagtccagggagacctgcaggagaccaccgtggtgacaggcctgggaccagacacacaggacctggaaggccagagccctccacagagtctgccttcaaaccccaaagctgtgaattatgcaaagggggccggcaaaggaagggtgcgagccggagccgccgccaccgctgccgcccctgactcacgccgcccccgggctggcgcagcgaagggtgtgggacagggtctctttcagctcctggtgaaccccatgaacatctacgaagaacagaagattatgttcttgtacagcttggttccctcgacccaggaccccctgttcccaggctatggcccccagtgccctgtagacctggcaggccccccgtgcttgcgacccctatttgggggtctgggtggctactggagggccttgcagaggggcagagaaggcaggaccatgacatctagggcctctgaactttctccggggcgcagcgtgacggctggcatcatcattgttggagatgagatccttaaggcaccgtgtatgaaatctaacaatgcgctcatcgtcatcctcggcaccgtcaccctggatgctgtaggcataggcttggttatgccggtactgccgggcctcttgcgggatatcgtccattccgacagcatcgccagtcactatggcgtgctgctagcgctatatgcgttgatgcaatttctatgcgcacccgttctcggagcactgtccgaccgctttggccgccgcccagtcctgctcgcttcgctacttggagccactatcgactacgcgatcatggcgaccacacccgtcctgtggatctacccactagtcaattcaccatcttgttga

SEQ ID NO: 157353 - DNA, 1944 bp, Homo sapiens
cgtgagtgcacaggcatgactgagagcgcctatggcctgctgaccactgaagcttctgccgtctgggcctgcgatctctgcctcaagaccaaggagatccagtctgtctacatccgtgagggcatggggcagctggtggctgctaacgatgggtgacgctggtgaagtggcccagggaagtgcacatgtctctccctgctcttcccagggtgatttttttgatgtttggctcttggtccttgtttccactggctttccatacccatggggcagaaacagttggctcctgggagcagaaaaggaattgaggtgggcaggcagaagagcctggattgctcactgttttgggaaacttacatgttgagatctacagagatccaggaaaccaaagccctgctgagcagagccattttgtggctatttctggaggcccaggagtgtggctgcaagagaaaaggggctggaggaagatccggagggcaggggtgttccctctgctgatgatggatgcccctaacacctgtgcctaacacccctactgaaccccacagctccagccttagtttttggagtcaagtgttaaaggtttctggccagaggaattggggtcttgccatccctgcaatagcccttttatgggctctgggagacagctttagggaataaatggggattttcccctttttctacccactcctttgcttcctccaagacttacccaactccttccccctcagagaaccaaatagcctgaggaagcaggagagttcctggttatggcagtttcttggtgatttggggcttcaagacagtaggtgagagatgctgtcaggacgtatcttcttcataccaaagtcactggtcctttctcagcctctctccgtgcttttctcctaatgaccatatttttgccaaaaattgggatatgttatctgacagaccagaatatttgaagtttgggctgtcctgaaagtctggactttggtggtaccctcctcccccagcccatctgttgcacattatactccgtgtgttcttcaacttttcgcgccctttattcccctgccttcctggcttgattgaaggaaagcttgaaaaggcgcagagccctatacctcatttcctccatgataaaaggatccaagtgaggccctgtcacagcctgtgggtaggggatgcggcgggatcctcattgccatggtactcaaaggtagaagagcctggagtttgttgcttctctttgctattctttcatatcctcttgggcctggtgattaattagcaattctcattcctctcagccaaaggcctgcactgggctttatttggctttttttattttttaagcactgcctgccagagatgggcctggggcctgatgaggaccttagcgctgctcgttctccttttctgttcatgcacacattcctccatggggtggggaaggcaggcatggggtgtggccctcggagaagttaggagtcccccagctcaagatacagtggcaaaagacctagtggtcccctacccccacttcttctcagttcctgggcatgaggagagaagaccctgcttctggtgggagctgaacaaccttttgaggcttggaggagagccagcgtctggggcattctttcccagttttccctcacaataaaacggggtagcatggcaaccccccccccacccccccccgtgctcaactcttgtgtttgttgttctgtttgccccatttatctgttgctgtttttgtgttgtcttcccctgctccgcattttgtaaaatggcccctgggggagtgtttttgctggatctgctccctctcgctctctcactccactactttttggaacaaagtgatggcagaatgcggtggtggtgggggtcttttgtactgttggattaataaaatgattttaaaatcccaaaaaaaaaaaaaaaaaa

SEQ ID NO: 157354 - DNA, 1988 bp, Homo sapiens
  misc_feature (1)...(1988): n = a,t,c or g
attgacaactatggaaccaagcctgggaacatcttcctgtgtgtgttccttactcttggagcagccctcactgcattcattaaggcagatctccggagacagaaagcaaacaaagaaactcttgagaacaaactccaagaggaggaggaggagagcaacaccagcaaagtgcccactgctgtgtcagaggatcatctctgagaggaaggtggtgacaactcagggaacacgaacaccccaccttttccttcagcacagctctcaccgccagcacaaagggctttcgcttagagatgtttttggagggaatcagtgggactatttgtgggcatggatggcctatttcctcctaggaacccacgtaagagctttggatgatttagttggagaaaattgcacctatcaccaaatgcaaatttgattcccacctccacccccttttaggttatgggagttggtgttgggacagggtggcagagaatattggagtcaatcctagcttggtctcttgccttccctctttttcttccatccattcgtggacaatgcctgcaaaattttcacaggaagaaagcctattcaggatattaacttgaaatttccagtgtcctaagagcctctcatgaagcccagttctaataagtggcaagctgctctgccggggtcatctcctggggtcatcggactgattgctcaagttctgcaggagaggaagcaccattaggaacaactccattcagaacagctccaccgggacttgtgggcctaaattttcctggcctaacgggtctgtctccaaaccctctttcctaagagctgagcaaaccaaccataataaacttgacaaaagactttgttgtggccatgacagagataccgactcaggagggctacctacctaggtgtgatcatgctgggggctaccttctgagtatatttgtggaaagcacatatttgggaactctggtagcttgagttggggaatgggaaggttctttttttacagaagtaatttccccaggggacttctgtgtgtcacagtcacctctggatgcctttatcttgatgttgcattggggaatctcagccatcagcccaagtgcttgttttattccaagggcaggggtaatcccccgttcaacttactctaacctttgctggaaaactaatcttgattcattctactctggaaaatccaaaggtgcttctgaggagataagaagggaagggggtaagaaggaaaggtgcccctttgaaatggggaattgagcccgttaagaatttaaaagcttatctcacctctgctggggacagtatttgcaaccaccaacccctctcctcacctgctttgaagcgataatcctttatcagatattctaaacttaaagggattccctttaaaccaactcaagctgatctttcctatctagcctgctgtttggctgtacttcatgggctttggtaatatctcctaaaaatgaggttttggtaatttttcctatgcattgggccaactgtgaaccgtgaacccactgtgcctgtccttgcctccccagcccactgcccccggccctcagccatatccagggggcagccctgtgcctggcctgccaatacctgtggggngcttgggcccacctgccctgagaggagccccggtttgtgtgtgtcctgccatgtgtgtgtgtgtgtgtttgtacagattcaagcaatgggatgcaaggaacatgctgtatgtaattaggaagaaagaagtccacgtttttcgggcagaagttagtgagttcagtgtggaggagaggtgagggtgtgcttttactttttgataaagagaaagatgtttactcataaacccctcaaaagggtattaacaaaatgtttaccaaacctattgctttattttaaaaacataatttgtgttttctatttgtaagatctgacatttcgaggcaataaaaacttctcagaaaaaaaaaaaaaaataaaaa

SEQ ID NO: 157355 - DNA, 2248 bp, Homo sapiens
atggatcaaggacacaaatctaaaacctgcgactataaaaattctaaaagacgacatcggaaatacccttctagacaatggcttaggcaaagacttcatgaccaagaacccaaaagcaaatgcaacaaaaacaaaagtcgccaaggaaaacaatgcagtgaaacactgggtggaacacacattactcacatacagaagagacagagcaagatcagcttccctagtggacttcagtctcccatgaccagagggtccctcttggcagctgacacagggcagcccggcgttaagcggaacttctctctccagctgtgtctcttagcaactaagcccccggctcctccagaagcccctcttcgcacatgcgcaaactgcggacgggaaactgggctccctagccctggcgtttttggtgttgctgtcccagccagaatcgcgtctggccggtgggaagccgggaactccagccccctgtaggagaggagaaaggagcgagatcatgatacatggtgatggcttgcagagtcgtaaacaaaagaagacacatgggacttcaacaactttcatcattcgcggaaacaggaagaactttcctaggcccactaaaatcatccaaatttattatagatgaagaatgtcatgaaagtgtattaatcagttcaacagtaaggcttcttgaaagtttggatttaaccagtgcagtgggacaacttctcaatgaagcagttcaagcacaaaacaacacatatagaactggaatcagtactcttttgtttcttgttggtgcttggagcagtgcagttgaagaatgtcttcatcttggtgtccccatttccataatagtatcagtaatgtcagaaggcttacacttttgtagtgaagatgtagtttctcttcatgtacctgttcacaatatatttgactgtatggacagcacaaaaacattttctcaacttgaaacatttagtgtaagtttgtgtccttttctacaggtcccttcagatactgatttgatagaggaattgcatggtctcaaagatgttgcctctcaaacactgaccatttccaacctttctgggagacctcttaaatcatatgaattatttaaacctcagacaaaggttgaagcagataacaacacatcacgaactctgaaaaacagcctgcttgcagatacctgctgcagacagtcaatactaatccacagtaggcattttaataggacagataatactgaaggggtaagcaaaccagatggatttcaagaacatgttacagctactcacaaaacttacagatgtaatgatttggtagagttggcagtaggcttgagtcatggagatcacagcagcatgaagttagtagaagaagcagtacagctgcaatatcagaatgcttgtgtgcaacaaggcaactgtacaaaaccatttatgtttgacatttcaagaattttcacttgctgtctaccaggcttacctgaaacttcttcttgtgtttgtccaggatatatcactgttgtgtcagtatctaataatcctgtgatcaaggaattgcagaatcagcctgtgcgaatagttctcattgagggtgacctcacagagaattaccgccacctggggatttaataagtctggcaaatatttaaaacagtattaggataggcatgcgggctttcaaggaggacagcttcaggaaggaactgtgggggcaattcacgtgtttacaggtgttaatccagttcaaggtgaaccttgtcctggtacaaggaaatgtgtccgaacgcttaattgaaaaatgtataaacagtaagcggttggtaatcggctcaatgaatggcagtgtgatgcaggcttttgcagaggctgcaggagcagtacaggtggcctacattacacaagtgaatgaagattgtgtgggcgacggggtctgcgtgaccttctggagaagcagccctttggatgttgtagataggaacaacagaatcgcaatcttattaaaaacagaaggaattaatttggttacggccgtgctcactaacccagttactgcacagatgcaaatcaaagaagataggttctggacatgtgcctatcgtttgtattatgctctaaaagaggaaaaggtcttccttggaggtggtgcagttgaatttttgtgtcttagctgtcttcatattcttgcagagcaatctctgaaaaaagaaaaccatgcctgctcagggtggctgcataatacttcctcttggctg

SEQ ID NO: 157356 - DNA, 939 bp, Homo sapiens; identical to SEQ ID NO: 126917

SEQ ID NO: 157357 - DNA, 1026 bp, Homo sapiens; identical to SEQ ID NO: 126918

SEQ ID NO: 157358 - DNA, 3105 bp, Homo sapiens
ccacctgccaggagcacgtcccgccggcagtcgcaggagccctgggagccgccgccatgggaatgtccaaatcacacagtttctttggttatcccctgagcatcttcttcatcgtggtcaatgagttttgcgaaagattttcctactatggaatgcgagcaatcctgattctgtacttcacaaatttcatcagctgggatgataacctgtccaccgccatctaccatacgtttgtggctctgtgctacctgacgccaattctcggagctcttatcgccgactcgtggctgggaaagttcaagaccattgtgtcgctctccattgtctacacaattggacaagcagtcacctcagtaagctccattaatgacctcacagaccacaaccatgatggcacccccgacagccttcctgtgcacgtggtgctgtccttgatcggcctggccctgatagctctcgggactggaggaatcaaaccctgtgtgtctgcgtttggtggagatcagtttgaagagggccaggagaaacaaagaaacagatttttttccatcttttacttggctattaatgctggaagtttgctttccacaatcatcacacccatgctcagagttcaacaatgtggaattcacagtaaacaagcttgttacccactggcctttggggttcctgctgctctcatggctgtagccctgattgtgtttgtccttggcagtgggatgtacaagaagttcaagccacagggcaacatcatgggtaaagtggccaagtgcatcggttttgccatcaaaaatagatttaggcatcggagtaaggcatttcccaagagggagcactggctggactgggctaaagagaaatacgatgagcggctcatctcccaaattaagatggttacgagggtgatgttcctgtatattccactcccaatgttctgggccttgtttgaccagcagggctccaggtggacactgcaggcaacaactatgtccgggaaaatcggagctcttgaaattcagcccgatcagatgcagaccgtgaacgccatcctgatcgtgatcatggtcccgatcttcgatgctgtgctgtaccctctcattgcaaaatgtggcttcaatttcacctccttgaagaagatggcagttggcatggtcctggcctccatggcctttgtggtggctgccatcgtgcaggtggaaatcgataaaactcttccagtcttccccaaaggaaacgaagtccaaattaaagttttgaatataggaaacaataccatgaatatatctcttcctggagagatggtgacacttggcccaatgtctcaaacaaatgcatttatgacttttgatgtaaacaaactgacaaggataaacatttcttctcctggatcaccagtcactgctgtaactgacgacttcaagcagggccaacgccacacgcttctagtgtgggcccccaatcactaccaggtggtaaaggatggtcttaaccagaagccagaaaaaggggaaaatggaatcagatttgtaaatacttttaacgagctcatcaccatcacaatgagtgggaaagtttatgcaaacatcagcagctacaatgccagcacataccagttttttccttctggcataaaaggcttcacaataagctcaacagagattccgccacaatgtcaacctaatttcaatactttctaccttgaatttggtagtgcttatacctatatagtccaaaggaagaatgacagctgccctgaagtgaaggtgtttgaagatatttcagccaacacagttaacatggctctgcaaatcccgcagtattttcttctcacctgtggcgaagtggtcttctctgtcacgggattggaattctcatattctcaggctccttccaacatgaagtcggtgcttcaggcaggatggctgctgaccgtggctgttggcaacatcattgtgctcatcgtggcaggggcaggccagttcagcaaacagtgggccgagtacattctatttgccgcgttgcttctggtcgtctgtgtagtttttgccatcatggctcggttctatacttacatcaacccagcggagatcgaagctcaatttgatgaggatgaaaagaaaaacagactggaaaagagtaacccatatttcatgtcaggggccaattcacagaaacagatgtgaaggtcaggaggcaagtggaggatggactgggcccgcagatgccctgacctctgcccccaggtagcaggacactccattggatggcccctgatgaggaagacttcagaattgggaactaaaccatgaatgctattttcttttttctttttcttttcttttttttttttttttttttgagacagagttttgctcttgttgtccaggctggagtgcaatggcacgatctcagctcactgcaacctccgcctcccaggttcaagtaattctcctgcctcagcctcccgagtggctgggattagcggcatgcaccaccacgcccagctatttttgtatttttagtagagatggggtttcaccatgttaaccaggatggtctcgatctcttgacctggtgatctgcccacctcggcctgccaaagtgctgggattacaggcttgagctaccgcgcccggccgtgaacgctattttctaagcagccagcagtgaatctaaaactctggaagaagtcttctgtttgaaaggcttatttaagccacacgtacacacactgtcttagagtactgtgagcccaccccacattggtcatcttccctatcacacaaatgatgttattttggactagcttaattttgaaatggtaacaaagtttcctattccatactgttcatttctaatactcttacgaaaactattctaaaggaggcaggagccaaggccaaaagtgaacgtacaggtttaaaatggctgtgataagggccagctggtattaactgataactttacctttgggtttttgttattttgtttttctagtccctacctgtgtttaaattatggataactcgaaagacaggctcaggtgaaggccgagtaatgattttttttgaagtttcaatggtgtgaaataaatttctgttctta

SEQ ID NO: 157359 - DNA, 1275 bp, Homo sapiens; identical to SEQ ID NO: 122183

SEQ ID NO: 157360 - DNA, 4437 bp, Homo sapiens
cacaaatttattttatttattttgttctttttcatatgacactgttaaaacattcctactacagcaatactgctctccaggagcttacaatctaaaacagtcaacattaattgtagacccagtaattaaggcattatatcaaatgcagactttgtatcttttttttttttttgagacggagtcttcgctcttgttgcccaagctggagtgcagtggcgcggtctcggctcactgcaacctctgcctcccgggttcaagcgattcttcctgcctcagcctcccgagtacctggtagctgggattacagtcattcgccaccatgtccggctaatttcttatatttttagtagagtgggggtttctcatatacattctagtccctaattctgactgcccattttcttaaagtaactgtaaatttaggctgagtcttaagttctaatacagatggtaattcaatttctggcatattcaaggtgctagtctctgtatatcagagttgcagcctaatgcatcagggctagttgtccaaatgcttggagatggcaggtggcaaccacagataaggcaggcctatgtcaaactcaagagtgaatgtttttgctaaagtatttatatttttaaaatgttagtagtaaaccatgttgagcaaacgaaacatatttgtgagcataagtcaacccatggacctcagggctgcaattctttcatggaaatcttctcatgtaatcttcataaaatctctgcccctcaatttgctatgagcttgttctggtccttatctttccaagaaccttagaagttggagtgacctaacaacaaatccacatgggcagaggtccagggactgagctctgaaggatcctgaaagaaaacaatgctgggagcactgctctgaggagtacaaaagtgtaaaagagaaatgaacttaatcacaaaactgaagattgcactgaagaatacttaaaagtcctttttaaaccactcaggtggagagaatgcaattatctggcaccaactatgttctaagaacataattctccccaagattttgaagaacatatttaattcgtacatctacaatgcaaattcatctttcattggcctctataatacccagctttcccaaatgctcttccacagcacaaaaagtaacatcagtttgcaaataaaaggtgcaagaaggtgtacagtacagtcgtgaaaagggcaatatatacatgcatataaaagagaattaacaaacaaaaccttgatttctagagaacatggaagttataccagacaaggagaatgtaggggaatctcatatttatagtacccttacctatacatgacaaagtttacctccataaacaaaaacattagcagatgctgctaacattctgcaagtaataaattcctacttatgcatctgtggatattacactattaaaaggcacatttatttcttgatgcatgtctttgctaatgtcctaaatttgggttccaggtgatctagaaactccagtccctcttcttcctgccgatcgctgcagcaacctactgagccggccagagaacctttgccttcatagttatacgaacaaacgtagtcttcacaatgtttatgctcctcatcttgtccacacaaatacaccttcttttactgtttaatttttaatcagagtgtgtcctctaatggattcttcgccaagccgaggttgggtgaaactctgccagtccgtgtacgcatatctgccagtatctccctgccccactcccttgacggactccaaggtctgatgtccacctcctttgttggaatccaaagtgtagcctcctttgaccatctcaaaactttgctgtgttttgattccctggccaccaacagtaccaacagacatgcttgtgtcacaaatgttggatgtctgcatggggagtctaatatttgcttccgttacttcttctccaggtccttcagtatttgatacaattaaattttgctgggctatgtcttctggaaaacatttcttgactgttctcttagcagtgacacagaaacatgtaaacagaatacataataacaatacagaacccaacaccatagcaagaatagcccatcttccaagtattacatttggtctaacgtctcttgtacttttatccttcattctacactcagatggagttgaacagtcacatactctcactgttaacatatgtgttgcaactaaaccatgcctgtcttttatttgaataggcacagaataatagttataatcaagattttgccgttgacgaagaatggcagttttaccatccttttcttctatgttccagtttttactggcagaattatccagaaagaattgaaaaggtggtccattttcaggtccatctggatctacaggtttcagaacagcaaaatcctcattattctgacaaatggtcacttctttgtcaatttgaggtgcgtgatcgttgtaatcatccaaatgaactactaatgttccagtgcaagatcggccaactgcatccactgcaacaactgaaatattgtattggttgttttttacaaatttggattctctatctagtacttttagagttctcaagtcgccagtgtgttgattaatttcaaaccagttatcttcatcccctaacttctgataccttaagccttcaccactggatatttccgggtccagtgctttgtatccaaggagttcttggccagctgggaagccatcttgactctgaataactttcactggagggtggcattcagggccctcatcactgtctataattttaacggtgacagttgtagtgcacattgtaggagtttgtgagctcgctgctttagagaattgtgcctcgttaatgacaccaacttgcaaaataacttggcgattgacttcatagttcaatggcttgacaacacacagcactccttcatttgtatttggatctgtgctaattatgaagtttccattttcatttccttgtaagattttgtatacagcctttgagtgaggagtgtttggcaaatcctgatcctgtaccttcattcgcaaaatctccacgtcaattctgttttcttctacttctgtaacataagaagtttctgtgaaagatggtggattgtcattttcatcctcaagtgaaatagtaattgttcctgtattaaataaaccgaaaggctgaccacccatgtctcgcacttccattattaactggtaagtatcacatttttctctatccagaaaaggtgtagttgtggtgatgacaccggtatctgggtgtatggagaaatgctttggatgatctgggatttgttgtaagattttatatttcagacgagtatggagagtgtcaggttcgtcaaggtctgtggcggtcacttttcccactgaagttccggatcggcaattttcaggcacagtaaagatagtcactctgtgttcaaaatatggggcgttatcattatcatcttcaattttgatgatcaaagggagtggatattctggtgcatagccatctgcagttgttgcatagccatataacgcaaactgttcgtatttctcacggtcaatgctccttgtacaaaagatatccccagtgtctttctctatgtaaaacaaattgaagggttctttgtccacgcctggcccacttatggaataaaagatggtgtaattctgtgcagcatcagattggatctgctgaacgtgttgtggaaatggacccaacgagttctccatcaatgaagctggaataggagcccatcgtctcttgctgcgcttgagggctgtgtctttggtatgtctcttcttaggagacttgttttctcttgctgacagtacaacttttatctcttgttgttcccgtctctgaccatctgaaaggaaaatggaaaaacttttcctttcagaagacaaaatgaggtcatgtgttgtgtaaattgagccatcttctagaattctgaaggcagggtcactggaccggattaggctggccgacttgagacactcctccagattcactttgcctacaagtgtttcagcctgaagatgagaaggaactcgaagataaactttctgacaagcatcgcaaagtaatgttaaaaccaggagagagaaaaggagctgcttacagaagatgctccctggggcagcagaggccagagccatcagaagcagtcccaatggccagggacggtggccagataacagggcagcctgggatgcacagagcggctaagaagacgctggcacttgcacagggtattctgctgccaccttgatgcagctgagcttggtttggaagacagtccggaggcaagtgataaacagtaggaggagcaacgggagaatttctttccccctattccctggccagtctccttccttccagttcaattacgtctaaatgcaaagaggctttcctacaagt

SEQ ID NO: 157361 - DNA, 428 bp, Homo sapiens
tcacatataagatccttgactttattgtaaattccattaggcatagaagaggaaccccaaggtttccaggacatactgaggtcacatctatgacccttgactttattggggctggttaaagaatttacagtaacctgcatcaacttagccaggggatcaatactaaatttagctccttcaaagcacctgaaactatgtgctacataaatttcagcttcccacctggaagggaaggagtgaaattagtgaacaggcagtttcagcaaaagaaaaaacataaaaatcgaatagctggctctggtgaaatgagcaaggactttagagtcaaactggcctggatttgaatcctgatcctcattagcttgagctgtatgatctggacaaatgacagtaacttgttctaacctggatttcttatcttgaagaag

SEQ ID NO: 157362 - DNA, 408 bp, Homo sapiens
  misc_feature (1)...(408): n = a,t,c or g
ngttccttcccaaaatccccaaggaggcaattttcccctccccaaggtgtttaaaggagggccaggcccaggagtttatgtggtctcccttaacgaaagaaattttcagttgcccaacccctcaaacttgcggggcctttaagggtactttaaaacgggcccccccnnnnnnnnnnnnnnnnncggtaaagataggatnnnnnnnnnnnnnnnnnnnnnnnnnnnnnnnnnnnnnnnnnnnggtttcccctcggcctctaagtgccagggtgttagccccatgcctgggctgtgatttttttgtttcttttaatcgaactactgtgtggaagtaaaacatgaaagttgagtaattttctccagcccgtagtttgcttgctaacaagtaatggattaattagctttacg

SEQ ID NO: 157363 - DNA, 1502 bp, Homo sapiens
gggttcaggtggttctcctgcctcggcctcccgagttgctgggactacaggcatgcgccaccacacccagctaatttttgtatttttagtgacagggtttcaccatgttggccaggctggtctcaaactcctgacctggagtgagccactatatccggcctttataaacttttttgattcttgtcataacacttagcctaaaatgcaaatgtacagctgtagaaaaatactttatttctttatatccttattctagaagctttttttctattaatttttgtttgtttgttttgttttactatttacttctaaaacttttttgttaaaaaccatggcacaaacacacacattatgctaggcatacaaaaggtcaggatcatcagtctcactgtcttccacccccacttctcatcccaccattgtatctgctgtctgtggctgaccaaaacatcatcatgtagcacatgactagtgtggcaagtgctctgttagatgtaaggccatgatgctaaagcatcacaagagggcatctaacccagattggggatgtcatggaaggccgacatcctgagttgaatcctgcaaatgtaaaaaccaataggcaaagaagaggaacaaaaaggattccaggacaaactgaggtcacatctatgatccttgactttattgtgtctgtttaaagtatctacagtaacctgtatcaacttagtcagtgtattaatactaaatttagctccttcaaagcagttggaactatgtgctacataaatttcagcttcacacaaggaagggaaggagtgaaattagtgaacaggcagttacagcaaaagaaaaaacataaaaattgaatagctggctctggtgaaatgagcaaggactttagagtcaaactggcctggatttgaatcctgatcctcattgcttgtagctgtatgatctggacaaatgacagtaactgtttctaaccttgattttctcatctgtaagatgccaattgtaactcctaaggatactgaggatttttttaaaatgcgtgtacagttcctgaccagtggtttgtgcctaataacttattacaaattattacccagtaaaaaccttgagacaagagtgaaaacgtaaagctaattaatccattacttgttagcaagcaaactacgtgcttgagaaaattactcaactttcatgttttacttccagacagtagtttgattaaaagaaaaaaaaaaatcacagcccaggcatgtggctcacaccctggcacttggaggccgaggtgggagcatagcttgagcctagcagtttgaaactagcctgggcaacatagatcctatctctacaaaaaaaaaaaaaaaaaaaaaaaaaaaaattggcccggtgtggtggtgcatgcctgtggtcccagctactcaggaggctgaggcgagaggatcgcttgagccagggaggctgaggctgctgtgagccatgatcatgccactgcactccagcctggacaacag

SEQ ID NO: 157364 - DNA, 2873 bp, Homo sapiens
atggctctaaaaggacaagaagattatatttatcttttcaaggattcaacacatccagtggattttctggatgcattcagaacattttacttggatggattatttactgatattactcttcagtgtccttcaggcataattttccattgtcaccgagccgttttagctgcttgcagcaattattttaaggcaatgttcacagctgacatgaaagaaaaatttaaaaataaaataaaactctctggcatccaccatgatattctggaaggccttgtaaattatgcatacacttcccaaattgaaataactaaaagaaatgttcaaagcctgcttgaggcagcggatctgctacagttcctttcagtaaagaaggcttgtgagcggtttttggtaaggcacttggatattgataattgtattggaatgcactcctttgcagaatttcatgtgtgtccagaactagagaaggaatctcgaagaattctatgttcaaagtttaaggaagtgtggcaacaagaagaatttctggaaatcagccttgaaaagtttctctttatcttgtccagaaagaatctcagtgtttggaaagaagaagctatcatagagccagttattaagtggactgctcatgatgtagaaaatcgaattgaatgcctctataatctactgagctatatcaacattgatatagatccagtgtacttaaaaacagccttaggccttcaaagaagctgcctgctcaccgaaaataagatccgctccctaatatacaatgccttgaatcccatgcataaagagatttcccagaggtccacagccacaatgtatataattggaggctattactggcatcctttatcagaggttcacatatgggatcctttgacaaatgtttggattcagggagcagaaataccagattataccagggagagctatggtgttacatgtttaggacccaacatttatgtaactgggggctacaggacggataacatagaagctcttgacacagtgtggatctataacagtgaaagtgatgaatggacagaaggtttgccaatgctcaatgccaggtattaccactgtgcagtcaccttgggtggctgtgtctatgctttaggtggttacagaaaaggggctccagcagaagaggctgagttctatgatcctttaaaagagaaatggattcctattgcaaacatgattaaaggtgtgggaaatgctactgcctgtgtcttacatgatgttatctacgtcattggtggccactgtggctacagaggaagctgcacctatgacaaagttcagagctacaattccgatatcaacgaatggagcctcatcacctccagtccacatccagaatatggattgtgctcagttccgtttgaaaataagctctatctagtcggcggacaaactacaatcacagaatgctatgaccctgaacaaaatgaatggagagagatagctcccatgatggaaaggaggatggagtgcggtgccgtcatcatgaatggatgtatttatgtcactggaggatactcctactcaaagggaacgtatcttcagagcattgagaaatatgatccagatcttaataagtgggaaatagtgggtaatcttcccagtgccatgcggtctcatgggtgtgtttgtgtgtataatgtctaattgaatctgcagaaatgaccaagcaatcacttttttggagtatagttttataaaaaaagaatgcagggtttgaagttccttacctgataattgtgtctggcacatgataggggatcagtaaattgtaattcctaaccctactgtactcccaaacatggtgattcatggtcaagaaaaatcttatatatatatgtatacacgcgtgtgtatgtgttcatatatatgtatacatatatgtgtatatatacgcatgtatgtatgcatatatgtgtatatatacgcatgtatgtatacatatgtgtatatatacgtatgtgtgtatgcatatatgtgtatatatatacgtatgtatgtatacatatatgtgtatatatatgcgtatgtatgtatacatatatgtgtatatatgcgtatgtatgtatacatatatgtgtatatatacgtatgtgtgtatacatatgtgtgtatatatacgtgtgtatgtatacatatatgtgtatgtatacgtgtgtatgtatacatatatgtgtatatatgcgtgtgtatgtatacatatatgtgtatatatacgtgtgtatgtatacatatatgtgtatatatacgtgtgtatatatatacacatatatacgtatatatgtatatatatatacacagttgaatcagtgggattaaaacctaataatctctggttttcaaaggtaatatggaatatttgacacttggtaaaaggtgaactacctttgtagtgaatcttttcctcttggtagcatcaacactgggggtaaaatcacacccattctggggaatgaaatgtttctcaagagcctataatatagtagatagtgcatattaagatgtctggctgggcatggtggctcatgcctgtaatcccagcactttgggaggctgaggcgggtggatcacctgagagcccaagcttcctctgtgcccaacagccactttctagaaaccggcaacctctgtccccgtcatcgtctgtgtttgttcctccgcaaagcccgagcttcctctgtgcccagccacctacacagaacatcatgctggtcagccacattggtggtatcatgctgctcgagtctggtgagctggaagtagcaaatatctcagagaggagagatcaacccacactaactcaggacctcgcgaccttgttgaaatgtccagggatccagtga

SEQ ID NO: 157365 - DNA, 1040 bp, Homo sapiens
tacatccttctggtcttcctcaccttgtggctgctcatcgagatgatatattgctacagaaaggtctcaaaagccgaagaggcagcccaagaaaacgcgtctgactaccttgccatcccatctgagaacaaggagaactctgcggtaccagtggaggaatagaacaggagcagtgtgacatgaggtggcctgaacacctgagggactggacatcccatgttcagcaatgtcaatggcatcaggagggcgccccaagggccccatcgcttcccttcatgcatccattgttctgttcattcattcatccatacatccacctgcctctgagctttcacctctgactccctaactccatcagacctctacgcaccataagactctgccagaactgagaagccaacatttctacatagactcaacctcaccctctcctagttttccaacaagacactccaaagccaactggatttctcccctgtgctccaaatgactttgtacaagtgctggagttagcacctccctctgcccttaactggctggaactggttcattctccattactgcaagagaatggaagtcttaatagaaggaagcacgagtgattagttcgggttataagcaaagtgtgacatgaactaggattccctgaagccagttctgtcagggtcatggcccactttgctacagcatcagagcgaagcacgcctgtctaggttctccagtgacagaaagatcctgaagcatggactaacatgctctctggagcttagtactccagagctagatcctgatgggtctctaaggttccctccaagaagacaaggacaggagacttgggaaggaccaatggtaatttaagtggctcttaaaaagtcatgcaacatgtttctggacacgttcctgatcctattgcgataatgtatgtgtgccctccctgtgggcacaccacctgggcattaggactgaaatttctgagttcttcctctcacaatttctgtgcaccagtattattcctcattttacatacaggaggcaactaa

SEQ ID NO: 157366 - DNA, 994 bp, Homo sapiens
  misc_feature (1)...(994): n = a,t,c or g
attggctggaccgacccaggccgagcggacttcaagaagatgtgcacaaggagcccataacgtctaaagaggaaaagcaagaaggccaccaagcagagcctacaagatagcttcctcttggacctcaaatcccctccttctttccctgtcgagatctctgacaggttgcccgctgcctcctgggaggggcaggagtcctgctggaacaagcagacttccaagagcgaagggactcagcctgagggaacatatggagagcaacttgttcctgagctgtgcaaccaatcagagtccagtggagaagatttcttcctgaagtccaagctccaagaacaagatgtctggagaagatccacttctttctatacccacatgtgcaacccctggggtctccttgtgggggctggtgggtcccttctcatcatgtttgtgatacagtgggtgtataccctggttaacatgggtgttgctgccatcgtgtatttctacattggccgggccagcccagggcttcaccttggatcagcctccaacttcagctttttccggtggatgaggtctctcttgctcccctcctgcaggagcttgcggtcccctcaggagcagatcatcttggcgccgtccctggctaaggttgacatggagatgactcagctcacccaggagaatgcagacttcgccactcgggatcgctaccaccactcctccctcgtgaaccgggagcagctgatgcctcactactagatgcagtgctgggaccttcctcttttggagctgtcccatgtacagtggacccaagctcaggaccttcgtggagctgcttctccaacctgagaaactcaagacccatcctcccgctgtcactttggacaatggaaatctacattttcttttcccnnnnnnnnnnnnnnggaaaaaaattttccccttgccccccgggggggagccagggggcaaattttggttttatggcacctttggtttccggggtaaa

SEQ ID NO: 157367 - DNA, 601 bp, Homo sapiens
gcgtgaccaggtgggagccagggggtgccggcgggcgggaggggaagcggtcgctggagctccgccctccccggtccgttgccgcgtcctgggtcggtgggcagccccaccctcctggctacgtggctccccgcgggtcctggccggggacctgcccgcggaaccgtgcgtaagaccccgattccaccgcctagatgctgggtgccggggcccccttggtttctgtcacagacaggttgaacacggaaaaagcagctgtatggcttgtggtagacctgagccgggcattatccagctatgactaaagccgaccgagcagtctggactagcacctcgatttccgcgttcgaatgctcctgctccctccttggggatactaggggaggatgtggagatggaagagtcctcgccaggaattgagaagtatgtttaggaaaacttgagaggcagagagagatcctgctcctccatctgcactcctgtatggagccagctgagccctcacctcttccctgttctggcctgtcaccagctgctggaatgtggaagattctgttcccttcctctagggtggatctggagaaagatttgggaatagata

SEQ ID NO: 157368 - DNA, 387 bp, Homo sapiens
aggaacacggacaatgcctggatcgagacagcgggcgggaccgttcacttgcaggaccagaatgacggggagttgaacaggctgaactctaacctgcacacctgcgaatggagggcctccatcccatggcaagggggggacaggcgcataccactctatgcgaaccacaagaccctccttcacatggcagccgctgagatcggggctaactactgactgtgccctcagggtgggcggatccattccataaacgttccccccataaaccagggcttctctctcctgagcctgggcaggactcaagctgttctctgggccctgcacatgatggggtttggtggacccaacgcccctcacggctgtccgagagttgctgcagatcatcta

SEQ ID NO: 157369 - DNA, 755 bp, Homo sapiens
agacggagttttgctcttgttgcccaggctggagcgcaatggcgcaatctcagctcaccacaacctccgcctctcgggttcgagcaattctcctgcctcagcctctcgagtagctgggattacaggcatgtgccaccacgcccggctaattttgtatttttagtagagatggggtttctctacgttgttcaggctggtaatccgcctgccttggcctcccaaagtgctgagattacaggcacgagccaccatgcctagcccaaagttctttattaaaccacaaatagcagatgattgagtgccaggccctcaagatgccatctgctccctggtaccacaactgaagaagccccaaacccagaacagactcagcttccaaggctcacaccctaaactctccactgcacaggaagtatcaaagcttattccacccccattatctacaaggtatcaagtaaaaactccttaaaatgcccttagaatttcatgaagctcaaaccctgcttttactgagatgtttccaaacctgagacagttcttaccactaattcctcctcttcctcttcctcctacaaaaggaaaacaaaattaatgtcagcagcaattttatgacatatttattcctgatcatactgatgtaattactgacgatagccactgacactattaacgatgttattttgttttctgtgttttatgatgtttttacattttcctcgtgccaagcttggcgtaagcatatcaaggtgttcaaa

SEQ ID NO: 157370 - DNA, 470 bp, Homo sapiens
ggggctctggctgggatggaagagggcaatctgggagggtggctgactccagttgagccagagtcctgtctgcactgcagtgaggtgaacaagccgcctccaggatctccgttcctgtctgagccccaagccacctcagggtcaagagcaacagggccaagaggatgaagtggtcttggtggaagggcccaccctcccagagaccccccgactcttcccactcaaaatccgttgccgggctgacctggtcagattgcccctcaggatggtgagtgcctgaggcccatgggagaaggacccaggagctgcttctggagagatggtggtgtccagcaggggtgtcctggcagaagggactgtcatccttttcccatcctgctctctagagctgcccatcattcttttcagtctgtcctgccttcacactttttgtttcctctgtctgcattttcccaacgctcccctctctt

SEQ ID NO: 157371 - DNA, 1911 bp, Homo sapiens
aaatacccccaaacctgggattacaggtgtgagccattgcgtccgactatgcttgattgtccaaggatctgatttctaggatttgtggggccagtctctctccattgcctccgtcctgctgtctcttgcttctacagggatctggacaactctcctctgtccccaccttcaccaaggaccaaaagcagaacgcatactcgggcactcaagaagttaagtgaggtgaacaagcgcctccaggatctccgttcctgtctgagccccaagccacctcagggtcaagagcaacagggccaagaagatgaagtggtcttggaggaagggcccaccctcccagagaccccccgactcttcccactcaaaatccgttgccgggctgacctggtcagattgcccctcaggatgtcggagcccctgcagagtgtggtggaccacatggccacccaccttggggtgtccccaagcaggatccttttgctttttggagagacagagctatcacctactgccactcccaggaccctaaagctcggagtggctgacatcattgactgtgtggtactaacaagttctccagaggccacagagacgtcccaacagctccagctccgggtgcagggaaaggagaaacaccagacactggaagtctcactgtctcgagattcccctctaaagaccctcatgtcccactatgaggaggccatgggactgtcgggacggaagctctccttcttctttgatgggacaaagctttcaggcagggagctgccagctgacctgggcatggaatctggggacctcattgaggtctggggctgacaccccactccctgtttgacggcccagcctggacttggggagaatgactttcccttttttgccccataagggctagcataagctgaggtagaacttatctttaagctgcagcaaaatcaaggagtgacttttgtcccctctcctgttgaccctgggttagagccgttaaccacttggtgagttatgtgggtcttgttgccctgggtggcctgtggctccgtccacaagtcatgctgagttttgcagcctctgtgacttgaggatgtcccttcacccctcccctttcaccaccatcctcttttcctcatggaaaatgtctgctttatgaaactatgcacatattgaaagtgagttgaaacaaatgagggttggggtagggagcttccaggcctggggattttacaccacgcctagcccagcagaggcccttagtcccatttgggggcttggggagtgacatttgcttgaggcttatacactggtgtggtttccctggcttgcaggaaatgaccaagctcgacacatgctggctgaagcgtaagcagacaacgtgaggtactcttttgaaggatgaaggtggtggattctcaagccctgggggtcattcctcacctgaggacccttcagagccacccttttctagtttgcatttcctggtgcacacatttaaggcataacagcacgattcatccctttggtttgggatctcaggaatacagtcccatgcaaagattctctggttttatggcttttttccctttctttacaccatcctctcccataagcacccatgtctttgaatatgaatgtatttgtaaaataccacgtttcatgtgtgaatatgtgcttttactgtacatagtgctattgtgcaataggtcttatgctgttttcactcaatgtgtgctaagatctagccccattgactcttctagaaatgcagtattgctttgacctgccatgtggcactccataatgtcaattgcagtttacacacattgcctaaagtgggggacacctgggtgcccctgaccccttggcaccggatacaggccacgataaacatcctttcgtgtgttcaaaaaaaaaaaa

SEQ ID NO: 157372 - DNA, 2038 bp, Homo sapiens
  misc_feature (1)...(2038): n = a,t,c or g
atggaaccaacccaaatgcccatcaatcaacaaatggataaagaaactatccttaagctcctgaagggcaaggtggtggtggggcacgcgctgcacaacgacttccaggcgctcaagtatgtccaccctcggagccagacccgggatacgacctatgtcccaaacttcctcagcgagcccggcctccacacccgggcccgggtctctctaaaggacctggccctgcagctgctgcacaagaagatccaggtgggccagcacgggcactcatcagtagaagatgccacgacagccatggagctctaccggctggtggaggtgcagtgggaacagcaggaggcccgcagcctctggacctgccccgaggacagagaacctgacagcagcacagacatggaacagtacatggaggaccagtactggcccgatgacctggcccacggcagcagaggaggagccagggaggcacaggacagaaggaattgagaagggggcggggctccctggctgggcttccggtgtggccggtaggaagtgggggccaggaagacagcgggcactccttcctgggcagggtggggcaggatgcagtgagccagccccaaggccaagaggaagtgggggcatctgttaccttgacaccctctgcacacagcatagccctctctctctccagggctgtgggttctttctcctgactcctgtggttttgctaatggcactttacagactccatggagatgtcaggtggaccatcttctagggcccagcaggagtagggaatgtgccaacagactgcccaggttgccgtggccttccccaccccccagatctcctgagtcatcatgctgtgctaatgaaagggatcatatcatcctctctggggatggtgggtggggatgtcaatatcctggagctcccttaccccaactcaatgacttgggggtaaagttctcttccttttgttgcctacctcttcctccactcatttgggttcagaataaacatgccctgaagttaaagaggagttaagtcctaaaggaggcatttcttccccacctccctgacctggaactctggctacagccattgtaggaactccgtgcctggcctgtcagctccctgctaggctacagtggaatagcagagcccacaggcttctcgtggggagttggctccttaacatttcttggcaacagaaagccccaggcacagctcatggaggagggaaggcaggtaagctttggatgagaactggcatatttattttgacccaaatcagggatttccccagtccacccagtaatgggctcttaagcaaaagtctgagaaacaagacagtggtttgaattctggggcctttgtgtaggattgtgcctgacctttatttatttattaacagcagggccactcgtctagggcagtggagtctgcgtgtctcctggggctggggcagggcatttggcagttatgcagtggccctgaacctggtctggtgcccccgaacctggtctgatgccccctcagctctgtgacaatcactgtggctgttgggttttctcctatttctaaaaatgttctcttctttcctaagtgacagttttgaagtattggataaccaagaagctcaggtcacacagaccttggaagccccatctttgcttgcagcttaagcttttgagatactaagcaagcgaagggacttcactcttgaggctgttttttcctcatctgtaaagtggggaaaagtggtacggcctacctcataaggggttgtaatgagcactaaatgtgaaagtgcttggcaaagtgcctgggcacatgggtgagccacagcttactgtgaagtttctgtttatcccccnnnnnnnnnnnnaagcccattgtttattctttgaaaatttgtggaaacttcttcaggataacacctgagtccacaggctgagcagctgtggcccaaacagaactgctccggttgggctgtcccaccagggggggcgctggcctcgtggagggcccccaacaagggttacggatt

SEQ ID NO: 157373 - DNA, 1761 bp, Homo sapiens
atggatttccagctgaaaaagaagcaagtgtacgttgacaaggtggagaagatgcagcaggcccttgtacagctccaggcagcatgtgaaaaacgtgagcagctagagcaccgtctccggacacgactggagagggaactggaatccctgagaatccagcagcgtcagggcaactgtcagcccaccaacgtttcagaatacaatgctgctgcactgatggagctccttcgggagaaagaggagaggattctggctctggaagctgatatgacaaagtgggagcagaaatatttggaggagaatgtgatgagacattttgctctggatgctgctgcaactgtggctgctcagaggtcaatatttgaaggccacattctctatgtgcataacctcatcgtgcgtgagcggtcacatttcatctgggacacaacagtcatcagtcactctcctaacaccagctatgacacagctctagaagctcgcatccagaaagaggaggaagaaatcttgatggccaataagcgttgccttgacatggagggcaggattaagaccctccatgcccagattattgagaaggatgccatgatcaaagtactccagcagcgttcccggaaggagccgagcaagacagagcagctgtcgtgcatgcggccagcgaagtctctgatgtccatttccaatgctggatcaggcttgctctcccactcatccaccctgactggctcccccatcatggaagaaaagcgagacgacaagagctggaaggggagcctaggcattctcctgggtggagactaccgtgctgaatatgtcccttccacaccctcgcctgtgccaccctcgactcccctgctctcggctcactccaagacaggcagccgagactgcagtacccaaactgaacgtgggacggaatcgaacaaaactgcagctgttgctcccatctctgttcctgctccagttgctgctgccgccactgctgccgccatcactgccactgctgccaccatcaccaccaccatggtagctgctgctccagttgctgttgctgctgctgctgctccagctgctgctgctgccccgtctccagccactgccgctgctactgctgctgctgtttctccagctgctgctggtcagattccagctgctgcctctgttgcctcagctgctgccgttgctccttctgctgctgctgctgctgctgttcaggttgctccagctgctccggctccagttccagctccggctctggttccggttccagctccagcagcggctcaggcttctgctcctgctcagactcaggcaccaacttcagctccggctgtggctccaactccagctccaactccaactccagctgtggctcaggctgaggttcctgcaagtccagctaccggtcctggaccacatcgtttgtctataccaagtttgacctgcaatccagacaaaacaggaaatgaaagggaatatgctgacttctacagccattttgatattgcaaatgaccttgtctatatctgctcattactgtacctccagagcccagaagagtgcctgatgcaaaccatgtttctcaggccagaaactcagatgagggatccagcgagaagccttcttttccaaactagggcacagaaactagtgacacaattaaggcaatgtgatggcaagagggcagtgattaaaaacacgcacactccagagccagaatgcctagaattgtacctgctctaccacttacaagctgtgtga

SEQ ID NO: 157374 - DNA, 5158 bp, Homo sapiens
cagctccaggcagcatgtgaaaaacgtgagcagctagagcaccgtctccggacacgactggagagggaactggaatccctgagaatccagcagcgtcagggcaactgtcagcccaccaacgtttcagaatacaatgctgctgcactgatggagctccttcgggagaaagaggagaggattctggctctggaagctgatatgacaaagtgggagcagaaatatttggaggagaatgtgatgagacattttgctctggatgctgctgcaactgtggctgctcagagggacacaacagtcatcagtcactctcctaacaccagctatgacacagctctagaagctcgcatccagaaagaggaggaagaaatcttgatggccaataagcgttgccttgacatggagggcaggattaagaccctccatgcccagattattgagaaggatgccatgatcaaagtactccagcagcgttcccggaaggagccgagcaagacagagcagctgtcgtgcatgcggccagcgaagtctctgatgtccatttccaatgctggatcaggcttgctctcccactcatccaccctgactggctcccccatcatggaagaaaagcgagacgacaagagctggaaggggagcctaggcattctcctgggtggagactaccgtgctgaatatgtcccttccacaccctcgcctgtgccaccctcgactcccctgctctcggctcactccaagacaggcagccgagactgcagtacccaaactgaacgtgggacggaatcgaacaaaactgcagctgttgctcccatctctgttcctgctccagttgctgctgccgccactgctgccgccatcactgccactgctgccaccatcaccaccaccatggtagctgctgctccagttgctgttgctgctgctgctgctccagctgctgctgctgccccgtctccagccactgccgctgctactgctgctgctgtttctccagctgctgctggtcagattccagctgctgcctctgttgcctcagctgctgccgttgctccttctgctgctgctgctgctgctgttcaggttgctccagctgctccggctccagttccagctccggctctggttccggttccagctccagcagcggctcaggcttctgctcctgctcagactcaggcaccaacttcagctccggctgtggctccaactccagctccaactccaactccagctgtggctcaggctgaggttcctgcaagtccagctaccggtcctggaccacatcgtttgtctataccaagtttgacctgcaatccagacaaaacagatgggcctgtgttccactccaatactctggaaagaaaaactcccattcagatcctgggacaagagcctgatgcagagatggtggaatatctcatctaaacggccaaatcaagagctgcagattatcagcaaaaatgcttttaatcattttcccccttttattggttcttgttttgagggtgaggacaagggttgtggggaggggatgttttttaacaggactttttattggaacaatgtactagttgagtaataccatgtgaacaccagtctattttggtatgcttagggagtacctctaaagacagattaatcagaatgtgctctaaagcttattgtttgaatttatacgaatactgggactgttaacaggtggctatacatcgacgttttcaatgtgcttaaatttgtttaaattttccatattctagatcattttttattgaagagcacagtatgtgtggaagacagtgtataacacgtagtttggaagtgggaagctagagagaattgagtgtgtgctgttttgtatagttactatcctgtgcagcagctggagaaagcactcacctcaggcttacaaaagggaatagtttcaggagctatgtaagctggaaaaaaggtagggagttttggggtgcagaagggtactggagctaattttttcttccagtttcccagctaccctgccccagggaattgtgtttgtcttcatttcagtggtgctttggaaatggattcttttggttccctcctggaggttcatacattcatatatatgctctggagtaatttatgcatttggataattaatatattgctttcagatgctgggagagtacattaactgagtgatgcgcaacttcctctctcttagggaattagaccatcagaggccttgatggagagttgcatggggtgctatatgcagacttccatggtttgtgtgtagccatgaacacagcttgcttgcatttagtaagaccaatcagcttagtgtttatttcttctacagcacagattcactggctgggtctccagtctcaaattgccaatcatttgcaaagtgaggaaggatctttgttgacaggttgaatgctttgaatttctggtgactactttgaaataacttgttttgtttgtcaaattctaagcatatgtcttaaaaggcatttttgactatcacctccaagggaatagcttgagaaacccaaagtactatgctgcagtcgggggagaggtggattgcagcagtatcctcaactacctcttctcactgtcagtgacaccatcttggaatacctttgggaagcagcaggaaatgtgcatgtgggtagagatcaaaggaggcaatggctccaagccttgccatagggctgcctccaaggacacagaaggatgccagttgccacaggtccctgccctgtgtcacctgtctgcccttcattaaggtgagaaatctgcagatagcatcattaagatcagttttaaggggtatagggagggtgagggaagtggggggtgttaggtaagggttgggggtagaggttttgggatgtcttagttagaaaccagattaatagaagagtaggcctgatatattacatcatgagccatagtggtgggaaagaactttagcaatatagccctacctcctcattttagtgatgaggaatctgagaactggagaggttcagtgactttttgaaagtcatacaacacagctaaccattatgccaatcaccatgcttattttgggaaactctttatcttttttaaattccattttatgaaaaggcatcttcatggtccagggaatatgtatcttgtaaaatgtacctgggttggagtagcttgtccagtcttgacaaactactgaatttctgtcttgcctctccttcagtgccttttaaaaggttttcccttttctggatctgcatttcaacataggagtcacataaatggtccccctgagaaaccaatcccacttctttctaggagattgggtatcttagataatcttttggggttcctctgtgagtataggaatggtatccttcctaattatcttccaaaggaattattttgtgtgtgtgcctgtgtgtgtgtagagacataaaggagggtgatgtgattttcagctagtcctttcacattttcaataatgaggtaatcatgttacatacacattagtcctcagttataaagtgaatctcagatagaaattaaaagtgcagttgtgttaagactctttcatactaccctttagtcataaggagaaaaaaacactcaaatagtagaagcagcaagtagcaaacttcaggagagctactttctatccaaataatttaaaaaacacttttcacctactcctttcatggttataacacattggcagactttttgctggctctgggagccatgattttaatcacattctgcaaggtgacaaatgtcatacattccacattgtgtggtagccatctctttagactcatgtgttttggggaaaggaagaagttcttggctgagtactattttgaactttccagaaccctctcacaccagagacagttcttctctgttcagtttccaatccccgataatttgctaaaataacattgtacatccaagagagggaagaagagtatgtcagtatattatgcagaagatagatacagccttttcagaagatctccactagtttttgttccaaaaattcaagtttatgggagaaatctcaattagccaccttttcacagttgtgtggatataacatttgggggatctttctggactcctacctatctgtgcattttaccggcacctcaggaaaggagggtgaccaggttgtcttagcttgtactgcttggtgatctctgaggaccttctaattcagttgtaccccagtgttccatgtatagaaaaacttcattagaacaaactttacttgatatgaaactcctattaacagtctttttttgaaataaaaagtagcttgagctttcttttaaaatcatgtatcttgattgttgatttaatgaaggatttccttttaatgctgcttttgagcttcaaggtaataggacagcaggaacctaaaatatctgccatcatctgccataggaaagatacccagagacccatcatgttctctttttgttgttacactgttgggtgggtataacaattggaaaatgaacaaactgatttgattggtgcaaactacctttttatggacaagccctaaacccctcaataatgcggcacgttaaaagtggtatacatatgcactaactttggatcaattatattcctcatatctgttagctacacagtctccctattatctcaattgcttatgtgccatatggaatatggttacttaaaaccgtgtgccattcttactgaaaatgttttccaaaggaaggtatcagctggtggggctaattgcccaccaaatttcagcctgccacgattccttgggaatatgtcttccaacgtgccatccatcatcagtaggacaagtgtcgggagtttgtttaatttttttccccagtagcaacgatgggttaccatggagccatgaaacctccttctggcctcccttgtgattaatggcgatgtgtttgtaaaatggatagctggggttggcagatggctagagaagaatcgcctttggtttaaaatgtatgtggtcccctaatgattgtgaccccattctgtaatcaaatgagctagttccaataaagaataagcaggtttaaatccactttgtgcctatcttttcactgacaataaagttagctattttaaaatgcaaaaaaaaaaaaaa

SEQ ID NO: 157375 - DNA, 500 bp, Homo sapiens; identical to SEQ ID NO: 125664

SEQ ID NO: 157376 - DNA, 3646 bp, Homo sapiens; identical to SEQ ID NO: 125665

SEQ ID NO: 157377 - DNA, 1108 bp, Homo sapiens; identical to SEQ ID NO: 125666

SEQ ID NO: 157378 - DNA, 4211 bp, Homo sapiens
gagccatccatcggggagtttaatgagcaggttctgcgactgatgcacagccttggaatagatcagcagaaaaccattgagtctttgcagaacaagagctataaccactttgctgccatttatttcttgttggtggagcgcctgaaatcacatcggagcagtttcccagtggagcagagacttgatggccgccagcgtcggcctagcaccattgctgagcaaacagttgccaaggcacagactgtggggctcccagtgaccatgcattcaccgaacatgaggctgctgcgatctgccctcctcccccaggcatccaacgtggaggccttttcatttccagcatctggctgtcaggcggaagctgcattcatggaagaagagtgtgtggacactccaaaggtcaatggctgtctgcttgaccctgtgcctcctgtcctggtgcggaagggatgccagtcactgcccagcaacatgatggagacctccattgacgaagggctggagacagaaggagaggccgaggaagaccccgctcatgcctttgaggcatttcagtccacacgcagcgggcagagacggcacactctgtcagaagtgaccaatcaactggtcgtgatgcctggggcagggaaaattttctccatgaatgacagcccctcccttgacagtgtggactctgagtatgatatggggtctgttcagagggacctgaactttctggaagacaacccttcccttaaggacatcatgttagccaatcagccttcaccccgcatgacatctcccttcataagcctgagacctaccaacccagccatgcaggctctgagctcccagaaacgagaggtccacaacaggtctccagtgagcttcagagagggccgcagagcatcagatacctccctcacccagggaattgtagcatttagacaacatcttcagaatctggctagaaccaaaggaattctagagttgaacaaagtgcagttgttgtatgaacaaataggaccggaggcagaccctaacctggcgccggcggctcctcagctccaggaccttgctagcagctgccctcaggaagaagtttctcagcagcaggaaagcgtctccactctccctgccagcgtgcatccccagctgtccccacggcagagcctggagacccagtacctgcagcacagactccagaagcccagccttctgtcaaaggcccagaacacctgtcagctttattgcaaagaaccaccgcggagccttgagcagcagctgcaggaacataggctccagcagaagcgactctttcttcagaagcagtctcaactgcaggcctattttaatcagatgcagatagcagagagctcctacccacagccaagtcagcagctgccccttccccgccaggagactccaccgccttctcagcaggccccaccgttcagcctgacccagcccctgagccccgtcctggagccttcctccgagcagatgcaatacagccctttcctcagccagtaccaagagatgcagcttcagcccctgccctccacttccggtccccgggctgctcctcctctgcccacgcagctacagcagcagcagccgccaccgccaccaccccctccaccaccacgacagccaggagctgccccagcccccttacagttctcctatcagacttgtgagctgccaagcgctgcttcccctgcgccagactatcccactccctgtcagtatcctgtggatggagcccagcagagcgacctaacggggccagactgtcccagaagcccaggactgcaagaggccccctccagctacgacccactagccctctctgagctacctggactctttgattgtgaaatgctagacgctgtggatccacaacacaacgggtatgtcctggtgaattagtctcagcacaggaattgaggtgggtcaggtgaaggaagagtgtatgttcctatttttattccagccttttaaatttaaagcttattttcttgccctctccctaacggggagaaatcgagccacccaactggaatcagagggtctggctggggtggatgttgcttcctcctggttctgccccaccacaaagttttctgtggcaagtgctggaacatagttgtaggctgaggcaggagaatggcgtgaacccgggaggcggagcttgcagtgagccaagatcgtgccactgcactccagcctgggcgactgagcaagactccacctcaaaaaaaaaaaaaaaggacaagagcagtatcatctgcctctgtttctaaactggacaaagagattttcttaaagtttctatcatctcccttctgacaggttctacagtgtggtctgaagcacctgtaatgtcagagcccttgtctggcccttggtggcaggtgaacgaaagcagtggagcctctcaccttccagtagcctctcacattcttattttaccatttttgtcctaattaaggtagcctagctgattctagaagacagccatcctacgtgcacccccacctttgtgtccacatcttctccaggcaggtttcaacctatcagcagactcaggcacacactggggcacagatagagaaccagggcggcacgagtgcttcgcagacccacccagggagagctgtgatgggttctgcccagatactctgctcgcccacccacaagggagcaatagcttatatttgttacattagttttaaccaaggcactttctcttctaaccctcacatcaaatctatgaaattagctggggagatactgtccttatttttcacagctgaagaaaccagagctttgggaagattgtgacttatctgagatcacagctggtgatagaaggagctgggacacgcgcttggggtgactggctatctggttttggttctctggcttctagtgctggaagaagccctctctttcccttctctttcctcagtagcatctgactcttttcataagcaaacagctgtataaacaaagcccccattttggtcaagcacagggtgaatgtgatatttgttcccacaaccttattctccactcaacagccggctggctttggggaagaggccgccttcaggtgacagtgcagctgtccaggtggccgtgcactgaaccaggctgagggagacaaaaaccccgcagacccgcctgcctttcagcgtccagttaactgcagaagtttaggctcacctcaaagatgtctagtttttccaagttacaatacagcagtttcctacagaacacccccttcctcaattgccaaggggccgcatcgcacggcatcaggccaccactgcaggccagcagattccaccccaggaacggtcatgaactcagcctttgtctcaacgaggggcgtaacatttccttacagtcaagccccatcaacttagaagttgcttattacttttaggattaaaaaagtaataacagactttgacttaatactctgtcttttcagaggcaaagtgggtgggtagaggggagctttaaaaatagaagtacaaaacaacatcctggaaacatatgaccccagatggaataatgtcacattccccagtgcagataatgggctgctgctggctctgtggtgtctgtctgcagaagatttgctcagtccaagggaaattccaagtgggtgagacctttcccaccatgggtgggttaaaggaggaaacctgccttcacccaaaatctctgaaggggaaagaagtggagagaaagggtttgcttccacttcggggacctgccagtttgagaaataaaagggataccagagatatctgccactttgtagaaagggccaagattatttgcttatatctgaaagggaggtgggtggtttttgctggatgtttggtctgaaagagtttacctttggattaaagttaaccctaatggtagttatattttctgtgtgctttttttttaattacttaagaaaaaaattggtgagttcagtagctttggtattatgagtgcaaatcataatagctccaatgtgaaaaaaaaaaatcaaaagtataacttgtcacttaatgttagaaaattgcctaaaatgcagtgtaataaataatctctgtaccaaatagtaatttaaatggggtaattttctgcaaggaaaatgtactgtttttatgtttccaaccctcttgaattaaaataaaaacaacttcttttctaagaaa

SEQ ID NO: 157379 - DNA, 954 bp, Homo sapiens
gggaattcccaggagaccccagtcccgccagcagccgccgctacccaggagggctgggcgacattggccgcctcccaccagctccccctcctcgcccacagcctcttgtcactgccaagcccccgttccttttgcccaaatcacgcaggcggaagctgcagtgccagctggagggatgttcatagggcttcctgtgcccatccctgctccaaacagctggacagcttcccctctacccccaccctggtgagcccctgggggccagagaaagatggggttcctgcaccttcccagctccacctctgaacttgagttagcgttagctaagcatacaatcagtgtcgaacgtctctcttccttaagcttgtagatacgactgcctataatcaggggactcccactggaggccgggaggccaatgctggccaggtgcgagggcatggtttggttcctttagggaatttttgttttgcaaacaggagaaacctgtgctgcaggttggagtggcaggaacgactggccttggtcagcaggcagcccccagcctagggccacagtcctcttcagggcctgggcagccccaatttctggcccagcaggtttctctttgtagtgtctttcagcacatccaaaatgctaggcctcctgccaccaacgtgtcagagcaatgtccaactgtcaggctctcagagatgcctcagtttccctagcatgagcaccagccgacacacacagtccactgagatgataattctgttctcttcaaagcaaaaagctgggcgagggggagtcttaattttttgcagtgctcaaaggaataacaccaaaagaatcaacacagaatctcccagacacacgtgacccagctcgtggcgccgtgggtccgtaggagggacagtacctcacaacaggcccagcgggggaccacctctctgtacaattggaacgcgtttt

SEQ ID NO: 157380 - DNA, 965 bp, Homo sapiens
tttttttttttttttttaaagagttggagtagggaaggtttaatagtaaaataaacgtggctatattttaacataagatgtaaaatgtgtataggtgttttaagattttaaaaagttaccttaggttctactgcctgtggtagatggaattctaagatggcgccccaaggtctcccactaccacctgccgtgaacatgccttgcattaatataatttctggaactgggactcagagggattttatttatttattttatttttatttcttgagatggagtttcactcttgttgcccaggctggagtgcaatggcgtgatctcgcctcactgcaacctccgcctcccgggttcaagcaattctcctgtctcagcctctcaaattgttgggattacaggaatgcaccaccacgcccagctaattttgtagagatggggtttctccatgttggtcaggctggtctcaaactcctgacctcaggtgatccgcccacctcggccttgcaaaatgctgggattacaggcatgagccaccatgcccagccatgtttggggctttattttataagttagaactttgaagaggaaatggtgctatatgtttattgttattactttgtgtaactttgatgtaatgtttataagctatgagaatcagttataaaagtattaggccctttggttggtaaatggcccaataaaatattccccccaggggcaagaatgtacattttcctttttagaaaacccaaatgtactttagacatgaatgcaactatttaaagaatagcttcatttatgttattccttacatgtcataagattcttacttaaacttggtcttctttcaagttgtttgtatgaagatgctgtacccacttgaacagtcctcaggtgtttacataaatactatgttttacagttttcatattttaaaatattaataaagttaatcgcaacgattcaaa

SEQ ID NO: 157381 - DNA, 2182 bp, Homo sapiens
aaccacatcacaaagggcacctcccatggctgggatgaagacacctccccgtgcaaggtgtaccacgctggaagcaccacttcccctccctccaccgcctgcaaccggttggcgggcaagtgcagttgcagctgggcccgcgaggggggcgctggagacaagagcgaggctcagagtggacaaacctctgtgggaggctctactgcactgagatgcagctcttccgagggggctcctaagccagtgtacaactgggtgcgtcttggaacttttcctacaccttctcctggcagcatggttcaagatgaggtgtctggccagctcattctcaccaacctctccctgacctcctcgggcacctaccgctgtgtggccaccaaccagatgggcagtgcatcctgtgagctgaccctctctgtgaccgaaccctcccaaggccgagtggccggagctctgattggggtgctcctgggcgtgctgttgctgtcagttgctgcgttctgcctggtcaggttccagaaagagagggggaagaagcccaaggagacatatgggggtagtgaccttcgctgcgaggccaaggaggaaaggaagagagacatcatgcagaatattgtacagattttggaatcggtacagttgaaatgggaactttttcagagctggacagacttttcaaggctccatctttctaataaactggccatttttggaattggttataacacccgttggaaagaggatatccgttaccattatgctgagatcagctcccaggtgccccttggcaagcgacttcgggagtacttcaactctgagaagcctgaaggacggatcattatgacccgagtgcagaaaatgaactggaaaaatgtttactacaaatttttagagatcactattagcgaagctaggtgcttggagctgcacatggaaattgactggatacccattgcccactccaaaccaactggtgggaatgttgttcaatatttattgcctgggggtattcctaaaagcccaggcctttatgccattggctatgaagaatgtattgagaggcccctctcaccacacatggattcaaagttccctgggacccagggaaaagagggccgggttgacctgggaaaccctttcagcacaagcctcatttacaggtgggaaataggaacccacccgaattatctattgctacctcgggattgctgaggtcaggactctacagcagtgcttatttttacatttccaagcgaataccaaaaccttcagcaaagattgggttggtattaacgggttttttgtctcagaactgtattgtggatcccggagttttcccccaaattccatctacatcaaatttgtagaagtagagagggattttctttccgcaggctctttagttgagtgcctggaaaaagccattggataccccttaaaatttaacaactgaatgtcatccttcataaggatttgggcttctaagctccttcttctctactcactttcccattaccccggaccacccctcatccagatgccgcccgtcagactctttcatgggaaaccctttcttcaattggggccagtacgacttcttaagggaattcattagttaggacttgggggccagaaaaaacatgacctcacctggaaaatggttcatttttgagcaaggcaagatatataggcgaacttgcatggtgggtcagctatttccttttttaaaaacagaaaaccaatttttaaatgggattttaagagccctaatataaacaaatgtaggtaccattccataattggaccaaaacttatacctttgaggtttcatatgaaattgaaaaattgtatttttttccacaatgtttcatttttacacatctctatgtctctatataagtaatatttacaaccctgaataaataagcaatagataatggcaagttaaatcttgattcacagttaaaaagactttttcaatatcacccttagctactattgtatataatttagattttcatttttttcaccagccaagtgttttgctatttccaatcagtattgcttgcaaagacctttgtttctgtgatgtaaccaactttacagttgtgttgccatttaaacctttttttaaaaaaaaaaaaaaattaaagtaattcctggccaaaaaaaaaaaaaaaaa

SEQ ID NO: 157382 - DNA, 490 bp, Homo sapiens
ctccacaccgcccccacttccaaaagcaaacctgggcctcccctcaaagctcgtacttagtacattcaccatgacactgtgcacctgtgagctctctcccgctctcactctcttgcgtgcacacacgcacacgcacacacacgcacaggtatgcacacatatatatgcaggtgcgcgcacacacacacatctggtttccttgcagtctgctcaggcagcagaagggtgtcccatcctcaccgtcatcttttacttcccagggtgcccttggcccacaggtccccaagacccagccccaggcttggcacgcgctggcattcccaggcttttgagaagagggtgatagagcagggagctcctcacagacaggttatacagagtgtagaatatgttcatataaggctttggtacagcaccgatttcatgttcttatagtttcggacgcgtggggcgacccggagagtcgtcaaggtctgcagggtatcagccc

SEQ ID NO: 157383 - DNA, 512 bp, Homo sapiens
tttcgtcgcagtccgcaggatgactcagggcagccctgaccacagttccgctgccatcggccctagcctgcggaattgggctcgccccgggacgataacagagctctgccgggggctggaggcactgaccgggtgaccagagacccagagaccagaccccctccacggcgcccgggatttcggggacggcttctcccatcgcaagtagggcttggacgggaggcgacaaaagagaacttggtccgcacacagccaccgaaattggaatgaggagctgtaggaaggccccgtagccagcagaaaagcattggggtccctggctgggttagcccaggtttctaggagtgtggtaagcgtcgaatgacttttgtccttttaaagcacattatgttactttttcccgcgaggtttcaacagataatgagaaatatcccccgacgattggctgaacacatgcaacaaccactattttcttcctgcccctcgttgatgagagcattcgaagtgacctc

SEQ ID NO: 157384 - DNA, 1287 bp, Homo sapiens
gttctgcagtgagccaagatcatgccactgcactccagcctgggccacaagagcgaaactctgtctcaaaaacaaaaacaaacaaacaaaaaatgctttgaaagaggagaaaggtgacaacaacatagctaccacgtctaaagtgctcccaggccccagcccaaaccccacagccctctcctgagtgctttataggatttgctcatttaaccctcaaatgtaccaatctgggccagtgcagtggctcatgcctgtcaccccagcatatttgaaggctgaggcaggaaaactgaggccaagagcttgagaccagcctataggcaacatagtgagactctgtcccttattaaaacaaaaaaagcaccaatctggtgggaggcatggtcatcttcagtgtccccatcttactgaagaagtaatggaggtacaaacagggagggacctgcccgaggtccagcaggctggtggggagctgggatcagaaaccccacgtggacaacgtggtggcctccgcctctaagtgctaaggaggcacttgctgggtcgtttgaacccacctgctgctgcgctcccaaaacttcccatgggaccaggcctcccctctgcagccaaagttcctttagatgatgagaggctacacactcagacacatggccggcgggcacaggaaccacagagtatgtggtcaccttggcgtgtatctatttatagccatacacaacagggtcttaagcagtcaccattcaaaaaatatgtggtcaagaactaaaccaaacaaacctggatgatcctaggccaaaacaattcctttccaggcacacaggcccagcagagacaaaaccagatattcattcatcacacacacaagtcttccagaaactgacctggatgccctgctgaggtcacttcgaatgctctcatcaacgaggggcaggaagaaaatagtggttgctgcatgttttcagccaatcgtcgggcgatatttctcattttctgttgaaacttgcgatgggagaagccgtccccgaaatcccgggcgccgtggagggggtctggtctctgggtctctggtcacccggtcagtgcctccagcccccggcagagctttgttatcgtcccggggcgagcccaattccgcaggctagggccgatggcggcggaactgtggtcaggcctgccttgagtcatcctgcggactgcgagtcggcgaccaccaggaggcgagagcgggtttcccctccaacaggccaaagcacgtgtctccacttacttcccactcccacgaaa

SEQ ID NO: 157385 - DNA, 517 bp, Homo sapiens
  misc_feature (1)...(517): n = a,t,c or g
cattgaaaccgnttgcaggtttcgagcacgtattcccgggccgacccacgcgtccgccaggtggcccttggagacccacttcttcctggagcgtccctgcctatagctcagcccacaggactgcttcaggccgtggccacaggtagcagccgcaaggggaaatgaagaaaactgagccctcgtggccacctgtgtcacccttgtgccttagcctcatgggctgcctaggagctgcctgcacggcacagctcgctttcacagtcagaagagggtctgtgggatctgtggtccctgtcctccctgctgtcccttctggggaggctttggtggctctgaggtggacaaaaagctctcgcaagaagaaacagcatgatgccttccacaatccaccccaaaccctggggcaacccctcttgcccttgcaactggcttggttttttggccccaggtgggttggccgaaatccaacttttttggttataagactctcaattttctttgcccgcctctcctgtgc

SEQ ID NO: 157386 - DNA, 847 bp, Homo sapiens
  misc_feature (1)...(847): n = a,t,c or g
ttttttttttttttttttaagcattttcggttatttttagttaaaagaaaaaccagctttgctcccaagggccgacaaagtgaaacctaaaggtcagaaggaagctgggttccgggctttcctgcaagactcttgcctcccaaaaccctggaaattgaggagagggccgcttccggagcttctgggaaaggttggtgcaacacaggggtcccgttggtgggggccgaangaagccgcccagccccacacaccggtcactgggattgggtgtgaagtgggtttcccaaagcggactgcccatgtgcctaagtcccactgaacatgaattgaacattaaacattccttggggggcaattaaaattaaggaatgaacacaggggagccaaagagagttggcttatttcggtttggatttctgaattcacaatccagggaaatagtcctttatcctgggtgcaaccttaattttcattttttccttggagccaatttccgaagggaaggtgagatccgttctggggggtcgattgttcacgcacggttgcttcctccctttcaggattgaagctttgcatgaaggctggcatactagggtggtaggtgggggtgtccattgtgctcttgatgggaatgcccttctgtgttcacgacgatgattccctgcacttcccttctggcttctgcagtcgctttcagtgtctcctccaacctctgcccagggtggagtgcagtggtgcagtcacggctcactgtagccttgacctcctgggctcaggcgatctctccacttcagccatttccgaccgatccggtagccccgcgtagcgaacacttagcgagtcctgt

SEQ ID NO: 157387 - DNA, 385 bp, Homo sapiens
  misc_feature (1)...(385): n = a,t,c or g
gcttccccaccatctacttcgcccccagtggggacaaaaagaacccagttaaatttgagggtggagacagagatctggagcatttgagcaagtttatagaagaacatgccacaaaactgagcaggaccaaggaagagctttgaaggcctgaggtctgcggaaggtgggaggaggcagacgccctgcgtggcccatggtcggggcatccacgccgaggccggcaacaaacgacagtatctcggattccnnnnnnnnnnnnnnaaatttttaaaactggggggttcaatttctggcttggaaaccggaaaacccgggagggagggaattgttaaccccaaatttttacgggggaaccnnnnnnnnnnataatttttgggggttggaa

SEQ ID NO: 157388 - DNA, 2915 bp, Homo sapiens
ccagcggccgccgacgctaggaggccgcgctccgcccccgctaccatgaggccccggaaagccttcctgctcctgctgctcttggggctggtgcagctgctggccgtggcgggtgccgagggcccggacgaggattcttctaacagagaaaatgccattgaggatgaagaggaggaggaggaggaagatgatgatgaggaagaagacgacttggaagttaaggaagaaaatggagtcttggtcctaaatgatgcaaactttgataattttgtggctgacaaagacacagtgctgctggagttttatgctccatggtgtggacattgcaagcagtttgctccggaatatgaaaaaattgccaacatattaaaggataaagatcctcccattcctgttgccaagatcgatgcaacctcagcgtctgtgctggccagcaggtttgatgtgagtggctaccccaccatcaagatccttaagaaggggcaggctgtagactacgagggctccagaacccaggaagaaattgttgccaaggtcagagaagtctcccagcccgactggacgcctccaccagaagtcacgcttgtgttgaccaaagagaactttgatgaagttgtgaatgatgcagatatcattctggtggagttttatgccccatggtgtggacactgcaagaaacttgcccccgagtatgagaaggccgccaaggagctcagcaagcgttctcctccaattcccctggcaaaggtcgacgccaccgcagaaacagacctggccaagaggtttgatgtctctggctatcccaccctgaaaattttccgcaaaggaaggccttatgactacaacggcccacgagaaaaatatggaatcgttgattacatgatcgagcagtccgggcctccctccaaggagattctgaccctgaagcaggtccaggagttcctgaaggatggagacgatgtcatcatcatcggggtctttaagggggagagtgacccagcctaccagcaataccaggatgccgctaacaacctgagagaagattacaaatttcaccacactttcagcacagaaatagcaaagttcttgaaagtctcccaggggcagttggttgtaatgcagcctgagaaattccagtccaagtatgagccccggagccacatgatggacgtccagggctccacccaggactcggccatcaaggacttcgtgctgaagtacgccctgcccctggttggccaccgcaaggtgtcaaacgatgctaagcgctacaccaggcgccccctggtggtcgtctactacagtgtggacttcagcttttgattacagagctgcaactcagttttggcggagcaaagtcctagaggtggcgcaaggacttccctgagtacacctttgccattgcggacgaagaggactatgctggggaggtgaaggacctggggctcagcgagagtggggaggatgtcaatgccgccatcctggacgagagtgggaagaagttcgccatggagccagaggagtttgactctgacaccctccgcggagttggtcactgctttcaaaaaaggaaaactgaagccagtcatcaaatcccaacccagtgcccaagaacaacaagggacccggtcaaggtcgtggtgggaaggacctttgactccattgtgatggaccccaagaaaggacgtcctcatcgagtatctacgcgccaatggtgcgggcactgcaagcagctagagccccgtgtacaacagcctggcccaagaagtacaagggccaaaagggcctggtcatcgccaagatggaggccccttgcaaacgacgtcccccagcgacccgctataagggtggagggcttccccacccatctactttcgccccccagttggggacaaaaaggaccccagtttaaatttgagggtggagaccagagatctggagccatttgagccaagttttatagaagaacatgcccacaaaactgagcaggacccaaggaagagctttgaaggcctgaggtctgcggaaaggtgggaaggaggcaagacgcccctgcgtggccccatgggtcggggcgtccaagccgaaggccggcaaccaaacgacagtaatctcggattccttttttttttttttttttaattttttatactttggtgtttcacttcatgctcttgaatactggattaaccatgaattgactgaattagtttaggtcccgattttttacagaggatacatctatttttaataattattttggggttttgaaaaatttttttttacacccttctaaattctttaatttttaaaagcaaaaattttttttgtgtgaaaatgttttctttttttaatttaaggtttaaaattccttttccaaatcatgttgattttgctctttaaaaaaaaaaaaaaaaaaaaaaaaaaaaaaaaaaaaagaagggctgggaccaaccgggtgagatccacaagtctctggatgtggctgaaggcaaatacacaattgaagtactttctgttttgaagtgctttcccttttgaatctggtttgaaacatgcagcttctgtctctagcccaaggaaagaccaaaacatagggaaataaaagcatttatctttgtcttggaagtaattgttgaagttgtgcagttgatcagtgcacagttagctgcaatgtttatagaaattgattgttaaaccaaatttacactggcatgtgtggtgtagtttctaaaaggcacttcacatttgaaatttttcttaccttagaaagtttctagtgatctaaatgtctagttttgtattcttttgtgtgtgttcactgtttctcagtattaccacttgaataattctctgtacaggggggtttgtgctatacactgggatgtctaattgcagcaataaagcctttcttt

SEQ ID NO: 157389 - DNA, 772 bp, Homo sapiens
  misc_feature (1)...(772): n = a,t,c or g
tggaaaaaacgattttacagtaaatggactttttacaaaaaggggaggggcagtctgaaaaagtaaagtttaatttaaaaatcatatacataaagcttctgattcattttcagctctcccactgtgtctttcacaggcgagtcagtttcccattgagtggaggccagttaaagatgccgccacggtggacagtgagccagcccttcctcaacaggtgagcaagagcggctgccactcaggcttgaacaatgcccatgacctgagtgacttggcagagaggctggcttcaggcgaggttcagaaggctagcttcttcatcaggagataaactctggagtccacctcgaatccatgcaggttgttggcatccccctgcagcctcatgagcaggcccccataggacacgtacgcagagctgaaacagaaggccccatcccgtgattctggagcactgccactcagcagctctcaatctcagcaggcgtgttgctgcttcagtagaagtttcatctccctcaatcctgtacacttttccatacattacatactcaaactggtcagcccttgaaggcctatcatcagtgggggttgtattcaccatcatccagggtaccatcttcatacaaggtactagctatgaccaaccgaaacttgtcacccaagtctacagggtaaatnntgatgttacatctaaagatagatccatcttngaaagatcactctcacaatgcagtcgagacactcggtcaaacttcttggccctcggntcaat

SEQ ID NO: 157390 - DNA, 943 bp, Homo sapiens
ccctcactaaagggacaaaagctggagctccaccgcggtgcggccgctctagaactagtggatcccccgggctgcaggtccggtcttgtccacgctagggggtgcacgtactcccaactgtggtcgcgctctcaccccttctgctgctctcgtggccccctcgcgatggcgggcatcctgtttgaggatattttcgatgtgaaggatattgaccggaaggccaagaagtttggaccgagtgttctcgactgcattgtgagagtgaatctttcaagatggatctaatcttagatgtaaccattcaaatttaccctgtagacttgggtgacaagtttcggtttggtcatagctagcaccttgtatgaagatggtaccctggatgatggtgaatacaaccccactgatgataggccttccagggctgaccagtttgagtatgtaatgtatggaaaaggtgtacaggattgagggagattgaaacttctactgaagcagcaacacgccctctctgcgtacgtgtccctatgggggcctgctcaatgaggctgcagggggatgccaacaacctggcatggattcgaggtggactccagagtttatctcctgatgaagaagctggccttctgaacctcgcctgaagccagcctctctgccaagtcactcaggtcgtgggcattgttcaagcctgagtgggcagccgctcttgctcacctgttgaggaagggctggctcactgtccaccggtggcggcatctttaactggcctccactcaatgggaaaatgactcgcctgtgaaagacacagtgggagagctgaaaatgaatcagaagctttatgtatatgatttttaaattaaactttactttttcagactgcccctacacctttctgtaaaaagtccatttactgtaaaatcgttttttccagttaaaaaaaaaaaaa

SEQ ID NO: 157391 - DNA, 639 bp, Homo sapiens
gcggccgcggcgcgagccgggacccctggaagggtcgggtgcgcggcccaggaggtaccgctgtctcctcacaatcggccaggcctgcagccgctgccgccgccgccgccgccgccgccctactcagggagtggcccaggcctgcggcgcgccaccctcacctccttcattcctaccgtcaaagcccagccttggctacctgacccccctgtggtctcgaactcggttagtccggtgaagggacagagaagcctgggttcccggcggcatcactgagatgctcagtcctgaattctgccctccattaggattatctgctttgtgggataatttcctcattggttgagtcagtgagttgcgtgtctgcaagagagcatcctatctggtcggagcagagcatggacatgggaacgagtgctctcagcaagaagccgcgggggacccttgcctaaaaaactttatgcaccaatggtgtttcacatggaagaggaccaggaggagctcatcttcgggcatggtgacacataccttcgctgcattgaggtgcacagccacacccttattcagctggagagttggttcacagctacaggccagactcgtgtgactgtagtcggaccacacagggcaaggcagggg

SEQ ID NO: 157392 - DNA, 429 bp, Homo sapiens
  misc_feature (1)...(429): n = a,t,c or g
aactgagttaggggaaaaccgccttaaggctggaggtgggacatgggggcagacatgctgctctggaaggcgttgagaagggcatggggatgcatatctaaagcccagcacttagctctttaccttgtctatgacccagagacctttgctcacgcgtttatctgctgaccttttctccgctattatcttatgaccctgacacagacccctctccgagaaacaccccggaatgatgactaaatactaggggaactcataggccggcgggaacctcgtctgctgaatgccgggcccctgggctcccttttttctttctctaaaaaattctctagnaaaaaaaaaacctaccctaaatgaaaaaaaagataactaaaaaaanaannnnnnnnngggaaaaatggtgttcgcttttgggggcccccccccccc

SEQ ID NO: 157393 - DNA, 449 bp, Homo sapiens
  misc_feature (1)...(449): n = a,t,c or g
ggccttggaagtaccacctggcacccaacaaggtccccagagtccacacatagtccacctgccctccctgcgtaagatcagctcttcctcctcccgacgatagatcagggtcaatgatccctgccaagatggcgactgctccagcctgctggtccaacctgtccagccacagctgttgctcgaaggcttgaagttcaatgggaccctctcccgctttctacaaactggnnnnnnnnnnnnnnnnnnnnnnnnnnnnnnnnnnnnnnnnnnnnnnnnnnnnnnnnnnnnnnnnnnnnnnnnnnnnnnnnnnnnnnnnnnnnnnnnnnnnnnnnnnnnnnnnnnnnnnnnnnnnnnnnnnnnnnnnnnnnnnnnnnnnnnnnnnnnnnnncagcccgaacaggttttcactaggttgcctgggctctttctttcgaattccaccagactgg

SEQ ID NO: 157394 - DNA, 1281 bp, Homo sapiens
atgggagactttaacactccactgtcaacattagacagatcaacgagacagaaagtcaacaaggatacccaggaattgaactcagctcagcaccaagtggacctaatagacatctacagaactgtccaccccaaatcaacagaatatacatttttttcagcaccacaccacacctattccaaaattgaccacatacttggaagtaaagctctcctcagcaaatgtaaaagaacagaaattataacaaactatctctcagaccacagtgcaatcaaactagaactcaggattaagaatcccactcaaagctgctcaactacatggaaactgaacaatctgctcctgaatgactactgggtacataacgaaatgaaggcagaaataaagatgttctttgaaaccaacgagaacaaagacacaacataccagaatctctgggacgcattcaaagcagtttgtagagggaaatttatagcactaaatgcccacaagagaaagcaggaaagatccaaaactgacaccctaacatcacaattaaaagaattagaaaagcaagagcaaacacactcaaaagctagcagaaggcaagaaataactaaaatcagagcagaactgaaggaaatagtgacacaaaaaacccttcaaaaaattaatgaatccaggagctggttttttgaaaggatcaacaaaattgatagaccactagcaagactaacaaagaaaaaaagagagaagaatcaaacagatgcaataaaaaatgataaaggggatatcaccaccgatcccacagaaatacaaactaccatcagggaatactacaaacacctctacgcaaataaactagaaaatctagaagaaatggataaattcctcgacacatacactctcccaagactaaaccaggaagaagttgaatctctgaatagaccaataacaggagctgaaattgtggcaataatcaatagcttaccaaccaaaagagtccaggaccagatggattcacagccgaattctaccagagagaataaaatacctaggaatccaacttacaagggatgtgaaggacctcttcaaggagaactacaaaccactgctcaaggaaataaaagaggatacaaacaaatggaagaacattccatgctgatgggtaggaagaatcaatatcgtgaaaatggccatactgcccaagggaaaccaccagcatcggcagaggtgatagctgaggaggagcggggatttggacgagagacacaggatgagtaccggggggcagccccgtga

SEQ ID NO: 157395 - DNA, 1036 bp, Homo sapiens
aaaacttttttttttttttttttttttcagacaaactctcgctctgtcgcccaggctggagtgcagtggcgcgatctcggctcactgcagcctctacctcccgggttccagcgattctcctgcctcagcctcctgggtagctgggattacaggcgcaggctaccacgcccggctaatttttgtatttttagggggtttcgccatgtcggccaggctggtctcgagctcctgaccccaggcgatccgcccgcctcggcctcccaaagcgctgggattacaggcgtaagccaccgcgccgggctctttcattctgtctttattttctgagatagagtctcgctcggacgctcaggttggactgcaacggcgtgatctcgggctcgctgaaacttccgcctcccggggttcaagcgattctcctgtctcagccttcccgagtagctgggattattgacgggcagcaccacgcccggctactttttgtggtttttgtatcttctgtcttctgctctttagtaccgcatagagccgcagaagactagcgagtcgaacaaacggcccctcttgcagcagttgttgatcacggggctgccccccggtactcatcctgtgtctctcgtccaaatccccgctcctcctcagctatcacctctgccgatgctggtggtttccctgggtaccgggaaccaaactctcattccccaggggcctaagacccccgtggccaggcccttctcaagtcagggttcctgcacattcacagttacgggtggccctgggagtaacacctggcacccaaacaggtcaccagagtccacacatagtccacctgccctccctgcgtaagatcggctcttcctcctcccgacgatagatcagggtcaatgatccctgccaagatggcgactgctccagcctgctggtccaacctgtccagccacagctgttgctcgaaggcttgaagttcaataggaacctctcccgctttctacaaactggttcctttatttttatgttcaccaaccaaaacggaggt

SEQ ID NO: 157396 - DNA, 1229 bp, Homo sapiens
aaccgtctggttcctttattaaaaagaaaaggaaaaccaaaaattttcaaagttaaaaaagaaacctttaaaaatattgtagcaatagccttcttcgtaacaaatataaaacagcttaagacacttggtgactttcttagttcatctgtggggaaatggatacacaatgaggttttactactaaagttagctatttggtaaaaactctaggaagagtcccatcaagaaaatggttattttggaaagacaagttatgattatttcccaaaatgtcaaaagaaataagaatgtaaaccccatatacttaaaatgttaatacaataatattaactcagtcaaataaataaaagaaagtggccccaaatttatggcaatttttcaaaacaaaaatgtagcttaaatatattttaaaataaataattggttcaaatacggacgaccattctcagcacaaactaacaacattcaaaataaagtgctatgagaaaaagtagccccacaatcttcaacttattcacatatgaacagagatactatctggatctttaggttctgaaatattcaccacgagtgaaagctagaggccaggcttagggccatcttttgtcatttttcttttttcttccagcgtgtgcttaaatattttcttcagggtgttgtaaactgttggtccattttcagaatcaaaattaaccttagtgaatgccttaatggcatgggcaaggaaagcttcctccacatccacgggaattgtctgcaggttcactatgcagtgcaacacgcagagaatagtctggtgctgtcccttctctaataaaaaaagtgcttctgcggcatctgctcgcctgtcaaccaacatgtccacatcctctttgggtgattacaggctccttcagttgctccacccaagaccacatcaagctgcatagggatgaaagggtccctctcgccacatattctttcccaaggctccatctcggggaattaaggctctttctaaaaagggaaggaggaaaggggacaggacaggacaggggacagagacaggggagagggagaggggaggtgcaccatttgacactgcatgattcttgcgctgcccacaagagtgaaagactcaggctccagagtgcagaactgggacccctcccagcctctccacttccaggctggacactggactaagacactgaattctgtaagccccagtttctctctatgaaactcat

SEQ ID NO: 157397 - DNA, 1987 bp, Homo sapiens
atggcgggcacccctcccccagccttgctgccgccttgcagtttgatctcagactgctgtgctaacaatcagcgagactccgtgggcgtaggaccctccgagccaggtgcgggatataatcttgtggtgcgcagttttttaagcccgtccgaaaagcgcagtgttcgggtgggagtgacccgacttttccagggccgtccatcacccctttctttgactcagaaagggaacccccctgaccccttgcgcttcccaatttacttctacaatttcggatggaaggattatggtgtagcgtctcttactactatcctagatatggtgaaggtgatgacatttgccttacaggaaggaaaagtagctatccattgtcatgcagggcttggtcgaacaggtgttttaatagcctgttacttagtttttgcaacgagaatgactgctgaccaagcaattatatttgtgcgggcaaagcgacccaattccatacaaaccagaggacagctcctctgtgtaagggaatttactcagtttctaactcctctccgcaatatattctcttgctgtgatcccaaagcacatgctgtcaccttacctcaatatctaattcgccagcgtcatctgcttcatggttatgaggcacgacttctgaaacacgtgccaaaaattatccactctattttgcaaattgctgctggacttagcggagaacaggccagtgatgatgaaggatgtgtccgaaggacctggtctctctgctgaaatagaaaagacaatgtctgagatggtcaccatgcagctggataaagagttactgaggcatgacagtgatgtgtccaacccgcctaaccccactgcagtggcagcagattttgacaatcgaggcatgattttctccaatgagcaacagtttgaccctctttggaaaaggcggaatgttgagtgccttcaacccctgactcatctgaaaaggcggctcagctacagtgactcagatttaaagagggccgagaacctcctggagcaaggggagactccacagacagtgcctgcccagatcttggttggccacaagcccaggcagcagaagctcataagccattgttacatcccacagtctccagaaccagacttacacaaggaagccttggttcgcagcacactttctttctggagtcagtcaaagtttggaggcctggaaggactcaaagataatgggtcaccaattttccatggaaggatcattccaaaggaagcacagcagagtggagctttctctgcagatgtttcaggctcacacagccctggggagccagtttcacccagctttgcaaatgtccataaggatccaaaccctgctcaccagcaagtgtctcactgtcagtgtaaaactcatggtgttgggagccctggctctgtcaggcagaacagcaggacaccccgaagccctctggactgtggctccagtcccaaagcacagttcttggttgaacatgaaacccaggacagtaaagatctgtctgaagcagcttcacactctgcattacagtctgaattgagtgctgaggcaagaagaatactggcggccaaagccctagcaaatttaaatgaatctgtagaaaaggaggaactaaaaaggaagaaagagcttaattcccgagatggagcttgggaaagaatatgtggcgagagggaccctttcatcctatgcagcttgatgtggtcttgggtggagcaactgaaggagcctgtaatcaccaaagaggatgtggacatgttggttgacaggcgagcagatgccgcagaagcactttttttattagagaagggacagcaccagactattctctgcgtgttgcactgcatagtgaacctgcagacaattcccgtggatgtggaggaagctttccttgcccatgccattaaggcattcactaagatcagcatcatctttgtaaatcagaatccagaggtcaccgtcctcctctaa

SEQ ID NO: 157398 - DNA, 1372 bp, Homo sapiens
atgaagagcccctttcctctggtgtcaacaaaggctgagtggggaacctggattttcaatcctgaagcagaagaatcacttgaacctaggagtttgatctcagactgctgtgctaacaatcagcgagactccgtgggcgtaggaccctccgagccaggtgcgggatataatcttgtggtgcgcagttttttaagcccgtccgaaaagcgcagtgttcgggtgggagtgacccgactttccaggtgccgtccatcacccctttctttgactcagaaagggaaccccctgaccccttgcgcttcccaagtgaggcagtgcctcgccctgcttcggctgaggcacgtttacttctacaatttcggatggaaggattatggtgtagcgtctcttactactatcctagatatggtgaaggtgatgacatttgccttacaggaaggaaaagtagctatccattgtcatgcagggcttggtcgaacaggtgttttaatagcctgttacttagtttttgcaacgagaatgactgctgaccaagcaattatatttgtgcgggcaaagcgacccaattccatacaaaccagaggacagctcctctgtgaagcacagcagagtggagctttctctgcagatgtttcaggctcacacagccctggggagccagtttcacccagctttgcaaatgtccataaggatccaaaccctgctcaccagcaagtgtctcactgtcagtgtaaaactcatggtgttgggagccctggctctgtcaggcagaacagcaggacaccccgaagccctctggactgtggctccagtcccaaagcacagttcttggttgaacatgaaacccaggacagtaaagatctgtctgaagcagcttcacactctgcattacagtctgaattgagtgctgaggcaagaagaatactggcggccaaagccctagcaaatttaaatgaatctgtagaaaaggaggaactaaaaaggaaggtagaaatgtggcagaaagagcttaattcccgagatggagcttgggaaagaatatgtggcgagagggaccctttcatcctatgcagcttgatgtggtcttgggtggagcaactgaaggagcctgtaatcaccaaagaggatgtggacatgttggttgacaggcgagcagatgccgcagaagcactttttttattagagaagggacagcaccagactattctctgcgtgttgcactgcatagtgaacctgcagacaattcccgtggatgtggaggaagctttccttgcccatgccattaaggcattcactaaggttaattttgattctgaaaatggaccaacagtttacaacaccctgaagaaaatatttaagcacccgctggaag

SEQ ID NO: 157399 - DNA, 336 bp, Homo sapiens
caagaatgaaatgacacttgatgcttacattttcttagcagacatggccgcttaccaacaagaagagcagatgcagcttccccgagctgatgccattcgttcacgtctcatcgatactttctctctcattgagcatttgcaaggcttgagccaagctgtgccgcggcacactatcagggagttacttggtcagcagcctatttcttcactaatttaaatttaagactcctatccacatcctctacatttaagagtggaaaattctggggaggtttagttgctggtttaccaaacttgataaatcaagggcttgtaaataaaactgaagagatagaa

SEQ ID NO: 157400 - DNA, 563 bp, Homo sapiens
tttttctatctgaatgtttatattttcaattctctatttccaacaattcccttcattatcttttgctgggcccaaggatattgaagccatccattgctttacttgtcttccaagttcatcagtgcctgcactgcaaactcttgtaacttcttacgttcctctaggttatactgaagcttttctagcaactcaaaatatcggaagagtgagtctctgggccaaacacggtcatcctgatccatttccattagcccgggcagattttcgtgcacaagagtctcccagtccaaacgacctgcagggaggaatgcttcagaaaagcacgtctagatttgtaaaagttgggtaagagctggtaaatcctatggtgtgggtggaaaggtggggtggaaagaggtaacaggaagcaaggagggaaagggtgcatcagtaagaaaccactttttacaacgagcaaagagggccacagccacacttacccgaagtgaagaagaagtacaggggaaattaagaagcaaaaacaaagtaattaagaccagaaaattggaaaggagatatactag

SEQ ID NO: 157401 - DNA, 1398 bp, Homo sapiens
tcatagcaggtggccaaggaagctgatagtcaataccagggaccaggaaggtcgtgaccagtcctggaggccccaggctgtacttcgaccttgctgttctgggctctcctttccctcatgttgggcccatgcaactgctcgtcgctgctcaggactcagaaaggccatttgctcaggagtgacagccacagcctgagcactggtgagactagatagttggatgggactaaacaccacagcaaatttaggaggagggatgacagaaatggcaagaggagtaacgccctggatctgtccccgcagcagtgctgaaagagccaggtctgggatcccagctgctatggtgccaatttcagtgaagatctcaggcccccagttactgattgggccaaacccaccaggcagtacaaagaggtgggccagaaactccagttgttcctcagagcactgcagatgcagggtgcccaggaagagagctgcttggctcagcaccaccaccctcagccccttcacaaatgacctaaactcccaactgctgatgtgctggagctcctctggccgcagtccacagagagtataacccagcgctgtcagatgaacgaagtccaggtggctcacatgccgaccactctgccgtaggaaactggagaccacaatgcggagctgagtggtgctccagccatctatctgccccagggtgctcagcactccccagtccactaggatcagctcctgtagttcccgatctcctagacctattaagagcctaccaagctgcaggatctgctcaggacgaaatccccgggggggaccccacaactgttttgctttgcccatggctgcccgcagttcctcaggcccaagtcctgggtctcctgcaaataatgtcaggcagtcctcaaagtctgagagctccatctctgcaatctgggttgcagaccaggctgctgggaatgtccctcgtacatctgcacaatttggcacaggttctggaagatcctcagcagctggtcgcaccacccctgctaccagggctgctttcttggcagcaagctgtggctccctacacagctgtccaactctgctctgctcccagctctgctgcttttctagaagccgctccagggtctctggacccaaggcctccaggttttgtagtgccctctctgccagggctgcctggcggaggggggtcagtgccagcagctgctctggagctctttgcaccagctccaccaccaacataatggattcattggatagtctgtccatcaactggatcgagaatacatgatactccaggtcctgacgaggtaaatgggtgtactctgagaagacgtagacaccagtcacaacaaaaatgtagaagatgagcagcaacatcaagaggaaagtcat

SEQ ID NO: 157402 - DNA, 743 bp, Homo sapiens
tttttttaaaattcatggttatttaattgggttgttgtggagcataaatgagataatgtaaggaaaacacttaaaataatgcttggcacttagtaagtgctcagtaaccggcagatgctcttgttggcattgatgttgtagttagtctactttgctcctaataccaacaactcctgcaatgattgatgtttagttttagggaaaaaaaatcaaaagaaagaagttaagtaaatttttgtttcttcctattatcatgttaacttgttctttcgattcacctaggcacattcttcatcccactaaacgaaccctcaggatctctatccttaccaacatggtaacaacaaagtcaaagacattccaggcactcttccagaaaacagaaaagttggatagccacttaagaaggatctccaggatgaaaataagcaagataaaccaagctgccacctccaaggtcagcttcaatggccatagtttggtatttgtggattccagcaattactcaaggacccatccggcccacaaagaaagaggtggcctctgactgcagcgcacatgaagcctgctcaacagcctctgggcatgtgaaatctgttctatacgttgaggctttatagagacgcccactagctggtgttgatctcccaacataagtttcttctggcgggaaggatcaagtaactcctgatagtgtgtcgcagcacagcttggctcaagccttgcaaatgctcgatgagaga

SEQ ID NO: 157403 - DNA, 698 bp, Homo sapiens
tgaagagaggacctgttgtctcttaaggaaacatacagagtggagttctttctgatttatgcagctgaaataataagagcaataacataagcagtgagaatgagacaatggagtttgggaagcaaaaaataagtcattaggcagatgatcaacagccaggataaaaatgagtgacatgaaaggatacactcaaggacccatccggcccacaaagaaagaggtggcctctgactgcagcgcacatgaagcctgctcaacagcctctgggcatgtgaaatctgttctatacgttgaggctttatagagacgcccactagctggtgttgatctcccaacataagtttcttctggcgggaaggatcaagtaactcctgatagtgtgtcgcagcacagcttggctcaagccttgcaaatgctcgatgagagagaaagtatcgatgagacgtgaacgaatggcatcagctcggggaagctgcatctgcccttcttgttggtaagcggccatgtctcagcccaggttctcttcgcccactcagtcctgacttcacgcttccacctccagctcaggcgccccctgagcccggctacccctacgcaggacgagctcagggccggctcccagcctcactgcgccccatttcccgccccgcccgacccccaggtttcggctcaccccgggacccggccctagcccctgc

SEQ ID NO: 157404 - DNA, 1820 bp, Homo sapiens
tttttttttttttttatactttttaattttaatgaacagacattgttctatctgaatgtttatattttcaattctctatttccaacaattcccttcattatcttttgctgggcccaaggatattgaagccatccattgctttacttgtcttccaagttcatcagtgcctgcactgcaaactcttgtaacttcttacgttcctctaggttatactgaagcttttctagcaactcaaaatatcggaagagtgagtctctgggccaaacacggtcatcctgatccatttccaattaccccggccagattttcgggcacaagagtctcccagtccaaacgaccaatagattcagaaaatctggattcagaaggggaagaataggaagaggatgtggaggagacacaggaggaagactggtactctctcttttttgacaaggtctcttctgtttttgatgcagatgttattaaatcctcttcagtggcaccataattagactctacttcagacacttctgataagtccaaactttccctttgttgactagctcctcttgaactgtcctctattttgctatggcttgacgtcagtgcttcatgtgacatgttttttctcccatcatggctactatgatacttcgaaagataatggagccaagcaacaaccaaaggatgaaatagatgctgctgaagatgcgactgacttcaggcaccttccagacgttctgaagcagtgcataccaatgatccaagccagccaacctgccgatagtgctgttcctgctacctctggcaaagtctatggaacgccagagactgaactcacctaccccactaacatagaggctgcccctttggctgaagaggaacatgcgtcctcggccacttcaatcactgagtgtgacaaactttcttcctttgccacatcagtggctgaggaccaatctgtggcctcacttacagctccccagacagaggagacaggcaagagctccctgctgcttgacacagtcacaagcatcccttcctcccgtactgaagctacgcagggcttggactatgtgccatcagctgaagacaagggcttcaaatcaccaccctgtgaggacttctctgtgactggggagtcagagaagagaggagagatcatagggaaaggcttgtctggagagagagctgtggaagaggaagaggaggagacagctcacgtagagatgtctgagaaactttgcagtcaatatggaactccagtgtttagtgcccctgggcatgccctacatccaggagaaccagcccttggagaagcagaggagcggcgccttagcccagatgacagcacagtgaagatggcttctcctgcaccatctggcccacccagtggcacccacacaccgtttcatgagtccccagtggaagaaaagtctgagccccaagactttcaggaggcagactcctggggagacactcagcgcacaaccagtgtgggcaaaagaaaagctgctgaggaattacgatgcctagtcagaactggccgaagcatccgaggactcagtctgcctccagcttgcactcgagcagagcgacgagaggtggaacgtgttgtggtggatgcactgagtggcctgaagggtgacctggctggacgttactataggctcagtgagatgacagaggctgaacagcagcagcttattgatgaccactttctgtttgataagcctgtgtccccgttgctgactgcagcaggaatggctcgagactggccagatgctcgtggaatttggcacaacaatgagaagagcttcctgatctgggtgaattga

SEQ ID NO: 157405 - DNA, 1085 bp, Homo sapiens
gtattttttagcagagacagggtttcaccatgctggccaggctggtcttgaactcccgaactcaggtgatctatccgcctcggtgtcccaaagtgctgggattacaggcgtgagccaccgcgcccggcctagacacttatacttttttaattttaatgaacagatattgttctatctgaatgtttatattttcaattctctatttccaacaattcccttcattatcttttgctgggcccaaggatattggaagcccatccattgctttacttgtcttccaagttcatcagtgcctgcactgcaaactcttgtaacttcttacgttcctctaggttatactgaagcttttctagcaactcaaaatatcggaagagtgagtctctgggccaaacacggtcatcctgatccatttccattagcccgggcagattttcgtgcacaagagtctcccagtccaaacgacccatcatggctactatgatacttcgaaagataatggagccaagcaacaaccaaaggatgaaatagatgctgctgaagatgcgactgacttcaggcaccttccagacgtcctgaagcagtgcataccaatgatccaaggtgaagagaatgaacactgttaccagggaattcgggaggtccgagaagaacacatggtactccaggtcctgacgaggtgaacgggtgtactctgagaagacgtagacaccagtcacagcaaaaatgtagaagaagatgagcagcaacatcaagaggaaggtcatgctcaacatggtaacaacaaagtcaaagacattccaggcactcttccagaaaacagaaaagttggatagccacttaagaaggatctccaggatgaaaataagcaagataaaccaagctgccacctccaaggtcagcttcaatggccatagtttggtatttgtggattccagcaattcaagtaactccctgatagtgtgccgcggcacagcttggctcaagccttgcaaatgctcaatgagagagaaagtatcgatgagacgtgaacgaatggcatcagctcggggaagctgcatctgctcttcttgttggtaagcggccat

SEQ ID NO: 157406 - DNA, 2046 bp, Homo sapiens; identical to SEQ ID NO: 156028

SEQ ID NO: 157407 - DNA, 1691 bp, Homo sapiens
agcggccgcccttttttttttttttttttaagtttaaatattttattttaggaaaggtactcttaggatttgtgttaatgttgttttctgtattaacaaattagtcacaatcaacttcgatatagccattgattcttctttctaaatctgtataaaaaggatattttcttgaaaaaccacaagaaaaatacaactgctttttcattgcccaggtcagttactcgctacagtcaggactgcatttaaattaggactgggcatctaatacttttgagtatttacaaatattatttaaaactatactcctagaccaccagctttcaaaaaagttgggatctgcttggacttggcaataaatatgtaccaaacatggaataatttctaagccgcttatgaggaggttttaaaaattactaacatttattaagcagtttgtgtgtcaggcatattgtgagtgctttgctttatacaaattcacttacttttttcagaattcctttgaggtagggtaggtacttttagaaatgccattttacatgtgaaaagtgaggttggaagagcctcagtaacctgcccagggccacacagctagaaggtgagccagcacttgagccacgtttctctttccagccagattctcagcactcagctgtgctgctggtggtcacagctggctgactggaccaggaagaaccttttagtgtcaggcgtgtgaatcacagcacttgggacaggttaccaagaaccatgatcacttaatttttatatttatacatgtacatttgtatatacatagagaaagtgcaggcaaaaccattatacagttactctaatagccatttgctactgccagcagtctcaggactgatccctgtctaagctggcaagtttacattctccttgtatcactacaggatttgctctggacaggagctgtaactcctcaacaaatcctgctttcagtctactactgcacagcttgaattgttcagtaggcccagctttttgtgaaagaaaaggccttgccatggtataaagagtttttttccctctataaaagatgtaaaatttttggctgggtgccagtggctcacgcctgtaatcccagcactttgggaggccgagacgggcagatcatgaggtcaggagatcaagaccatcctggctaacacggtgaaatcccgtctctactaaaaatacaaaaaattagctgtgcgtgatggcatgcgcctgtagtcacagctacttgggaggctgagattataggcacctgccaccactcctggctaattttgtatttttagtagagatggggtttcaccatattggccaggctggtctcaaactcccgacctcaggtgatccgcctgcctcagcctcccaaattgctaggattacaggcgtgagccaccgtgcccggcaagttctgtttattttcgtatctccagactctagcaccaggatggaagcatgggacgtgctctgtgaaggttgctgagagatgtggtttgggaagactggagcagtccagaggatcagtgcctgacctatggtggtgctcagtaaacgtaaacatcaggcagttgcaagcttcattctaaagcacagaaatactgtgcatgctgcagagactgtcgcttgatgagtctctgtcaaattatctctcatgtacctctgctcctggattgccc

SEQ ID NO: 157408 - DNA, 445 bp, Homo sapiens
aagtaaaaatgatcctcctgatcatcccatcctttcgtctctctccattctcttcttctaccatcaaggaaccattgtgaaagggtcatttttaatctctgtggtgaggattccgagaatcattgtcatgtacatgcaaaacgcactgaaagaacagcatggtgcattgtccaggtacctgttccgatgctgctactgctgtttctggggtcttgacaaatacctgctccatctcaaccagaatgcatatactacaactgctattaatgggacagatttctgtacatcagcaaaagatgcattcaaaatcttgtccaagaactcaagtcactttacatctattaactgctttggagacttcataatttttctaagaaaggggttaagggtgtgtttcactggttttggaagaactcaatgcttttaactacaatcggcatttcag

SEQ ID NO: 157409 - DNA, 494 bp, Homo sapiens
aattcaccacccccataaaatcatccacacttccccatctccctttcccaaaaacagaattatctgtaccccatttagacactcactgtgattctcccctgtgctactttatatgccatttctcctgttaatctgccttttgtaagttaattcttcagcaaaccgtcagagggcaaaggagaagttttcccttggcccctacgttatcaacagtacagacacataatactattctaacttgttcttttggtttttcagagtttcgtaaaaaggagcaacaaattaaacaatgcaagggcacagcaggacaagcactcattaaggaatgaggagggaacagaactccaggccattgtgagatagatacccatttaggtatctgtacctggaaaacatttccttctaagagccatttacagaatagaagatgagaccactagagaaaagttagtgaattttttttttaaaagacctaataaaccctattcttcctc

SEQ ID NO: 157410 - DNA, 1254 bp, Homo sapiens
atgtttgtgtttgaaactttaggagctgcccaggttatggaaggcggccaagtggaatataagcccctttcgggcattcggtacatgtggtcgtaccatttaattggcctcatctggactagtgaattcatccttgcgtgccagcaaatgactatagctggggcagtggttacttgttatttcaacagaagtaaaaatgatcctcctgatcatcccatcctttcgtctctctccattctcttcttctaccatcaaggaaccgttgtgaaagggtcatttttaatctctgtggtgaggattccgagaatcattgtcatgtacatgcaaaacgcactgaaagaacagagacagtcatgggaaattcctggtgtgtgtgaggaagaacgagggagaaaaggagagggtttgaatgagagtgtgtatcagcatggtgcattgtccaggtacctgttccgatgctgctactgctgtttctggtgtcttgacaaatacctgctccatctcaaccaggtacgtctctacctcttgcctcaggaacacacagaagggtccaaaggaggcggcggcggctcccagtcaccggcccccgccggcgagcgcacgatgcactgcctgggcgccgagtacctgaatgcatatactacaactgctattaatgggacagatttctgtacatcagcaaaagatgcattcaaaatcttgtccaagaactcaagtcactttacatctattaactgctttggagacttcataatttttctaggaaaggtgttagtggtgtgtttcactgtttttggaggactcatggcttttaactacaatcgggcattccaggtgtgggcagtccctctgttattggtagctttttttgcctacttagtagcccatagttttttatctgtgtttgaaactgtgctggatgcacttttcctgtgttttgctgttgatctggaaacaaatgatggatcgtcagaaaagccctactttatggatcaagaatttctggtaagcaaacatttcatttccaattgcaatctccatgctcgcaatcttgaaagttttgtaaagctgcacacacgaaagaggctcatacccagcctctctcttctagagggctctgaggcttctactacccccgggcctgaaagtgggatttgcgctgaactctccaaggctgaacccacctccctttctgagaaccttctccctgaagaagtgaagctgaacaagaatgctgatcagatggattcctaa

SEQ ID NO: 157411 - DNA, 793 bp, Homo sapiens
gctattaatgggacagatttctgtacatcagcaaaagatgcattcaaaatcttgtccaagaactcaagtcactttacatctattaactgctttggagacttcataatttttctaggaaaggtgttagtggtgtgtttcactgtttttggaggactcatggcttttaactacaatcgggcattccaggtgtgggcagtccctctgttattggtagctttttttgcctacttagtagcccatagttttttatctgtgtttgaaactgtgctggatgcacttttcctgtgttttgctgttgatctggaaacaaatgatggatcgtcagaaaagccctactttatggatcaagaatttctgagtttcgtaaaaaggagcaacaaattaaacaatgcaagggccacagcagggacaagcactcattaaggaatgaggagggaacagaactccaggccattgtgagatagatacccatttaggtatctgtacctggaaaacatttccttctaagagccatttacagaatagaagatgagaccactagagaaaagttagtgaattttttttttaaaagacctaataaaccctattcttcctcattgtctttgtcattattgtttgaccaggtaacaatactggaactatattagtttacctttttttgtacaaattaggacagaaaaactcttctaaaaccatgtttatatgcatcaacttacaaagtacactatgtaagaactgaggtaagtttgtaagtgcacaactaataaataaacctttttaagataaggaaaaa

SEQ ID NO: 157412 - DNA, 413 bp, Homo sapiens
  misc_feature (1)...(413): n = a,t,c or g
attccccggagccggctgctgtgaactcgcccccgtgtggatagtcactccctgccgattctgtctgtggcttcttccctgccagcaggactgagtgtgcgtacccagttcacctggacatgagtgcacactctcacccctgcacatgcataaacgggcacaccccagtgtcaataacatacnnnnnnnnnnnnngggggggcccttttaaaagaacccttggggggcccaaatttaacgggggcgggcaaggaaaaatttttttctttatggggggcctttttaaaccctccttgggatttttggaaaagaacctttttttnnnnnnnnnnacatatggggccaccccccctccaaaatttaagccttaagggnnnnnnnnnntttttaaggggaaaagggggaaaaccacc

SEQ ID NO: 157413 - DNA, 395 bp, Homo sapiens
  misc_feature (1)...(395): n = a,t,c or g
ccgacttttctaacccccaacctattccgcttttttttccccctttcccccttaaaaannnnnnnnnncccctaagcccttaaattttgtaggggggtttttcccattttttcccccccccaaaaaaagtttcttttccaaaattccccaggtggtttttttttccccccccttaaagaaaaaaatttttcttttcccccccccgttaaatttgggcccccccagggttctttttaaacgcccccccccnnnnnnnnnnnnnnnnnnnnnnnnnnnnnnnnnnnnnnnnnnnnnnnnnnnnnnnnnnnnnnnnnnnnnnnnnnnnnnnnnnnnnnnnnnnnnnnnnnnnnnnnnnnnnnnnnnnnnnnnnnnnnnnnnnnnnnnnnnnnnnnnnn

SEQ ID NO: 157414 - DNA, 387 bp, Homo sapiens
  misc_feature (1)...(387): n = a,t,c or g
nnnnnnnnnnnnnnnnnnnnnnnnnnnnnnnnnnnnnnnnnnnnnnnnnnnnnnnnnnnnnnnnnnnnnnnnnnnnnnnnnnnnnnnnnnnnnnnnnnnnnnnnnnnnnnnnnnnnnngggggggcccttttaaaaaaacccttggggggcccaaatttaccgggggcgggaaaggaaaaatttttttctttatgggggggcaattaaaaccctccttgggatttttggaaaaaaaccttttttttgggggggaaaaaaatgggcacannnnnnnnnnaaaatttaaacctttaggggnnnnnnnnnntttttaaggggaaaagggggaaaaccaccccaaaaaccctggctttaaaaaattttgnnaantttcgaaaaaaaccttc

SEQ ID NO: 157415 - DNA, 413 bp, Homo sapiens
  misc_feature (1)...(413): n = a,t,c or g
ggggggggccctttaaaaaaaacccttgggggggccaaaattaaacggggggtggaaaaataaattttttttctttttggggggggtttttaaaactggggccggggcgggtttttaaaaccccgggaagggaaaaacccccacctggggatttttggaaaaaaaccttttttttggggggggaaaatttgggcccacccccccccaaaaatttaaggctttaagggnnnnnnnnnnttttaaaggggaaaagggggaaaaaaaacctcaaatgcctgggggtgaaaaattttctttactgggttttttttaaaaaaattttttcccccggggctctggttncnccntggctgacanttataatgaaagttatttgtggggtaatattgccaaaacagggagggaattccgcg

SEQ ID NO: 157416 - DNA, 1547 bp, Homo sapiens
tacaaactggtctgctactacaccagctggtcccagtaccgggaaggcgatgggagctgcttcccagatgcccttgaccgcttcctgtgtacccacatcatctacagctttgccaatataagcaacgatcacatcgacacctgggagtggaatgatgtgacgctctacggcatgctcaacacactcaacaacacgaaccccaacctgaagactctcttgtctgtcggaggatggaactttgggtctcaaagattttccaagatagcctccaacacccagagtcgccggactttcatcaagtcagtaccgccatttctgcgcacccatggctttgatgggcgtgaccttgcctggctctaccctggacggagagacaaacaccattttaccaccctaatcaaggaaatgaaggccgaatttataaaggaagcccagccagggaaaaagcagctcctgctcagcgcagcactgtctgcggggaaggtcaccattgacagcagctatgacattgccaagatatcccaacacctggatttcattagcatcatgacctacgattttcatggcgcctggcgtgggaccacaggccatcacagtcccctgttccgaggtcaggaggatgcaagtcctgacagattcagcaacactgactatgctgtggggtacatgttgaggctgggggctcctgccagtaagctggtgatgggcatccccaccttcgggaggagcttcactctggcttcttctgagactggtgttccagcgccaatctcaggaccgggaattccaggccggttcaccaaggaggcagggacccttgcctactatgagatctgtgacttcctccgcggagccacagtccatagaaccctcggccagcaggtcccctatgccaccaagggcaaccagtgggtaggatacgacgaccaggaaagcgtcaaaagcaaggtgcagtacctgaaggataggcagctggcaggcgccatggtatgggccctggacctggatgacttccagggctccttctgcggccaggatctgcgcttccctctcaccaatgccatcaaggatgcactcgctgcaacgtagccctctgttctgcacacagcacgggggccaaggatgccccgtccccgtctggctggccgggagcctgatcacctgccctgctgagtcccaggctgagcctcagtctccctcccttggggcctatgcagaggtccacaacacacagatttgagctcagccctggtgggcagagaggtacacacttgttgatgattaatggaaatgtttacagatccccaagcctggcaagggaatttcttcaactccctgccccctagccctccttatcaaaggacaccattttggcaagctctatcaccaaggagccaaacatcctacaagacacagtgaccatactaattataccccctgcaaagccagcttgaaaccttcacttaggaacgtaatcgtgtcccctatcctacttccccttcctaattccacagctgctcaataaagtacaagagtttaacagtgtg

SEQ ID NO: 157417 - DNA, 1797 bp, Homo sapiens
agtggagtgggacaggtatataaaggaagtacagggcctggggaagaggccctgtctaggtagctggcaccaggagccgtgggcaagggaagaggccacaccctgccctgctctgctgcagccagaatgggtgtgaaggcgtctcaaacaggctttgtggtcctggtgctgctccagtgctgctctgcatacaaactggtctgctactacaccagctggtcccagtaccgggaaggcgatgggagctgcttcccagatgcccttgaccgcttcctctgtacccacatcatctacagctttgccaatataagcaacgatcacatcgacacctgggagtggaatgatgtgacgctctacggcatgctcaacacactcaagaacaggaaccccaacctgaagactctcttgtctgtcggaggatggaactttgggtctcaaagattttccaagatagcctccaacacccagagtcgccggactttcatcaagtcagtaccgccattcctgcgcacccatggctttgatgggctggaccttgcctggctctaccctggacggagagacaaacagcattttaccaccctaatcaaggaaatgaaggccgaatttataaaggaagcccagccagggaaaaagcagctcctgctcagcgcagcactgtctgcggggaaggtcaccattgacagcagctatgacattgccaagatatcccaacacctggatttcattagcatcatgacctacgattttcatggagcctggcgtgggaccacaggccatcacagtcccctgttccgaggtcaggaggatgcaagtcctgacagattcagcaacactgactatgctgtggggtacatgttgaggctgggggctcctgccagtaagctggtgatgggcatccccaccttcgggaggagcttcactctggcttcttctgagactggtgttggagccccaatctcaggaccgggaattccaggccggttcaccaaggaggcagggacccttgcctactatgagatctgtgacttcctccgcggagccacagtccatagaaccctcggccagcaggtcccctatgccaccaagggcaaccagtgggtaggatacgacgaccaggaaagcgtcaaaagcaaggtgcatgtacctgaaggacaggcagctggcgggcgccatggtatgggccctggacctggatgacttccagggctccttctgcggccaggatctgcgcttccctctcaccaatgccatcaaggatgcactcgctgcaacgtagccctctgttctgcacacagcacgggggccaaggatgccccgtccccctctggctccagctggccgggagcctgatcacctgccctgctgagtcccaggctgagcctcagtctccctcccttggggcctatgcagaggtccacaacacacagatttgagctcagccctggtgggcagagaggtagggatggggctgtggggatagtgaggcatcgcaatgtaagactcgggattagtacacacttgttgatgattaatggaaatgtttacagatccccaagcctggcaagggaatttcttcaactccctgccccctagccctccttatcaaaggacaccattttggcaagctctatcaccaaggagccaaacatcctacaagacacagtgaccatactaattataccccctgcaaagccagcttgaaaccttcacttaggaacgtaatcgtgtcccctatcctacttccccttcctaattccacagctgctcaataaagtacaagagtttaacagtgtg

SEQ ID NO: 157418 - DNA, 799 bp, Homo sapiens
aattcccgggtcgacgatttcgtggcatccccaccttcgggaggagcttcactctggcttcttctgagactggtgttggagccccaatttcaggaccgggaattccaggccggttcaccaaggaggcagggacccttgcctactatgaggtaatggagttggggagaaggtaggattcccccacaccaccagcagccctggggaaggtgattccccaccacgttcttgctttttctcctttgggaataaagaaaatgtccggttgccccagcatgcctgaggaagtggaagggagaggttaggacatttgttgctgaaaatctccagcaggtacaggcacatgggcctgcaccactaggcacctgggatatccctctggctatggggctgaggtcttccttccagcccaggaaagagcagaggtcaagaggcagattttttgtttcactctagcctctgctactctgtgtggccttgggcctgtcctcagtgtcaaccagcaggcctcacatctctgtttaaaatggaaggaagctaagcagggccaaggcagccaccatctctgggtcatttgcctctggtttgtataaacttgtgtgatgcatgcagcctgcagaccctgcaaagagtgaggctgcaggatggagcaggagctaaaagagatttggagagtggcgtctcctggtgacctgcaaggtctcggcacgactccccacactgccttttccctgttatctgctcagatctgtgacttcctccgcggagccacaggcaatagaatcctcggccagcaggtccc

SEQ ID NO: 157419 - DNA, 513 bp, Homo sapiens
cgccactgattcagtgagctggagattggatcacaggtataattcaagcttttcatgtagtcatgtagatcactagactccttggtgtactgacgtagcaatttaaaagcagatcatgtgtagtacatctagaagtagatttacaaatattctgaagagttgtaaccttttaaaatactaacagtgacatggttttgtttttaaggtttagcaatatttagcccattatttttgttttattcttaacttgaatgtttgtaaattttatttcttgatgctttcattgtgttatgataacatcaaaataacttgatattctaggttactaataattgttgtgcatgagtgttactacttttggaattgaagactttaaagaattttaaaggcagttgttgactaaacttctttctcttgattcacagccgaaggagtaaaggtgctgcaatgatgttagctgtggccactgtggatttttcgcaagaacattaataaactaaaaacttcatgtga

SEQ ID NO: 157420 - DNA, 1490 bp, Homo sapiens
ttgctcaggctgctcttgaactcccggacttgagcagtctgcttgtctaagccttccaaagtgctgggattacaggtgtgagccactgtgcccagcctgttacctcatttaaaacaaattttgcacatctgaacagcctaaaattgtaatgtgataagtggggtaggagtggggtgggcgtagtgggattttgaatcaatgaaggcccttgttcttgtggcatccttttgcagtgattccctgccaggcaaggcagtaaacctgggattgcctgcccaggactgtaatcacattgatgtcccagcgccatggagtatgtaatgaatgaactgccagcagaactactcactaagaactactccctgtttgtgaggattgtacctgttgagagaagttgcaaaaagaattagtcaaaagaattagtcaaaatttgtcctatgacctaggtctgaaggtcatttaccacattgattgttctcttcatccagcctttgagccctatgagttagtgcccttagcctttgagtcccacaggtatggaggagctacctgtggggacctgagccatcactattcctgcttcaagttacactggtgcctctcactagcactgctctgaaaagccagctggaaaaatcaatgcatttgagtacataaattctttggctccaaagaaatgccatagcaatattgcttttaattcagttttgtttagatgttagaattgggatttgttcttgctttttggttgcgatgggagtatatactaagttacttatactaaggcattagtagtctcatatctgaggagcaattggatttttagttcagctaaattaatgcctctttttaaatactaacttgtactacttttgtggctgggaatggcatcttttattgaactgaggcaggttttaaaagacttgcctgaacatttagagcactcccaatgagggtaaaatagacttgaatctgtaatgattctcgtaactgttcctggtgtgtgtccagcacaatgttgctgggcagagcagaggggcagaggctcaggtatgtacttcattgacaagtgggcaaggcccatcctgggtaccacaattggcttaatgatctcttcattgtgaagtccggctacctcgtttgcataagaactcccagtaatcaggcaaggcattgtcagaattgggaggaataaaatcagtgagtctggaaggagtgctctgtatacaattgcaaagaacaaaatggtcatctttaaggtacctgattgcatgcacttaaatgcagattattttggagtttgaaaagggactattaatgaaatctttcttttcccgccgatttttttttttcccttccccgccactgattcagtgagctggagattggatcacagccgaaggagtaaaggtgctgcaatgatgttagctgtggccactgtggatttttcgcaagaacattaataaactaaaaacttcatgtgaaaaaaa

SEQ ID NO: 157421 - DNA, 832 bp, Homo sapiens
  misc_feature (1)...(832): n = a,t,c or g
cacaaaaaagggggccaaataaaaaacccccccagggtttttcccggggtttaaaggggccctttaaattaaagggcccccccnnnnnnnnnnnnnnnnnnnnnnnnnnnnnnnnnnnngaagtttttagtttattaaatgttctttgcaaaaaatccacagtgggccacaagctaacatcattgcagcaccttttaactccttcggctgtgatccaatctcccagctcactgctagacacttcatttcttctttttgccaggcaccaacattggccttttgcagtccccctcgactttcttcattctgttcttgcggttcctttcggttgctttcttgaggtctttttcttctcatacaggccatgtcttgcaagtctatgtttggggttcatttttctttgcataatccagggggaatcataaatcatggccaaagcccagttgtcttgccaccacccaaaatgaggttctggaatcccaaatacaaaggatggaccatccgggtgtgggggcttggtaccattttggggcctagggtttttcccccggaatttctggtcttggggggactggtcggccttcccggggggtgaaaggacatcaaatgacccatttgttttcctctgaagtaggtcgggttggggcatggaactttctaggtgcgggataggttacgggtgtcgttcatgatggcgatctatcttcagacagccaaggaggaaaagcaaggcttacagaaggatgttccttcaggaggaagcagcactaaaagcactctgagtcaagatgagtgggaaaccatctcaataaacacattttccgataaaccc

SEQ ID NO: 157422 - DNA, 696 bp, Homo sapiens
  misc_feature (1)...(696): n = a,t,c or g
gagacggagcctcgctctttcgcccaagctggagtgcagtggcgtgatcttggctcactgcaagctttgcctcccaggttcacgccattctcctgccccagcccgggacgngngcntgcagagagccaggagctcaccactgcactcagactgggcggcaganaagactctgtctctaagtaaacaaacagacagagtagtgtggaggcctggatgatgaagggaagtggttgggaaagcagataactccctggacacacacagggacagagagccagcctgcggccagggaacaagtatgtttctctgcctaggggctgcttaaaccaggggtctcaagggtcactgagggggccgagggtggtctcgcctggaaaaggggaatagtctctggagggaagcatccccaagttggacctcagaattgtctccgataacagctgacaattaaacaaccaaacgttcagagaaacaccatgctactgatgagaatcggcagaaacaccagtcacagatttagacccccaaagactaggacactggaattatttagtacagaatataaaataactatatatgaaatatgtttaagaagtggaaactgtaatctaaaaagcaagcatgtatcaagagaccataaaaaaaatcagacaaatctaaaacacaatcagatgtaacttttagcggacgcgtgga

SEQ ID NO: 157423 - DNA, 3882 bp, Homo sapiens
tgcacaccaccatgcctggctaatttttgtttttgttttttgagacggagtcttgctctgtcgcccaggctggagtgcagtggcgcgatctcggctcactgcaagctctgcctcccgggttcacgccattctcctgcctcagcctcctctcaagtagctgggagtacaggcgcctgccaccaagcccggctaattttgtttttgtgtttttagtagagacggggttttaccgtgttagcccaggatgatctggatctccctggagctggtgatccgcccgcctcggcctcccaaagtgctgggattacaggtgtgatagtatgaattttcttatggttagtaaggattgaagactggttaaaggctttgccacatttttcacatttgtagggtttctctccagtgtgaattatcttatgtttagtaagagctgaggactctttaaaggctttgccacattctccacatttgtagggtttctctccggtgtgcaacctcttatgtctaggtaggggtgaagattggctaaatgctttgccacattcttcacatttgtagggtttctctctagtatgaattctcttatgtccatttagggttgaggatgatataaatgctttgccacattcttcacacttgtaaggtttctctccagtatgaattatcttatgtgtagtaagctttgaggatcgattaaaagctttcccacattcttcacatttgtatggtttctctccagtgtgcatcctcgtatgtctagttagggttgaggattggctaaatgctttgccacattcttcacatttgtagggtttctctccagtatgaattatcttatgttcagtaagagttgaagatttcctaaaagctttgccacattcttcacatttgtagggtttctctccagtatgaattatcttatgtgtagtaagggttgaggattggctaaaagctttgccacattcttcacatttgtagggtttctctccagtgtgcatcctcttatgtgtagtaaggtgtgaaggctggctaaatgctttgccacattcttcacatttgtagggtttctctctggtatgaattctcttatgttcagtaagggttgaggaccagataaatgctttgtcacattcttcactcttggaaggtttctctttagtatgaattatcttatgtgtcgtaagatttgaagattgattaaaagctttgccacattcctcacatttgtagagtttctctccagcatgtattattttatgtttagcaagggctgaggagtgcttaaaagctttgccacattctttacatttgtagggtttctctccagtatgaattgtcttatgcttagtaagggttgaggaacggctaaaagctttgccacattcttcacatttgtagggcttctctccagtgtgtatcctcttatgtctagttagggttgaagaccatataaatgctttgccacattctttacatttgaagggtttctctctagtatgaattcttttatgtttagtaaggcttgaggaccagttaaatgctttgccacattcttcacacttgtaaggtttctctccagtatgaataaacttatgtatagtaagatttgaagatcgattaaaagctttgccacattcttcacatttgtagagtttctctccagcatgtattattttatgtttagtaagggttgagagtcgcttaaaagttttgtcacattctttacatttgtagggtttctcttcagtatgagttatcttatgattagcaagggttgaggaattgctaaaagctttgccacattctttacatttgtagggtttctctccagtatgaattctcttatgtttagcaagggctgaagaatggctaaaagctttgccacattcttcacatttgtagggtttctctccagtgtgtatcctcttatgtcttcttagggttgaggaccatagaaatgctttgccacattcttcacacttgtaagacttctctccagtatgaattatcttatgtgtagaaagacttgaggaatgattaaaagctttgccacattcttcacatttgtagagtttctttccagcatgaattattttatgtgtagtaagggttgagaattgcttaaaagctttgccacattctttacatttgtagggtttctctctactatgaattatcttatgtttattaagggttaaggattgtctaaaagctttgccacattcttcaaatttgtagggtttctctccagtatgaattatcttatgtttagtaagggttgaggattgcctaaaagctttgccacattcttcacatttgtagggcttctctccagtgtgtatcctcttatgtctagttagggttgaagaccatataaatcctttgccacattctttacatttgaagggtttctctctagtatgaaatcttttatgtttagtaaggcttgaggaccagttaaatgctttgccacattcttcacacttgtaaggtttctctccagtatgaataaacttatgtatagtaagatttgaagatcgattaaaagctttgccacattcttcacatttgtagagtttctctccagcatgtattattttatgtttagtaagggttgagagtcgcttaaaagttttgtcacattctttacatttgtagggtttctcttcagtatgagttatcttatgattagcaagggttgaggaattgctaaaagctttgccacattctttacatttgtagggtttctctccagtatgaattctcttatgtttagcaagggctgaagaatggctaaaagctttgccacattcttcacatttgtagggtttctctccagtatgaattctcttatgtttagcaagggttgaagaatggctaaaagctttgccacattcttcacatttgtagggtttctctccagtgtgtatcctcttatgtctagttagggttgaggaccatagaaatgctttgccacattcttcacacttgtagattttctctttagcacagattattttatgtgtagtaagggttgagagctgcttaaaagctttgccacattcttcacatttgtagggtttatcttcagtatgaatttccttatgattagtaagggttgaggaccaatgaaaggttttttcacattctttacatttacaggacttctctgtaatataaacgcatttatgttgggttttgtgtaaacggatgcaaaatgacttgacacattttttacatttgaagcatttctttccggtatgtcttatcgtatgtctgtttgaatttaaaaatttatagaagactttcaaatatttcccacattgaaatactttgctctgggcagttgtgagacactggttaagtttattataaccttctttgtgcaccttacactcatccacacttttacaaccttttcttaactgtaaattctcatgtccacatttttcatattttctcagtaatactttttgaaaagaatcttccatgctctgctctggccaaaagtcttgaggaaaatgaggacatatacctgtgggttcatccaccatctcatgttgcttcatattccagggctcttttccttgctccagataagtaatcaggtctggcttagagagagcaatacccaggaaggccaggtttctgtagttctctaacatcacattcctatataaattctgctgtgcagtgtccagacattgccactcctccggagagaattctatggccacatccctaaatgtcaacagtcccatttctaggcttccaggggttcctggcatcttagctgtggctcttccaatacctgcaggtcacagggccacacaggctgggcctcctggagcagaggacacagagcagtgaagtcgagacctg

SEQ ID NO: 157424 - DNA, 385 bp, Homo sapiens
  misc_feature (1)...(385): n = a,t,c or g
ggcactcgtgtttcacaacagggacccttaaaggcgatgtttccagcaaaggatgtgannnnnnnnnnnnnnnnnnngaaaaaagttctcactgggttcccaaggcgggagggcaggggtctttcccagacccccccttggcaaactacaaactacggccttaaactccggggctaaagggacccccccatttttgtttcctgagccccggaaacggggggggcccccccccgcccccggttgggagggaattttttgcccacatttttttccaatgggtcaaaagggggaggggggcctttggcataccggggaggggccccattaggctcaactcctaatttttttccattcaccatcagttgggggcggaattcataacagg

SEQ ID NO: 157425 - DNA, 395 bp, Homo sapiens
cagaatttctctcttgtccaggctgtagcacagtggcgcagtcttggctcactgcaacctttgcctcccaggttcaagcaattcttgtgcctcagcctcccaggtagctgggattacaggcgcatgccaccatgcccagctaatcatttacgtttaatgtctatgtgggccagggtctgtactcaacaaaaggtagcaggaaaggctccatccctactccttaagagtccttagtgtgatgcagtagacatgtggatcgtgtctgtgaatagccactgcactccagcctgagcaacctaacaagactgtttcttagaaaaagaaaatcaggccgggtgtggtggcctcatgcctctaatcccaaggaggccaaggcgggcagactcctaaggttg

SEQ ID NO: 157426 - DNA, 3272 bp, Homo sapiens
atgctgggcgcgcgggcctggttgggccgcgtccttctgctgccccgcgccggtgcaggcctcgccgcgagccgcaggggtagctcctcccgggacaaggaccgaagtgcgacggtcagtagttcagtgcccatgcctgctggagggaaaggaagccatccttcatctacaccccagagggtccccaaccgcctgatccacgagaagtcaccatacctcctacaacatgcctacaatcctgtggactggtacccctggggacaggaagccttcgacaaggccaggaaggaaaacaagccgattttcctctcagtcgggtactccacctgccactggtgccacatgatggaagaggagtccttccagaatgaggagattggccgcctgctcagtgaggactttgtgagtgtgaaggtagaccgtgaggagcggcctgacgtggacaaggtgtacatgacgttcgtgcaggccaccagcagcggcgggggctggcccatgaatgtgtggctgactcccaacctccagccctttgtcgggggcacctatttccctcctgaggatggcttgacccgagtcggcttccgcacagtgttgctgagaatacgagaacagtggaaacagaacaagaacaccctgctagaaaatagccagcgtgtcaccactgccctgctggcccgatcagagatcagcgtgggtgaccgccagctgccgccctctgccgccaccgtgaacaatcgctgcttccagcagctggatgagggctatgatgaggaatacggtggcttcgctgaggcccccaagtttcccacgccggtgatcctgagcttcctgttctcctactggctcagccatcgactgactcaggatggctctcgggcccagcagatggccttgcataccctgaaaatgatggctaacgggggcatccgggaccatgtggggcagggctttcaccgctactccacagaccgccagtggcacgtccctcactttgagaagatgctctatgaccaggcacagctcgctgtggcctattcgcaggccttccagctctctggtgatgaattctactctgacgtggccaaaggcatcctgcagtacgtggctcggagcctgagccaccggtccggaggcttctatagcgcagaagatgcagactcgcccccagagcggggccagcggcccaaagagggcgcctactatgtgtggacggtcaaagaggttcagcagctcctcccggagcctgtgttgggtgccaccgagccgctgacctcaggccagctcctcatgaagcactacggcctcacagaggctggtaacatcagccccagtcaggcgtgtgagctcgcagacaaaggccattctcctcaggaccccaagggggagctgcagggccagaatgtgctgaccgtccggtactcgctggagctgactgctgcccgctttggcttggatgtggaggccgtgcggaccttgctcaattcagggctggagaagctcttccaggcccggaagcatcggcccaagccgcacctggacagcaagatgctggctgcctggaatggcttgatggtgtcaggctatgctgtgactggggctgtcctgggccaagacaggctgatcaactatgccaccaatggtgccaagttcctgaagcggcacatgtttgatgtggccagtggccgcctgatgcggacctgctacaccggccctggggggactgtggagcacagcaacccaccctgctggggcttcctggaggactacgccttcgtggtgcggggcctgctggacctgtatgaggcctcacaggagagtgcgtggctcgagtgggctctgcggctgcaggacacacaggacaagctcttttgggactcccagggtggcggctacttctgcagtgaggctgagctggggggctggcctgcccctgcgtctgaaggacgcccaggatgaagcagagcccagcgccaattccgtgtcagcccacaacctgctccggctgcatggcttcacgggccacaaggactggatggacaagtgtgtgtgcctattgaccgccttttccgagcgcatgcgtcgtgtcccggtggcgttgcccgagatggtccgcgccctctcagcccagcagcagaccctcaagcagatcgtgatctgtggagaccgtcaggccaaggacaccaaggccctgggtgcagtgcgtccactctgtctacattcctaacaaggtgctgattctggctgatgggggacccctcgagcttcctgttcccgccagctgcctttccttgagttaccctccgacggttgggaaggaccaggccactgcatatgtgtcccctcctggggatccgggctctgcggtccagcgcgacctgcctggggccacgtgttcaagcacgaagcccctgcgtggagtccacgcccttcaaaaggtccctaggggcaaagggatgaagcccaggagcgtcaatgcccgcccagagctgagctccgtcctccggctgctgcccaaatcaggggtcgtggacaaaggatgcctggggcctgcggccctacgccaggaccccgcgccgaatactctgattcttcgggctccctccaagggagtcccaaagaccccaatggccaataggaaagttgcttatggaaccacagagaacagtcccgtgacattcgcgcacttccctgaggacactgtggagcagaaggcagaaagcgtgggcagaattatgcctcacacggaggcccggatcatgaacatggaggcagggacgctggcaaagctgaacacgcccggggagctgtgcatccgagggtactgcgtcatgctgggctactggggtgagcctcagaagacagaggaagcagtggatcaggacaagtggtattggacaggagatgtcgccacaatgaatgagcagggcttctgcaagatcgtgggccgctctaaggatatgatcatccggggtggtgagaacatctaccccgcagagctcgaggacttctttcacacacacccgaaggtgcaggaagtgcaggtggtgggagtgaaggacgatcggatgggggaagagatttgtgcctgcattcggctgaaggacggggaggagaccacggtggaggagataaaagctttctgcaaagggaagatctctcacttcaagattccgaagtacatcgtgtttgtcacaaactaccccctcaccatttcaggaaagatccagaaattcaaacttcgagagcagatggaacgacatctaaatctgtga

SEQ ID NO: 157427 - DNA, 709 bp, Homo sapiens
acaagtgtgtgtgcctattgaccgccttttccgagcgcatgcgtcgtgtcccggtggcgttgcccgagatggtccgcgccctctcagcccagcagcagaccctcaagcagatcgtgatctgtggagaccgtcaggccaaagaacaccaaaggccctggtgcagtgcgtccactctgtctacattcctaacaaggtgctgattctggctgatggggacccctcgagcttcctgtcccgccagctgcctttcctgagtaccctccgacggttggaagacccaggccactgcatatgtgtgtgagaatcaagccttgttcagtgcccatcactgatccctgcgaattacgaaaaactactacatccattgacatgcccataccccttggggtggggctagaaggtgaagcatcccaacttgacgtagagactccacgcccatgcagggccgtagtagaaccttgtggccatccctggagcaccctgccactcaggttgaccctcggccaatacgtcacttgcccccccttgggcacccactcaccctagaataaacttaacaggtgtcccgtggtaacctgagggcctcagctttgcttatgagggagggactgggaaccagcagctcagggccgcttcctctggcagcccccacctgacccctctgccttctcccatttctccttcatcttccaagggtcagcagactgcc

SEQ ID NO: 157428 - DNA, 551 bp, Homo sapiens
tcaccttcatcatcgccctggccctgctgatgtccaccctcttctgctgtctccccagcacccggggcagctgctggccctcctccaggactctcttctgcagagagcagaaacacagccacatctcttccattgcctgagtgccctctaattaagccaatccctgcagccctttctgcccttgggcccccggacttccacaatgaacagggtaaggggttacggacttagactggcctcctttgggaaatcacatgccagcgggacttgcaagccacaaccgagatggccagcctgggttcaagaattacacgcttggatgacaggcttgcacttgcccttgggatagcatagctaaaactgttggtggctaggggagcagacacaaactacttgaacatgacaagatgggggaagctcctgttcctcttattccaatgttcttggtttttctttatataacttgatgaaagtagtggcagtaggggatggcggtggagaatagaactggaattccattctttttgcaattttaaaaaaaaaaaaaaaaa

SEQ ID NO: 157429 - DNA, 954 bp, Homo sapiens
gagattggagtgaaccacacccacttattgtttcatacagaagttcgttggctttctcaaggaaaagtattgagcagagtatatgaactcaggaacgagatttacatttttctcgttgaaaagcaatctcatttggcaaatatttttgaagacgacatttgggtaacaaaattggcatatttaagtgatatttttggcattcttaatgaattaagcctgaaaatgcaggggaaaaacaatgatatatttcagtatcttgaacatattctaggattccaaaagacgttattattgtggcaagcaagacttaaaagtaaccgccctagctactatatgtttccaacattattgcaacacatcgaagagaacattattaatgaagactgcttaaaagaaataaaattagagatattgttgcatctcacttctttgtctcaaacttttaattattactttccggaagagaaatttgaatcattaaaggaaaatatttggatgaaagatccatttgcttttcaaaacccagaatcaataattgagttaaacttggagcctgaagaagagaatgaattattgcagctcagttcatcattcacactaaagaattattataagatattaagtttatcagcattttggattaagattaaagatgactttccactgctaagtaggaagagtatattgctgttactaccattcacaactacatatttgtgtgaactaggattttcaatcttgacacggttaaaaacaaagaagagaaataggctcaatagtgcaccagatatgcgggtagcattatcttcatgtgttcctgactggaaggaacttatgaacagacaagcacacccatcacattaaatacaaactttacaaaattctgtgtatagccagggtgtggtggcttacgcctgttaatcccagcagtggggagaccgaggtgggccagtc

SEQ ID NO: 157430 - DNA, 406 bp, Homo sapiens
  misc_feature (1)...(406): n = a,t,c or g
naaggattaccgtttttggaaagnncgccacgaggggaaggagggatcccggngccggaaatgcttttttgcgctacgagccagtgccagctgacaggaggtggggcctggctgagttccactgcccgaagtgtcggcacaacttccgatggggtccccgtccccctgctacgggtgcggcttccccgtgtatccaacacggatcctccccccgcgctgggaccggtacccggatcgccgcagaacccacactcactcctgctcagctgccgactgctacaaccggcgagagccccacgtgcctgggacatcctgtgctcaccccaagagccggaagcagaaccacctgcccaaagtgctccaccccagcaaccctcacattatcaggggctccactgtggccacg

SEQ ID NO: 157431 - DNA, 2335 bp, Homo sapiens
tgttctggcttcctgactttcctgccctgccaggcgggctttgggcggccagacggagaatactggctgggccttgaacccgtgtatcagctgaccagccgtggggaccatgagctgctggttctcctggaggactgggggggccgtggagcacgtgcccactatgatggcttctccctggaacccgagagcgaccactaccgcctgcggcttggccagtaccatggtgatgctggagactctctttcctggcacaatgacaagcccttcagcaccgtggatagggaccgagactcctattctggtaaggagaactcctattctggtgagaggataggggaggcgggactcctgttctggtgagggaatgaaaggaggtagggtaggtaagacgcccctctggtaagtataaggataagcaagcttttattccggtcaagagaacaaaggtcaggacttttatcctggtggggggatggggagtccagattccttctctgatgaggcaaaaaaagaatcaagactcctgttcaagtaaagggcagagggtgagagctagtactcttattctagaaaggaagtagatccttttctttgataaaggaatgcccgcgcagactcctagtttgcagaaaaggtggggaaagatgtgactttgtcctttggtacggagataggggaaggcaattaaggctattactctgaagcaaagttggggggccagggctcctatttttttgctgaggagatggaagatcagggcttgtattcaataagaatggaaggggccaggggatgccttgcaaaaagccttgcactgtgaggtgcaggtagaggcttttattctggtgagaggacatggactctctctctcccctcaggtaactgtgctcctgtaccagcggggaggctggtggtaccatgcctgtgccccactccaacctcaacggtgtgtggcaccacggcggccactaccgaagccgctaccaggatggtgtctactgggctgaatttcgggggggggcatattctcttaagaaggccgccatgctcattccggcccctgaaagctgtgaactctgtgttccctctgtcccctaaggccctagaagacattggtcagcagggagccccaagttgttctggccacaccttctttgtgggtcaatgccaatgtgtcccacagaacttcccactgtggatctgtgaccctggggcgctgaaaatgggacccaggaatccccccccgccatatcttgggcctcaaaaggctccccaggtcctttcatatttccggtttgagctcatatcttactaataacacaaagtagccacagaccgtgtctggtttgtatctgcacctggcaggggtcactccctgggcccgccctccttcgtcctccacctcctcctcttcctcctcctcctccttcaggtcctccaggatgaggttgtccaggtcttccaggaggccaccctggctcaagcaggaagccacagtggagccactgctaatgtgaggtgttgctggggtggagcactttgggcaggtggttctgcttccggctcttggggtgagcacaggatgtcccaggcacgtggggctctcgccggttgtagcagtcggcagctgagcaggagtgagtgtgggtgctgcggcgatccgggtcccggtcccagcgcggggggaggatccgtgttggatacacggggaagccgcacccgtagcagggggacggggaccccatctgtgcccagccccggaagttgtgccgacacttcgggcagtggaactcagccaggccccacatcttgtcagctggcactggctcgtagcgcttccggcatttccggcaccgggatacctccttccgctggggcacgcggcgccaccagacgtggtcgcaggaggagcaggcaaactgccggtccacagcagggataaggtcgtcctgggcacgttgaaacatgcgtaggttggcttctgtcagtggcaggagggaggtcgccactgcctgaatgtcccggtcctgcttcatatcttctggtggatcctgggcatccagatcgttacttagttcttggccatctttttgctttaccccgtacacgatggagcgccccactcccgtgtggtcgctgccgaatttcctcatcagagcccccgccttcttggaggataccttcccatgaaacttctcccgaaggcgccggacgctcttctccagctccacaccttcctgagacatggtggcggcggcgcagttccccgcgagggtccgcactgcgcggctcagccgcccccctacctgggtgcgcccgtcggtccagcagc

SEQ ID NO: 157432 - DNA, 1728 bp, Homo sapiens
gcgcgagcgaaaacaaacagctggggctgcgagcgcccccgccccggccccgagagcacgccggcccagtcccccacctggggcgcccgtctgcccaccatgaggaagatccgcgccaatgccatcgccatcctgaccgtagcctggatcctgggcactttctactacttatggcaggacaaccgagcccacgcagcatcctccggcggccggggcgcgcagagggcaggcaggaggtcggagcagctccgcgaggaccgcaccatcccgctcattgtgacaggaactccctcgaaaggctttgatgagaaggcctacctgtcggccaagcagctgaaggctggagaggacccctacagacagcacgccttcaaccagctggagagtgacaagctgagcccagaccggcccatccgggacacccgccattacagctgcccatctgtgtcctactcctcggacctgccagccaccagcgtcatcatcaccttccacaatgaggcccgttccaccctgctgcgcacagtgaagagtgtcctgaaccgaactcctgccaacttgatccaggagatcattttagtggatgacttcagctcagatccggaagactgtctactcctgaccaggatccccaaggtcaagtgcctgcgcaatgatcggcgggaagggctgatccggtcccgagtgcgtggggcggacgtggctgcagctaccgttctcacctttctggatagccactgcgaagtgaacaccgagtggctgccgcccatgctgcagcgggtgaaggaggaccacacccgcgtggtgagtcccatcattgatgtcatcagtctggataattttgcctaccttgcagcatctgctgaccttcgtggagggttcgactggagcctgcatttcaagtgggagcagatccctcttgagcagaagatgacccggacagaccccaccaggcccataaggacgcctgtcatagctggaggaatcttcgtgatcgacaagtcctggtttaaccacttgggaaagtatgatgcccagatggacatctgggggggagagaattttgagctctccttcagggtgtggatgtgtggtggcagtctggagatcgtcccctgcagccgggtgggccatgtcttcaggaaacggcacccctacaacttccctgagggtaatgccctcacctacatcaggaatactaagcgcactgcagaagtgtggatggatgaatacaagcaatactactatgaggcccggccctcggccatcgggaaggccttcggcagtgtggctacgcggatagagcagaggaagaagatgaactgcaagtccttccgctggtacctggagaacgtctacccagagctcacggtccccgtgaaggaagcactccccggcatcattaagcagggggtgaactgcttagaatctcagggccagaacacagctggtgacttcctgcttggaatggggatctgcagagggtctgccaagaacccgcagcccgcccaggcatggctgttcagtgaccacctcatccagcagcaggggaagtgcctggctgccacctccaccttaatgtcctcccctggatccccagtcatactgcagatgtgcaaccctagagaaggcaagcaggtgagtctccttgcctctggcccagaggcccagcagcccgaggggccatgcctcagggtggcagaccttggcaggagagcccctgattga

SEQ ID NO: 157433 - DNA, 1598 bp, Homo sapiens
atgagaaggctcatgaagggtgatgaagttttacatgtggtatatgacataatctaccaccccaaaaaagaggccagcaaaatcaacattattcatcaaggttttggatttggatttgtgttctgggaggtgatgcggggagtggaccacacccgcgtggtgagtcccatcattgatgtcatcagtctggataattttgcctaccttgcagcatctgctgaccttcgtggagggttcgactggagcctgcatttcaagtgggagcagatccctcttgagcagaagatgacccggacagaccccaccaggcccataaggacgcctgtcatagctggaggaatcttcgtgatcgacaagtcctggtttaaccacttgggaaagtatgatgcccagatggacatctgggggggagagaattttgagctctccttcagggtgtggatgtgtggtggcagtctggagatcgtcccctgcagccgggtgggccatgtcttcaggaaacggcacccctacaacttccctgagggtaatgccctcacctacatcaggaatactaagcgcactgcagaagtgtggatggatgaatacaagcaatactactatgaggcccggccctcggccatcgggaaggccttcggcagcacaaccccagcaaaatacgaagtgttgaatgtagaggaaactgaggctcagatagctggtgacgagggccgtcaaccagtggccattgtggtgggtgtacctgaggaaggccaaagcccaagccctgcctcctcctacagtgtggctacgcggatagagcagaggaagaagatgaactgcaagtccttccgctggtacctggagaacgtctacccagagctcacggtccccgtgaaggaagcactccccggcatcattaagcagggggtgaactgcttagaatctcagggccagaacacagctggtgacttcctgcttggaatggggatctgcagagggtctgccaagaacccgcagcccgcccaggcatggctgttcagtgaccacctcatccagcagcaggggaagtgcctggctgccacctccaccttaatgtcctcccctggatccccagtcatactgcagatgtgcaaccctagagaaggcaagcagaaatggaggagaaaaggatctttcatccagcattcagtcagtggcctctgcctggagacaaagcctgcccagctggtgaccagcaagtgtcaggctgacgcccaggcccagcagtggcagctgttgccacacacatgacggtagccctggggcctcctgtaccttttgcatgagacttcgggaccggaagggggttagggtgggggagtgcaaagtgggctgttcccatctcctcacatttctgccaggaccatcagcaaatacccaccatgacacacgttctccaaagcttgttctaggagggcgcaggcgggcacgccccgatgccctcagtgctgtcctggccttgccccgggagaggagatggtcagggtgctggactgttgctgggtagagactgagtaggtgcccctggccctttgtcctctcccttggcgcttcttggggctgggacaatagtgtgg

SEQ ID NO: 157434 - DNA, 373 bp, Homo sapiens; identical to SEQ ID NO: 65363

SEQ ID NO: 157435 - DNA, 804 bp, Homo sapiens
atgcctattagacatccaagtggagatataaagttggtaattggatacggagaagaaagggttgaagaaagttttaaaactttgttttggtccatattcggcttatctgaagtaatctcagtggtgctgaaatacgaccacaaattcatcgagaacattggctacgttctctacggcgtttataacgtcaccatggtggtagtgttgctcaacatgctaatagccatgataaacaactcctatcaggaaattgaggaggatgcagatgtggaatggaagttcgcccgagcaaaactctggctgtcttactttgatgaaggaagaactctacctgctccttttaatctagtgccaagtcctaaatcattttattatctcataatgagaatcaagatgtgcctcataaaactctgcaaatctaaggccaaaagctgtgaaaatgaccttgaaatgggcatgctgaattccaaattcaagaagactcgctaccaggctggcatgaggaattctgaaaatctgacagcaaataacactttgagcaagcccaccagataccagaaaatcatgaaacggctcataaaaagatacgtcctgaaagcccaggtggacagagaaaatgacgaagtcaatgaaggcgagctgaaggaaatcaagcaagatatctccagcctgcgctatgagcttcttgaggaaaaatctcaagctactggtgagctggcagacctgattcaacaactcagcgagaagtttggaaagaacttaaacaaagaccacctgagggtgaacaagggcaaagacatttag

SEQ ID NO: 157436 - DNA, 542 bp, Homo sapiens
agccagtcctttggatttaagcagagcggcttgaggctggggcaccgaccatctgcatgccaggacgctggaccttcatcttgaggtcggagccccacttctgcccgctgaggcccgcggcccaggagccacgtatcggggcggatagaggccctggccggaacgaagctcccgccccagatctccctgggctcccacggctcctcaggtctggttccggcgttttgcccggcaagggtcttggcgccaagtggaaaggtatgctttcagggcgccccagcccttgctcgggagccctcggtccccttggcccagagaatcccttcccctggcaggttcttacggagagctggccttcccggcagctggcttagctgagaaggcggtgagagtcgcgtcagcagtttggaggagaaagtgcgggttgattattgacccacgccttctttcttcaaatgccacatccgaccgggcgggtttgaagagaaaatgccgccgaacggatttctgcggctggctctcacctcctacgaaacgaataa

SEQ ID NO: 157437 - DNA, 358 bp, Homo sapiens
atttaattaagaaagcagttgctgttcgaaagcatcttgagaggaacagaaaggtaagctaataaataaaacctggtgctaagtaggactgcttgtactaaattttttcggtaaaatgtaatgcatctggtttgaattatccaaggcttagtacacaaaccagtgtagtgctgctttgaagttcaaattctatccaaagagattttcattatagaaagtgcatggtagctctacattctcttattaatgtttgataatgttaggtcattttgggtggttttcttgaattgcaccaaattttatttttaggataaggatgctaaattccgtctgattctaatagagagccggattcacg

SEQ ID NO: 157438 - DNA, 488 bp, Homo sapiens
ggcggggcccaggactgctgctgctgaccgccttgataggctacaccgtgaagaatgcgtggaagaacaacgtcttcttctcttggtcctatttttctgggtggctggccttacccttctcaattctcgcgggtaaactggacagcgggaagagggtggaggagactgcccagaagaccctcaccccagaggctccccagctgccctcccaggaaaccccggggacctctcggggactccccaacacactaacgactcccgcagacccggcaaagacccccttggagccccaaaccccagtccccggggccctcccggccatccgccccagggcccaccttcctttccctggtccgcacccccgtccccccaggcttctgctttctgctggcagacatgatcatgcagagcggcgacgccatcagtggattccccgtgtgtctgtgactgcagcctgcctggggcagaataaaggaacggcttttttt

SEQ ID NO: 157439 - DNA, 908 bp, Homo sapiens
atggagctctgccggtccctggccctgctggggggctccctgggcctgatgttctgcctgattgctttgagcaccgatttctggtttgaggctgtgggtcccacccactcagctcactcgggcctctggccaacagggcatggggacatcatatcaggctacatccacgtgacgcagaccttcagcattatggctgttctgtgggccctggtgtccgtgagcttcctggtcctgtcctgcttcccctcactgttccccccaggccacggcccgcttgtctcaaccaccgcagcctttgctgcagccatctccatggtggtggccatggcggtgtacaccagcgagcgcctcagtggcatgggggtgaagcggagcctccagagtgggggcattctgctcagcctcgtggccaacgtcctcatggtgctctccacggccaccaactactggacccgccaacaagagggccacagtggcctgtggcaggaatgcaaccacggcatctgctccagcatcccctgccagaccacgctggcggtgactgtggcgtgcatggtgctggcggtgggtgtcggcgtggtgggcatggtgatgggactgcggattcggtgcgacgagggcgagtcgctgcggggccagaccacgagcgccttcctcttcctcggcggactgctgctgctgaccgccttgataggctacaccgtgaagaatgcgtggaagaacaacgtcttcttctcttggtcctatttttctgggtggctggccttacccttctcaattctcgcgggcttctgctttctgctggcagacatgatcatgcagagcaccgacgccatcagtggattccccgtgtgtctgtgactgcagcctgcctggggcagaataaaggaacggctttttttagcaaa

SEQ ID NO: 157440 - DNA, 846 bp, Homo sapiens
aaaccagcctcatgtgacaaagcgcaggacccctcactgccccaactgcttgctgttctctctttcttgggctctaaggacccaggagtctgggtgcacagcctccttctctctgagattcaagagtctgatcagcagcctcttcctcctccaggacccagaagccctgagcttatccccatggagctctgccggtccctggccctgctggggggctcccctgggcctgatgttctgccctgattgctttgagcaccattttctggtttagggctgggggtcccacccacttagcttcactcgggcctctggccaacagggcatggggacatcatatcagggctacatccacgttgacgcagaccttcagcattatggctagatctgtggggccctgggtgtccgtgagctttcctgggtccttgtcctgcttcccctcacttgttccccccaggccacggcccgcttgtctaaaccaaccgaagcctttgctgcagccatctccatggtggtggccatggcggtgtacaccagcgagcggtgggaccagcctccacacccccagatccagaccttcttctcctggtccttctacctgggctgggtctcagctatcctcttgctctgtacaggtgccctgagcctgggtgctcactgtggcggtccccgtcctggctatgaaaccttgtgagcagaaggcaagagcggcaagatgagttttgagcgttgtattccaaaggcctcatctggagcctcgggaaagtctggtcctacatctgcccgcccttccagcccttccccagcccctcctcttgtttcttcattcattcaacaaaatttggctgg

SEQ ID NO: 157441 - DNA, 841 bp, Homo sapiens
atgtcgagcaaaagaacaaagaccaagaccaagaagcgccctcagcgtgcaacatccaatgtgtttgctatgtttgaccagtcacagattcaggagttcaaagaggccttcaacatgattgatcagaacagagatggtttcatcgacaaggaagatttgcatgatatgcttgcttcattggggaagaatccaactgatgagtatctagatgccatgatgaatgagggctccaggccccatcaatttcccccaatggttctcacccatgttggtgagaagtttaaatgccccagatccctgaaaatgtcatcagaaatgcctttgcttgctttgatgaaggaggcacctggccccatacaggaagattacttgagagagctgctgccaaccatgggggatcggtttacaaatgaggaagtggatgagctgcacagagaagcccctattgataaaaaggggaatttcaattacatcgggttcacacgcatccttgaacatggaagccaaagacaaagatgactgaaataacttcaaattcccagccaaacgttcccttgttgccactttgggtattctgagattttctcttgcatgcccttagctttacagcttttgcatttcctgttggatttatttccacgccatttggggcatatgtatctttataatcagcctggaaccgggcctttctattaatatcattttcagaataaaaaataggataatttaaccaaccagcccttctcccccaataactgtggtctatacagagtcaatatattttttcagagaaagttattcgctcgattttttttgaatcataattgggctttatgataaa

SEQ ID NO: 157442 - DNA, 1063 bp, Homo sapiens
aggaagtgtcggcgccgccactgtccggccacagcctaacgctcttcgctgtcgtttgcggtctcggcagggcgcccccgttctggtgtttggcgtcggaattaaacaaccaccatgtcgagcaaaaaggcaaagaccaagaccaccaagaagcggccctcagcgtgcaacatccaatgtgtttgccatgtttgaccagtcacagattcaggagttcaaagaggccttcaacatgattgatcagaacagagatggcttcatcgacaaggaagatttgcatgatatgcttgcttctcctagggaagaatccccactgatgcataccttgatgccatgatgaatgaggccccagggccccatcaattccaccatgttccctgaccatgtttgggtgagaagtttaaatcgcacagatcccctgaagatgtcatccagcaaacggcctttgcttttgctctgatgaagaagcaaccgggcacccatttcaggaagatttaccttaagagagctgctgaccaacccatggggggatccggtttccggatggagggaagtggatgaacctgtaccagagaaagcaccttattggaccaaaaaaaggggaattttcaaattacatcggagttcaccacggcatcctaactggaaggcccccaaagcacaaagatgacttgaaagaacttttagcttaaaatcttcccagttacaattgtcttactctcttttacttctcagacactttcccccaccctcaatagaaccgtgttgcatggcactttagtttcacaggcttttgccctcttccttttttgatgtatttattcccagaccttttctgccactttagcacttggtataatcagactgggaaatgggggatgagggtggtaaattgtattgaaaaagatcgcgaataaaaaatccacaaatgtgaaagcccagaaaaatatattcgtatttcctgggttttgctgggatttttacatttttatataataaaaatgttattttgaaataaagattatgctgactcaaatgcaatgtaaaaaaaaaaaaaaagggc

SEQ ID NO: 157443 - DNA, 1323 bp, Homo sapiens
  misc_feature (1)...(1323): n = a,t,c or g
tgatatgtagtcccagctgctactggggaggctgagcaggaggattgattgagcccaggagtttgaggctgcagtgagccttaatggcaccatcacactccagcctgggcaacagagtgagaccccctttcaaacttacaaaacctggccgggcgcagtggctcacccctgtaatcccagcactttgagagaccgaggcgggcggatcacgaggtcaggagatcgagaccatcctggctaacacggtgaaaccccatctctactaaaaatacaaaaaattaactgggcgtggtggcaggcgcctgtggtcccagctactcgggaggctgaggcaggagaatagcgtgaacccaggaggcggagcttgcagtgagccaagatagcaccactgcactccagcctgggtgacagaagcgagactccgtctcaaaaaaaaaaaaaaaattcatgatgntgntgctcccagaaggttggntggntgtgtttacataggactctaacttgtgtgnactacagtngttcaccagggccagtgattcaccccagtgtgtggccaaccctgaattttttgccagaattttttcatttgtgcctcccttattaatttaaatttccacctaaaaattttttgcttccttttttccaaaagccctttcttaaatttatttttgagccccataagatctttaaaaagcctccaatcatttaaaggaagaaatcagagttgctataaaattcagtaaaaagctcatagccaaacggctgtgctcagatggaaagtctgagctgaggttggtctcttgccaaaccgtggctgttgtgtgttgttctncatgtcttcgagttcattttttttcatnctgcctattctggcatcagctcacttgaggagtccctcagccttcttgtatttaaggcatccgccttagactttgtggctctaaagtacctgtctgttgagatttcaagtctcttgtcaccatcctcacacatgacaacaaaacccataatgcataagtggcctttttgnaccaagactttgnaaactgatctctcccccgtgaaggagttgagcacattagcaacaatgtacattaatttnggnttttcattttcatgttttattttgnnaatattatctgatgtttggagcttgagtatacagactgtaaatatagttctngtatttgtactaattctgattcttttggtgtatagccttagatgtgcaatgcagacactatctaactgtgtgtggtaacctngcgtcacggagctgttagtgaacgaggtaaaaataataaaggtacagncagtgcatca

SEQ ID NO: 157444 - DNA, 1787 bp, Homo sapiens; identical to SEQ ID NO: 145236

SEQ ID NO: 157445 - DNA, 1553 bp, Homo sapiens; identical to SEQ ID NO: 145237

SEQ ID NO: 157446 - DNA, 1862 bp, Homo sapiens; identical to SEQ ID NO: 145238

SEQ ID NO: 157447 - DNA, 1295 bp, Homo sapiens; identical to SEQ ID NO: 149047

SEQ ID NO: 157448 - DNA, 1149 bp, Homo sapiens; identical to SEQ ID NO: 145240

SEQ ID NO: 157449 - DNA, 442 bp, Homo sapiens
cgtagacttcgtactgctatgaagctccggagtcaccgaccagaccagacttggcatgatcaacaatataacaaagctcatttgggcgcagccctacaggccaatcctttaggaggtgctgctcatgctaaaggaatcgtgcttgaaaaagtaagagttgaagccacacagccaaagatctgccattatgaaggtgtaagggtccagctgatcaagaatggcaagaaaatcacagcctttgtacccaatgacggttgcttgaactttattgaggaaaatgatgaagttctggttgctggatttggtcgcaaaggtcatgctgttggtgatattcctggagtccgctttaaggttgtcaaagtagccaatgtttttattttggccctatacaaaggcaagaaggaaagaccaagatcataaatattaatggtgaaaacactgt

SEQ ID NO: 157450 - DNA, 5789 bp, Homo sapiens
gggatgatgaactttcgttttattgatttttcagtacccaagtgtggcactgtaaggctgccacatacagcaagtgacatgacaccaaaaggaccttccgagagtattattcttactttggatggaagacatcgcttaaacaaaaaacatttaaagatgctcccttgctttttataattcctaactgtaaaatataattttagtacagaacaaacaaattctccttggttggtcacatcattcattattgaaagggaaacttagtatcaaaagaaacaaaacactgaaataaataactaagtaatttactgaaaggtagttttgttgcattgcacacaactgaccgcagagaattctaaagctgatttttttcttaaaggatgaaaaactcatttgccatttttagtttcttgctaagtgatacatgctccttataaggaaaactactctgtgtaggcctgagtttaaaatgtaaatatctgtttatccagagtttgttaatctagagtacacaggtgtggaaaactggtggtgaaaagagggacctacccagccttcagggtggctgggcaggggccccatgttactggcctcagccaccagcagcgtcttcactccgcccaggtcagaaagcactgcctaaagccggagcttaggatgaacatgggcaaaaagcactggtacagttccatgtgtttctcttctactgtaatgtccccagagggattgtgaaatgtctgagaacatcccctggaggaggtttaaaagtgagaagcccatgatatggctatggaacataagcacttattgctggcatgtttctaccaagattgaacacaatgcttttctttgataaagctttgggcaagttcctagtccaatttcttctgctacaagtacacagaatttactgccttcttggtcagctcttggtatgaattcttctcttgaattaagatcctccctggcttgtctctcacccaccctgtatctcttagagaaagcacctggctgtcttcacctacgcgagaccttctctggaatgtgatttgctgcgactgcagacatctccatacggcataatgaactcccttgagtggtctctttttaaacaattttgggtgaggggcaggtttcttggtttgtttcaaaactcatcttgaaaataatctagacggaaaaatccgaagtgaaattctggtgcaacaaatattttaagattgaagtttggttacttctcttgtccatcttttcgtgcccacaaatggaaactacattcctgatttaagaggatgcttctgtctgtatccttttttgaactgcattgttctcacaaggaccagcaaactttttctgtaaatattttagtaaatattctaggctttacaggccacatatagtgtctgctgcatattcttcaacgtttttttcttaggcaactgtttaaaaatggcaaatccactactacctctcagctggagcaatgaggttttctcagcccttgtttcaggatcctcaggtatgtgactaactcttctatgcccagagctggaaggcggggtcccctaactccctgggtgcccacctgcccacttcaaccatttgtggccccttcctttcctttcttccctctctgctgctgacaccagtggctccatcgccagctccctgcagcctccaccaataatccatggctcctccaggaagtgtcgcaggcaggtggccaagaccaacttattaggtagccagaagctcacccctttcttaacaactttgaccacgaagcgcaaatacgatgcaggtaaatccagaggcagagcctgggtccccaggctgctggtaacacgctttgaaatccaggtgagggagccatgcccccacagctcttgcctcaaggatcagatgcattttaccttccagagacgcaggttaagctgcacctgaggcagtttgagccacaactgggacagaattcccttggtcttctcttctgatccctcagcagaactgcccctaatgctcagttcatggcaatacaggccttttctctcctgtttctccaaactctcccagcctctgcccagtacctagttccaaagccacttttataatatcctcagttatctgttatagcaacaaccccacttctgggtactaatctgctaccaactacaggaatttaactgttctggagttagggaacagcacacacagacactcacacaaaacaaactccacctaaaaaaactgtacgagaattccccaaacttctcaactaaataaataggtgaaaaaacaccaatctcacatatgccaatccaattgtcctttttagattttggcttaaattgtcgaattttttccttcaaaatgtgaatttatttcctgtattggatgcagactcttcccttctggatttacagtggtgctgccagcaacagcctcagtcaatgcggttaggaagaggactcggcaggctgtgcatggggtctcccagtacgattaaaagctgagatgacttttaattaaggggggtgggggaaacaccaattggaagctggaagaaactgaggcacgattaagcagaaacactgaggaatactgagcaagaagtgggcatgtgctctagttccaataaaaccgaaactggtgaaactaggaatttccaattctttcaaaaccacagtgttctaatgccactgaaatatggaataaggagcgtaattacctgcggtcaggaaaagataacagtaacgaggatttttctaaataaaatgtaccagtaaattctgaagtgtgtgtttttaaagaaccagcattgcctcccctcacgctggtttcttgggatttttcacacactcacacaaagctgtagtcgatagttcactatcacttttataaatggttatctcctggtgcccatgtttctctgttttggatataaatggtttaaaaaatttaaatttgcaaagaaaacatatacagtaacagacctgaacaataaataaaaaaaaaaaatcaccctcttcaggttagagctttcaagatagagaaaaaagaggattatcatttcaggcagtaagttttttggttctatgaaagcatcactattcagtcccctctccactgacagaatgcatctttccacctccctccagtatcaaagtgcatgtgtttaaatttaacattccttagagaaaccccagaaatctcatttatttttggcagatatcctgtgcagcaaaaatcaagtgaatttccctcttccccactcctcaatttaatgctgtactcaaaatggctaaacgcaatacttctagacagcagggcttataaacaatgcattttttttttttttttgagacggagtctcactctgtcgcccaggctggagtgcagtggtgtgatctcggctcactgcaagctctgcctcccaggttcatgccattctcctgcctcagcctcctgagtagttggactaacgggcgcccgccaccacacccagctaattttttgtatttttagtagagacggggtttcaccgtgttagccaggatggtctcgatctcctgacctcatgatccgcccgcctcggcctcccaaagtgctgggattacaggcgtgagccaccgcgctcggcctgcattttgtttttgtttggaggaacaaaaaagggaaagaaaaaacaaaaccacaggaaaataaagaggagaaaccctgaggcaaaaatggcttttccttttgagtcttcgtggagctgtgagctggatcacaaggtccccggggcattctgggcgggaaggccctcctccatccagagggcggcggccgagctgctccggggagtgcgcctgtggatgcgccgcagccgcagcaggtacagcaggatggccagcagcaccaccaggaagcagccagagaacaggtagtggttgtagacaaaggaaacgccccgccagtgggtgtgactggctcggaaggcctcctgctggatgtctcttaacggtagaaagcgggtcctgtagaggatggctccaagggtccactgaacctccttgtcgtaaacttgcaaggcagtctttaagcttttatagttgacaggaaacgaaaagcccctatgaaacacctcaaacatccaggccgatttgaagcactgatacttaagcctgtggaggtcagcatgagaggcgtacagtcctcggtcaaagcgttcccgcaaaatggaccactttgttgcacaataatcctttgcagctttagtaaatttagcagcattgtagtctccccccattcgtaacacatcctcggtgcagtagtagaattcggagaagccatagaattcactgttctggaagtgaattgggggctggtagaccccattgagggaagtctgggtctcgtttgttttattcatgaaaggctggatagtctctcgacacaggtcaaagtctccagtccctcgtaggtatatggtttgtccattttgctggatttcatctttaatgtctaggggtaggcaggggtccaagtacggcatatcaggagtcagaccagtctgtttacccaggagcctgttcttttgaatggtgttggcaaatattctgtcttcgtatctctgtcgagcagcattgccaccaaacccaagaaacgtggccacatagactcgatacacatgctcagtttggtgaacatcacatcccaagttaaattcagctaacaagtttttagctacttcttcctgctgtgaggacgcaaagcttacagttttggggacttcgtacgctatctgagtcgacacgccgcccatgtcgagaatgcccgctgtccttttacggacaatggcttcgctgctttcacttccaggaatgttaacttccacaacggcctcatcatcatcttcaatatgctcaaatcgtccaaggacaaaattaatgccaatccaagcatacacaccttcctgtttcccagaaattacttctgcatgagagtcagaaaacagaaagtcaaagtgcacggggatatcggtcagaaggtcttccagaatagctttctgctggctttcggggaggattctcattccagccgtgcagagaatgtagagaggtgtctctttgtgttttgcccgtggcacatgctctgcagcaaagttcaaaagtggagaaatgtaatcactgactttctctggagaggtagcaaattctgaaatgcccggttttattttcatgaccactggctttcggtttttatccctcatttgcctgatatccaacagatcatgtggattgccattatgccttggccagcagtaaacaaatactcgagacccactgctaccacagtccaccacgatcccatagttcacattggggttattggtgtctgtagcttcaatgtcggtaactcgtgccaggtacctttgaaatttcttgtctctggttagtcgcccatacttatttcggattatgacaacagaaaaatataaaagtgaaacagcagcagccaggacactaatgaccataatttggcgtaaattggtattcagaattcgaggacaccctactggagatatgctaaaatgccaagaagcaggaaaaagacaggagatgccaatcctccccatactgaaaggtcagcaacaaggcaatgctctgggattcagtccttctcacaaacaattatagaaataatgctggggtcctcacggagttagagccctcctgcttggccggccggggaccccgggagcgggggaccaccagtgggcagcatcacggccagccggctcgtgc

SEQ ID NO: 157451 - DNA, 1997 bp, Homo sapiens
gtggaaacctcttcagcatttgcttggaatcagtaagctaaaaacaaaatcaaccgggaccccagcttttcggaacagcagagacacagagggcagtcatgagtgaggtcaccaagaattccctggagaaaatccttccacagctgaaatgccatttcacctggaacttattcaaggaagacagtgtctcaagggatctagaagatagagtgtgtaaccagattgaatttttaaacactgagttcaaagctacaatgtacaacttgttggcctacataaaacacctagatggtaacaacgaggcagccctggaatgcttacggcaagctgaagagttaatccagcaagaacatgctgaccaagcagaaatcagaagtctagtcacttggggaaactacgcctgggtctactatcacttgggcagactctcagatgctcagatttatgtagataaggtgaaacaaacctgcaagaaattttcaaatccatacagtattgagtattctgaacttgactgtgaggaagggtggacacaactgaagtgtggaagaaatgaaagggcgaaggtgtgttttgagaaggctctggaagaaaagcccaacaacccagaattctcctctggactggcaattgcgatgtaccatctggataatcacccagagaaacagttctctactgatgttttgaagcaggccattgagctgagtcctgataaccaatacgtcaaggttctcttgggcctgaaactgcagaagatgaataaagaagctgaaggagagcagtttgttgaagaagccttggaaaagtctccttgccaaacagatgtcctccgcagtgcagccaaattttacagaagaaaaggtgacctagacaaagctattgaactgtttcaacgggtgttggaatccacaccaaacaatggctacctctatcaccagattgggtgctgctacaaggcaaaagtaagacaaatgcagaatacaggagaatctgaagctagtggaaataaagagatgattgaagcactaaagcaatatgctatggactattcgaataaagctcttgagaagggactgaatcctctgaatgcatactccgatctcgctgagttcctggagacggaatgttatcagacaccattcaataaggaagtccctgatgctgaaaagcaacaatcccatcagcgctactgcaaccttcagaaatataatgggaagtctgaagacactgctgtgcaacatggtttagagggtttgtccataagcaaaaaatcaactgacaaggaagagatcaaagaccaaccacagaatgtatccgaaaatctgcttccacaaaatgcaccaaattattggtatcttcaaggattaattcataagcagaatggagatctgctgcaagcagccaaatgttatgagaaggaactgggccgcctgctaagggatgccccttcaggcataggcagtattttcctgtcagcatctgagcttgaggatggtagtgaggaaatgggccagggcgcagtcagctccagtcccagagagctcctctctaactcagagcaactgaactgagacagaggaggaaaacagagcatcagaagcctgcagtggtggttgtgacgggtaggaggataggaagacagggggccccaacctgggattgctgagcagggaagctttgcatgttgctctaaggtacatttttaaagagttgttttttggccgggcgcagtggctcatgcctgtaatcccagcactttgggaggccgaggtgggcggatcacgaggtctggagtttgagaccatcctggctaacacagtgaaatcccgtctctactaaaaatacaaaaaattagccaggcgtggtggctggcacctgtagtcccagctacttgggaggctgaggcaggagaatggcgtgaacctggaaggaagaggttgcagtgagccaagattgcgccccctgcactccagcctgggcttcagagcaagactcgg

SEQ ID NO: 157452 - DNA, 3943 bp, Homo sapiens; identical to SEQ ID NO: 147867

SEQ ID NO: 157453 - DNA, 4341 bp, Homo sapiens
gcaccgcgcgagcttggctgcttctggggcctgtgtggccctgtgtgtcggaaagatggagcaagaagccgagcccgaggggcggccgcgacccctctgaccgagatcctgctgctttcgcagccaggagcaccgtccctccccggattagtgcgtacgagcgcccagtgccctggcccggagagtggaatgatccccgaggcccagggcgtcgtgcttccgcagtagtcagtccccgtgaaggaaactggggagtcttgagggacccccgactccaagcgcgaaaaccccggatggtgaggagcaggcaaatgtgcaataccaacatgtctgtacctactgatggtgctgtaaccacctcacagattccagcttcggaacaagagaccctggttagaccaaagccattgcttttgaagttattaaagtctgttggtgcacaaaaagacacttatactatgaaagaggttcttttttatcttggccagtatattatgactaaacgattatatgatgagaagcaacaacatattgtatattgttcaaatgatcttctaggagatttgtttggcgtgccaagcttctctgtgaaagagcacaggaaaatatataccatgatctacaggaacttggtagtagtcaatcagcaggaatcatcggactcaggtacatctgtgagtgagaacaggtgtcaccttgaaggtgggagtgatcaaaaggaccttgtacaagagcttcaggaagagaaaccttcatcttcacatttggtttctagaccatctacctcatctagaaggagagcaattagtgagacagaagaaaattcagatgaattatctggtgaacgacaaagaaaacgccacaaatctgatagtatttccctttcctttgatgaaagcctggctctgtgtgtaataagggagatatgttgtgaaagaagcagtagcagtgaatctacagggacgccatcgaatccggatcttgatgctggtgtaagtgaacattcaggtgattggttggatcaggattcagtttcagatcagtttagtgtagaatttgaagttgaatctctcgactcagaagattatagccttagtgaagaaggacaagaactctcagatgaagatgatgaggtatatcaagttactgtgtatcaggcaggggagagtgatacagattcatttgaagaagatcctgaaatttccttagctgactattggaaatgcacttcatgcaatgaaatgaatcccccccttccatcacattgcaacagatgttgggcccttcgtgagaattggcttcctgaagataaagggaaagataaaggggaaatctctgagaaagccaaactggaaaactcaacacaagctgaagagggctttgatgttcctgattgtaaaaaaactatagtgaatgattccagagagtcatgtgttgaggaaaatgatgataaaattacacaagcttcacaatcacaagaaagtgaagactattctcagccatcaacttctagtagcattatttatagcagccaagaagatgtgaaagagtttgaaagggaagaaacccaagacaaagaagagagtgtggaatctagtttgccccttaatgccattgaaccttgtgtgatttgtcaaggtcgacctaaaaatggttgcattgtccatggcaaaacaggacatcttatggcctgctttacatgtgcaaagaagctaaagaaaaggaataagccctgcccagtatgtagacaaccaattcaaatgattgtgctaacttatttcccctagttgacctgtctataagagaattatatatttctaactatataaccctaggaatttagacaacctgaaatttattcacatatatcaaagtgagaaaatgcctcaattcacatagatttcttctctttagtataattgacctactttggtagtggaatagtgaatacttactataatttgacttgaatatgtagctcatcctttacaccaactcctaattttaaataatttctactctgtcttaaatgagaagtacttggttttttttttcttaaatatgtatatgacatttaaatgtaacttattattttttttgagaccgagtcttgctctgttacccaggctggagtgcagtgggtgatcttggctcactgcaagctctgccctccccgggttcgcaccattctcctgcctcagcctcccaattagcttggcctacagtcatctgccaccacacctggctaattttttgtacttttagtagagacagggtttcaccgtgttagccaggatggtctcgatctcctgacctcgtgatccgcccacctcggcctcccaaagtgctgggattacaggcgtgagccatcgtctgcgcttctatttcgatcaccaagatgtggctccggaatgcggggcttacttcttccatgaattggccaaggagaagcgcaagggtgttgagcgtctcctgaagatgcaaaaccagcgtggtggccctgctgtcttccaggacatcctgaagccaggtcaagatgagtggggtaaaaccctggaagccatggaagccgccatggccccggggaaaaatctcaaccagagtcttttggatcttcatgcactgggttccgcccctacagacccccatctctgtgacttcctggagagtcacttccgagatgaggaagttacctttatgcctcggaagagtgcagacctccatgcagcgggtgaggctgccagcctaggtggggtgtcattgaatgtcatgaagggagccagccttcatgcactctgcctgcgtctcctgaacagctttggaccaggagttgctaccttgtgcggagaacgtgtggtgcataagaacaaccgagcctctgctcttcgaaaatgtatattctggccagtctccttgaattcctccagggcgaggccacgccagcgcacaactgcagggggcgccgttcccacagcagccctgcaaagggtcatccctgcttcaagccagtgcctcttcccagctcccatggggaccaccgaagccacgctccggatggaaaacgtggacgtgaaggaggaatggcaggacgaagatcttcccaggccactcccagaagagacgggggtggaactgcttggcagcccggtggaagacacatcctctcctcccaacacgctaaatttcaacggagcgcatcgtaagaggaagacgctggtggccccagagatcaacatttctctggatcagagtgaggggtccctgctgtccgatgacttcttggatacccctgatgacctggatattaacgtggatgacatcgagacccccgatgagaccgactcgctggagttcctggggaatggcaacgaactggagtgggaagacgacacccccgtggccaccgccaagaacatgcccggggacagcgcggatctatttggggacggcacgacggaggacggcagcgccgccaacgggcgcctgtggcggacagtgatcatcggggagcaagagcaccgtatagacctgcacatgatccggccttacatgaaagtggtcacccacggagggtactacggcgaaggcctcaacgccatcatcgtcttcgcagcctgcttccttccagacagcagcctccccgactaccactacatcatggagaacctcttccttccgccaggacagcagacaacacctggaccagtggggctgacccagccagcggcaggagtggaggcaggcagggtcggcaccgcaggtgtcctgaccctggacccctccatgttgggtccctgccttctgtgccccgtgagcaggtacgtcatcagcagcttagagctcctggtggctgaggactacatgatcgtgtacctgaacggtgccacgccccggcggaggatgcctggaatcggctggctgaagaagtgctaccagatgatcgaccggaggttgcggaaaaacctgaagtccttgatcatcgtccacccctcgtggttcattcggactgtgctggccatctctcgccctttcatcagcgtcaagttcatcaacaagatccagtacgtgcacagcttggaagacctggagcaactcatccctatggaacacgtccagatcccagactgcgtcctgcatgaccggcagatcatccttaccacactctgtgcttatggggaaggagaagccttggcaagccacctcttccacgtcatcctcccattccatatccactcctgcttcccctccagcacggagacctcagaccctccctgtggccctggactcgacctggcatacaccacaccgttcagcacacattttgcacagaggggcaaatag

SEQ ID NO: 157454 - DNA, 659 bp, Homo sapiens
gacggttgcttgaactttattgaggtgagtatttcaactctatcgtaccttctgttgttggggtggcctccctcacatttttatctgatgcaagggagtttcctcacatgaaagtatttttgtgatcgccaccaacaccagaaataaacttcttattttattccaggaaaatgatgaagttctggttgctggatttggtcgcaaaggtcatgctgttggtgatattcctggagtccgctttaaggttgtcaaagtagccaatgtttctcttttggccttattgattttctgagaattctttaatacaggagtcatgaattcattcgtcttgcagggatgaagtacaaaaaagggttgcccaagtattggatgttcctgttgcgtaatagtgtcccatggtccctgtagcagtcgcatcttatagcactcatgaactccttcccatatgtccttcagagttaaaggtctcccatctccatgggaagacatgtctgtccatgggtagatgctcctagatgtgacatcacagacccattcttaatttgaaagtgtattttgcacatgtagccatcagaacagtcctttgatggtctccattcccaactatcacctatctgttgtgaatgtttaatgaattctgcacaataacgttgacgaaa

SEQ ID NO: 157455 - DNA, 4227 bp, Homo sapiens
gccgactgaggcacgagcgggtgacgctgggcctgcagcgcggagcagaaagcagaacccgcagagtcctccctgctgctgtgtggacgacacgtgggcacaggcagaagtgggccctgtgaccagctgcactggtttcgtggaaggaagctccaggactggcgggatgggctcagcctgtatcaaagtcaccaaatactttctcttcctcttcaacttgatcttctttatcctgggcgcagtgatcctgggcttcggggtgtggatcctggccgacaagagcagtttcatctctgtcctgcaaacctcctccagctcgcttaggatgggggcctatgtcttcatcggcgtgggggcagtcactatgctcatgggcttcctgggctgcatcggcgccgtcaacgaggtccgctgcctgctggggctgtactttgctttcctgctcctgatcctcattgcccaggtgacggccggggccctcttctacttcaacatgggcaagctgaagcaggagatgggcggcatcgtgactgagctcattcgagactacaacagcagtcgcgaggacagcctgcaggatgcctgggactacgtgcaggctcaggtgaagtgctgcggctgggtcagcttctacaactggacagacaacgctgagctcatgaatcgccctgaggtcacctacccctgttcctgcgaagtcaagggggaagaggacaacagcctttctgtgaggaagggcttctgcgaggcccccggcaacaggacccagagtggcaaccaccctgaggactggcctgtgtaccaggagggctgcatggagaaggtgcaggcgtggctgcaggagaacctgggcatcatcctcggcgtgggcgtgggtgtggccatcatcgagctcctggggatggtcctgtccatctgcttgtgccggcacgtccattccgaagactacagcaaggtccccaagtactgaggcagctgctatccccatctccctgcctggcccccaacctcagggctcccaggggtctccctggctccctcctccagggcctgcctcccacttcactgcgaagaccctcttgcccaccctgactgaaagtagggggctttctggggcctagcgatctctcctggcctatccgctgccagccttgagccctggctgttctgtggttcctctgctcaccgcccatcagggttctcttagcaactcagagaaaaatgctccccacagcgtccctggcgcaggtgggctggacttctacctgccctcaagggtgtgtatattgtataggggcaactgtatgaaaaattggggaggagggggccgggcgcggtggctcacgcctataattcccagcactttgggaggctgaggtgggcggatcacgaggtcaggagatggagaccatcctggctaacacagtgaaaccccgtctctactaaaaataaaaaataaaaaaaaattagccaggcatggtggcaggctcctgtagtcccagctactcaggaggctgaggcaggaggcaggagaatggcgtgtggggtgaacccgggaggcagagcttgcagtgagccgagattgtgccactgcacactccaatctgggtgacagagtgagacgccgtctgaaaaaaaaaaaaaattttcataggccaccagttgcggtggctcacacctgtaatcccagcactttgggagactgaggcgggcagatcacttgagcccaagagttcaagaccagtctgggccacatagtgagacaccatctctacaaaaaaaatacaaaaacaagattagccgggcgtggtggcgggcgcctgtgatcccagctacgcgggaggctgaggcaggagaatcacttgaacctgggaggcggaggttgtggtgagccaaaatcgtgccattgtgctccagcctgggcaacaagagtgaaactctgtctcaaaaaaaaaaaacagtttcctgaaatattgagaagttatttttattttacttggttccaaaactagtgtgaataaggttgcttctgcaactttagtttatatgtgattcttaattttttacggtttgtagactctgagaatttgatgaaagccacagattctcttcctctagtacccatacacatctaattgcatgtaattttgggcttttgttagcctccctggagcccgggtcccagccatgtgtctaaggccaacataatggtaatagttaaaggacttcatgtagcaagccagaactgaactaaatacatggacatctcaaacatgagtgtcatttaggactgaaggcaaattaatgtcatggggtggagatcaataagaaggtaaggagccactggcagtatgagtccaaacagggtataccatggaaatcacctgtggaagaggaaggtggattccagaagaaagaaaacttgtgggagtgagcatttcaaggatggagagatcttgaagatactcacagggaagatagtggtggggcatgccatccacaacgacttcaaagcccttcagtactttcaccccaagtccctcacccgtgacacctcccatatcccccccctcaaccggaaggctgactgcccggagaatgccaccatgtctctgaagcatctcaccaagaagctgctaaaccgggatatccaggttgggaagagcggacattcctctgtggaagatgcccaggccaccatggagctatataagttggttgaagtcgagtgggaagagcacctagcccggaatccccctacagactagtggcagtggggacgctggtgatatgaggaggcagaggcagcacccaggagaaacagggcagtggaccaatggacagctccaccagctccacatctttggaagctagatttggggagagagaagctctaccccagacttaatacccattgaaatttcacctcaggtgttgtgtcctgtgtctggttaagtgtcccatggaaggggaaagccttcacgtcagaacccaaccctataccttttacttcttaaatggtgctaaccacaggtgtcccagggtgctctgtgccagttaagatttttaactttcaaggggcagggcatactgggaaatgtagtttcccaaactgccttatcacttgggtggacatatgtctccttttatgccttttggtcttgagtaattaacagcatcctcttccacgctcagaagtgttctggttggggccaggcatggtggctcacgcctgtagtcccaacacttagggaggccgaggcgggcggatcacctgagatcaggagttcaagaccagcctggccaacatggcgaattcccgttctctactaaaaatacaaaaaatgtgtggggtgtggtggcaggagcctgtaatcctagctactcaggaggctgaggcaggagaatcgcttgagcccaggaggcggagattgcagtgagccgagatcgtgtcactgcactccagcctgggtgacaagagtgagactccgtctccaaaaaaaaaaaaaagaatttattaacctggttggttaataaattgtgtggtccctgccgggcgtggtggctcacgcctgtaatcccagcactttgggaggccgaggcgggcagatcacgaggtcaggagatcgagaccatcctggctaacacggtgaaaccccgtctctactaaaaatacaaaaaattagccaggcgtggtggcgggcacctgtagttccagctacttgggaggctgaggcaggagaatggcgtgaacccaggaggcggagcttgcagtgagccgagattgtgccactgcactccagcctgggccacggccacagagcgagactctgtctcaaaaaaaaaaaaaaattaaaattgtgtggtccctttccatgtcacagagtctgcttttggctcagagtctgtatctagcctgtgtcaggatattgcctgttcttcccaccttgacttccagagcagccatcgctggtgagctttagttctccttagggttccaaggcattagaagtaagagtgtagcttggaaaccaacttctgtgatttaggaaagctgtctctttcctaaggtaatagggggtttatttcatttaggccccagttggtaggttttaaaataatttataaagtgttttaataatttggttgtcttttttaccttgctaaaccaagcctctaaaaactcaaattattcccttgataaatttttataatggaaaaaaaaaa

SEQ ID NO: 157456 - DNA, 782 bp, Homo sapiens
  misc_feature (1)...(782): n = a,t,c or g
ccggaactcccgggtcgacgatttcgtgtggcgccgactaggatgggcaagtgtcagtggacttcagtactgctaggaagctccgtagtcaccgggacgagagcgcagaagtggcatggataatacacgtatcaagaaacgctcatttagggcaccagccctaaaggcccaacccctttttggaaggtgctttctcatgccaaaaggaatccgtgctggaaaaaaagtaggagttgaaagccaaaccagcccaaattctgcccattaggaaagtgtgtaagggtcccagctgatcaagaaatggcaagaaaatcacagccctttgtacccaatgaccggttgcttgaactttattgaggaaaatgatgaagttctggttgcctggatttggtcgcaaaaggtcatgctgttggtgatattcctggagtccngctttaaggttgtgcaaagtagcccaatggtttctcttttggccctatacaaatggctgtatggagagaccaagatcataaatatgaacggtgaaaacactgtagtaataaattttcatatgccaaaaaatgtttgtatcttactgtcccctgttctcaccacgaagatcatgttcattaccaccaccacccccccttattttttttatcctaaaccagtaaacgcaggacctgtaccaattttaggaaacaataagacagggttgtttcaggattctctagagttaataacatttgtaacctggcacagtttccctcatcctgtggaataagaaaatgagatagatctgg

SEQ ID NO: 157457 - DNA, 204 bp, Homo sapiens
gcattttaaaaagtaatgactcttggggtagaggccatagaatacagcacccagatataaatccacatatttgccttacaagaaataaatccacattcttaccttacaagagctcctgaaggaagcactaaacatggaaagggacaaacagtatgagccactgggaaaacataccaaattgtaacgaccatcgacactataaag

SEQ ID NO: 157458 - DNA, 274 bp, Homo sapiens
ccttgatctggataaatccataaaaattgtgaagaaattaaagctaactggttttccatataaaattttcaagaacacttcatttattaagatattgtcttcatgcgaacttggtatcctgtttccatcccagccttctataacccagtaacatctttgttgaaaccagtggtgagaaagacacctggtcaggaatgtggaccacgggccacctcgggctcgccatggtgtcagactaaagacaaacaaggactctctgtataagggactggtc

SEQ ID NO: 157459 - DNA, 619 bp, Homo sapiens
  misc_feature (1)...(619): n = a,t,c or g
cctgccccatccagagtagagtaagacaaagagnantgccctacaagagaagtgcaaganagctttgatagagagaatgaagagatgttattgtgattatatgaggagaagcacatatttgatgtcttaagagaaatgcagaacaagcccagataccagcatacaggtttccncccnccaccccgtcatgtacagctgaatcatgcagaatttgaagatcaagatgatgaagccagagttcagtatgagggtttccgacctgggatgtacgtctgcgttgagattgaaaatgttccctgtgaatttgtgtagaactttgacccccgttaccccattatcctgggtggcttgggcaacagcgagggaaatgttggatacgtgcagaccctatcactccacagggaactggtttcttggcaatacagtctgtcagtggcataatgcctgattttcggatagctgccacaggagttgtccttgatctggataaatccataaaaattgtgaagaaattaaagctaactggttttccatataaaatttttaagaacacttcatttattaagggaatgtttaattcagccttggaagtggccaaatttgaaggtgctgtattcgc

SEQ ID NO: 157460 - DNA, 484 bp, Homo sapiens
tgcccccgctctgcaggaattcggcacgaggggagcagggaggtggtttggagtatatacgtaaatctatatccaaatctaaatgtccatatccagtatgttaaactagaatctaaaatttgtggtttgctatatttctttttttccttttcctttaagaccctatcactccacagggaactggtttcttggcaatacagtctgtcagtggcataatgcctgattttcggatagctgccacaggagttgtccttgatctggataaatccataaaaattgtgaagaaattaaagctaactggttttccatataaaatttttaagaacacttcatttattaagggaatgtttaattcagccttggaagtggccaaatttgaaggtgctgtgattcgaactatcagtgggataagggggcagatcaagaaagcactctgagctccagaaggagctttccgggccagctttgaggataagctgctgag

SEQ ID NO: 157461 - DNA, 3883 bp, Homo sapiens
gttacttgttattggtaaatagccactatggaggctaaggaccagaagaaacacagaaagaaaaacagtggacccaaagctgcaaagaaaaagaagcggcttctgcaggatctccagctaggagacgaagaagatgcccggaagagaaatcccaaagcttttgcagttcagtctgctgtgcggatggctcgatcctttcacaggactcaggatttgaagacaaaaaagcatcatattccagtggttgatcgaactccactagagcccccaccaatagtggtagtggtgatgggacctccaaaagttggaaagagcactttgatacaatgcctcattcggaactttacccggcagaagttgaccgagatcagaggccctgtgacgattgtgtcaggtaaaaagcgcagactcaccattattgaatgtgggtgtgacattaacatgatgattgatctggctaaagtagcagatctggtactgatgcttatagatgccagctttgggtttgaaatggaaacgtttgagtttctaaacatctgtcaagtacatggctttcctaaaattatgggagttctcacccacctcgactccttcaagcataataagcaactgaagaagacaaagaagcgattaaaacacaggttctggacggaagtttacccgggtgccaagctgttctacctttctggaatggtgcatggagaatatcaaaaccaagaaatccacaatctgggccgttttattacagttatgaagtttaggcctctcacatggcaaacttctcacccttatatcctggcagacaggatggaagatttgacaaacccagaggatatccgaacaaacatcaaatgtgaccggaaggtgtcactttatggttatttaagaggagcacacttgaaaaataaaagccaaattcacatgccaggggtaggagattttgccgtgagtgacatcagtttcctcccagacccttgcgctcttcctgaacaacaaaagaagcgctgtttaaatgagaaggagaagctggtttatgcgcctctttctggagttgggggtgtgctgtatgacaaagacgctgtctatgttgaccttggtggcagccacgtttttcaggatgaagtggggcccacccatgagctggtccagagtctcatctctacccactccaccattgatgccaagatggcttcaagtcgagtgacgctgttttctgattccaaaccacttgggtcagaggatatagataatcaagggctaatgatgccaaaggaggaaaaacaaatggacttgaacactggtcgaatgcgtcggaaagccattttcggagatgaagatgaatctggagatagtgatgatgaagaagatgatgaaatgtctgaagatgacgggttggaaaacggctctagtgatgaggaagcagaagaggaggaaaatgctgagatgactgatcagtatatggctgttaagggcatcaaacgacggaaacttgagttggaagaagacagtgaaatggatttgccagcatttgctgacagtgacgatgaccttgagaggagctcagcggaagaaggggaagcggaggaagctgatgaaagcagtgaagaagaggactgcactgcaggagagaagggcatttcaggatcaaaggctgctggagaaggtagtaaagcagggctgtcaccagctaattgccagagtgaccgtgtgaatctggagaagtctttgctgatgaagaaagcagctctccccactttcgattctgggcattgcacagctgaagaggtgtttgcatctgaagatgaatctgaagaaagctcctcactcagtgcagaggaagaagactcagaaaatgaagaggctattagaaaaaagctttcaaagccttctcaagtgagcagtggtcagaaactggggccacagaacttcattgatgagaccagtgatatagaaaatttactcaaagaggaagaagattacaaggaagaaaataatgattccaaagaaacgtcaggtgccctcaagtggaaggaagacctttccagaaaggcagctgaggcctttctgaggcagcagcaagcagctccaaacctccgaaagcttatttatgggacagtgacagaagataatgaagaagaagatgatgatactctagaagagcttggagggttgtttcgtgtcaaccagcctgacagagagtgtaagcacaaggctgactctttggactgctccagatttcttgtggaggccccccatgactgggatttagaggaggttatgaacagtatcagagattgcttcgtgactggaaagtgggaagatgataaagatgcagccaaggtcttagcagaagatgaggagctctacggtgactttgaagacttggaaacaggggacgtgcacaagggaaaatcaggccccaatactcagaatgaagatatagagaaagaagttaaggaagaaattgaccccgacgaagaagaaagtgccaagaaaaagcatttggataagaagagaaaattgaaggagatgtttgatgcagaatatgatgaaggagaaagcacatattttgatgatcttaaaggagaaatgcagaaacaagcacagctgaatcgcgcagaatttgaagatcaagatgatgaagccagagttcagtatgagggttttcgacctgggatgtacgtccgcattgagattgaaaatgttccctgtgaatttgtgcagaactttgacccccattaccccattatcctgggtggcttgggcaacagtgagggaaatgttggctacgtgcagatgcgtctgaagaaacatcgctggtataagaaaatcctcaagtcccgagatccaatcatattttctgtagggtggaggaggtttcagaccatcccactgtattatatcgaagaccacaatggaagacaaaggcttctaaagtataccccacagcacatgcattgcggagcagccttttggggccctatcactccacagggaactggtttcttggcaatacagtctgtcaagtggcataatgcctgattttcggatagctgctacaggagttgtccttgatctggataaatccataaaaattgtgaagaaattaaagctaactggttttccatataaaattttcaagaacacttcatttattaagggaatgtttaattctgccttgtaagtggccaaatttgaaggtgctgtgattcgaacagtcagtgggataaggggggcagatcaagaaagcactccgagctccagaaggagttttcaggggccagctttgagggataagctgcttgatgagcgatattgtcttcatgcgaacttggtatcctgtttccatcccagcgttcttttaacccagtaacatctttgttggaaaccagtgggtgagaaagacacctggtcaggaatgcggaccacgggccaactcaggctcgcccatggcgtcagactaaaggcgaacaaggactctctgtataagccaatcctgaggcaaaagaaacattttaattcactgcacattccaaaagccttgcagaaggccctgccatttaagaacaagcccaagacccaagcaaaggcaggcaaggtgccaaaggacaggcggagaccggccgtcatacgcgagcctcatgaaagaaagatccttgcactgctggatgctctgagtacggtgcatagtcagaagatgaagaaggccaaggagcagcggcacctgcacaataaagagcacttcagagccaagcagaaggaggaggaggagaagctgaagcggcagaaggacctcaggaagaagctcttcagaattcaggggcagaaggaaagaagaaaccagaagtccagtttgaagggggctgagggccaattgcagtga

SEQ ID NO: 157462 - DNA, 1231 bp, Homo sapiens
caactttaaagttttggattgcttttgtcaagccactgggttgcaagttcagatggcctctcttgtttttcttagctaattgtaagtaaaattcactttggtaatttagggtgtcacatagaattgaagtttttctcttgctaatattattcctattttcaaattttggggttcctgttagcctgattttcggatagctgccacaggagttgtccttgatctggataaatccataaaaattgtgaagaaattaaagctaactggttttccatataaaatttttaagaacacttcatttattaaggtctgtatatctatatattctcatatttataaatctccatattggttgagaaaaggaatgaaatacctctaaaatatgggcctcatatttttagaaaagtgtttgaaatcttttataaacttcatattttgttagctcctttatattcttgggtacttaaatatgcctcagaaaagcagtggtaaacagctatttaggaattgaggctgttacttttgacttccatgtgagactgccacagaactcatattgaaaatatgtcattttatccactaggttttgtttcctactttttaaatttgtgttaaagaaagggaaaaaaatcacaagtttgtctaactcagtagaaaaatcgacaaagcatttgcagacaacttggccaggggtaccagagaaccggatgtacctgtttttccagtatttggggagggtggtttgagccagcatttattgacaatttccattaagtgggggatgtttcctaattggaaaaccagggttagggaagtcataaaaatgtttcctgcaatataaggtaaataaatacccacccagccgtttatccttaactgttttccatgttcctaagtgccatgccatcctgagtaaaagggatctgggcctgcagtcccagtcctgagagatgcccagcaaaggctccctaggccagttcagtccagtaaatcccctcttcgattttttttttccacacagacagcgagtgatgagcatgcccgtgaactcacatgattattttggggaaaatgaaagagttgtattctttttgaggtagtaattccactttcaggggcaaatacattttgattattttatcacccttcagtgagttgtttttgttctttaatcaaggatgtatgtttgaagtaagaagtaaagcataaagtatacgaaaaaaaaaaaaaaaaa

SEQ ID NO: 157463 - DNA, 641 bp, Homo sapiens
ccaagcgagactctgccttaaaaaaaaaaaaaagaaaatgtggcacatatacaccatggaatactatgcagccataaaaaagaatgggatcatgtcctgtgcagcaacgtggatggagctggaagccattatcctaaatgaactcactcagaaacagaaaaccaaataccacatgttctcacttataagtagaagctaaaacattgagtacacatggatacaaagaagggaaccgcagacactggggccctacctgaggtcggagcatggaaggagggtgaggatcaaaaaactacctatctggtactatgcttttaatctggatgatgaaataatctgtacaacaaaaccctggtgacatgcaatttccctatactagccaagcctacacatgtgcccctgaacctaaaaaaaaaagttaaaagaaaaacgtttggattattttccctctttcgaacaaagacattggtttgcccaaggactacaaataaaccaacgggaaaaaagaaaggttccagttttgtctgaaaattctgattaagcctctgggccctacagcctggagaacctggagaatcctacacccacagaacccggctttgtccccaaagaataaaaacacctctctaaaaaaaaaaaaa

SEQ ID NO: 157464 - DNA, 541 bp, Homo sapiens
atttttttaagacagtttctgtcacccaggctggagtacagtggtgtaatcaaagctcactgcagcctcaacctcctgggctcaagtgatcctcctgcctcagccttcaaagttgctgggaccacaggcattcgccaccatgcctggctaatttttgtatttttttttgcagagacagggtttcattatgttgcccagggtggtcttgaactcctgaacttgcgcaatctgccagccacggccttccaaagtgctgggattataggcataagccaccatgacttgctgggtattcaaatcacaacttggctcttacagaaactttcttatttgcaaaagaaaatctgcaaagatcaggaaacagggctgctccatgctttccacctctacccctacccctaccccatgcccagctctccccagcttctccagggaccagacattctgacaaatggctagtctagggttctatggaccaaggcaaccagaggttgattcttctccctgctgctacctctaacacaatcccaagtgggaaaac

SEQ ID NO: 157465 - DNA, 882 bp, Homo sapiens
ggtagagacggggtttcaccatgttggtggggctggtctcgaactcctgacctcagatgatccacctgcctcggactaccaaagtgctggaattacaggcataagccactgcgcccggcccatggctcctttcttaacattgtgactttgtagattctggctttccagtttaatgatttaggtggatcttttggggaaaccgatttttgactaggtgacacacctggtacagaatttaaaagatgcaaaagggaatagaatacaaaggtcttcttcccagtggtgacttcccaggcccttgtcctgcttcccacaggcaaccactgttagtagcttggtgagttacttatacaaaaagaatgtagctatgcaagcagttagcacatccatatgacgatacagacatacacgtgctacatatttgctatggaaatggttgtatactaatcaaccattctgcaacctgcttttctgatttaatctagaacaacctcattcttgtgtatagtacacctcacaccactatattggcttggtataataactttccaactggcttttgtctcagccatgggcagtttcttttctgaccatccatctggcctcaggttcccctggagtcttcctttctccagcagtccttctctgtctttgtatatcttcaggctttagcaatagcgctcactctattcttctttttctgaattacctcttaaaattaaaggttctgtataactaggctttttgaggcccaggttcttaccttccacgccccttcccactctttctgttgcctccctcgcctatctcttcattgtgtggactctctcatcttcgctcctcgctccctccgcttttctgcgttcttcgtgtcccccagcc

SEQ ID NO: 157466 - DNA, 532 bp, Homo sapiens
  misc_feature (1)...(532): n = a,t,c or g
gcaccatcatagctcactgtagccttgagcacatgccaccacacccagcactgaatgttgtctttttcttttctttccttttttttttttagaggcatggtcttaactatgttgttgcctagggtggtcttgaactgctggcctcaggcaatcctcccgcctcggcctcctaaagtgctgggattactggcgtgacactcatatccagctcctatcattctttgaccacttctttattttctgtcatgagaatatgttccagacccctcttatacttcccatgcccagccctggaatctccatttctccaaagagcattggcttattttagaggagactggtatttagcaaccaaggcctgagtcctaggtatactcactggctactgaggtgtccttttctcctagggccctnacagcaaagttcataaatagatgtacatacatacatgtatgtatgtatatgtgtgaaccatatgcatatacatgtttatacacatccacacacatacatgtatgtatgtacatctatt

SEQ ID NO: 157467 - DNA, 882 bp, Homo sapiens; identical to SEQ ID NO: 155742

SEQ ID NO: 157468 - DNA, 513 bp, Homo sapiens
tcaaatgaagcccgtccccaggtccccagggctcagctgctctccttcctctagcaacacaacaacggtgtagagtgcgtgggggccccactgccactggaccacttgggagaggtgaatggtactcacctcgcctcttctttgaattggagctggcgttttcacaggcagagtgctggcagctgctgagacatcccccttactggtggcataccttgctgtcacacccggtgctgcaggccacctttttttgtgaaagttcttttccttcctcagcagtgcctgctgtttggaacaggttttgttttgttttgtattgttttttgttttcttcctcctcctcatcatcttctccttcttcttctccttctccttctcctccttcttcttttcctcttcctcttcttcctcttcttctttttcttcttcttcttttttttttttgagatggagtctcgctctgtcgcccaggctggagtgcagtgtcatgattcggctcactgcaacctccat

SEQ ID NO: 157469 - DNA, 2050 bp, Homo sapiens
gatcacacgccactgcactccagcctgggtgacacagtgagactctgtctcaaaaaaaaaaaaaaaggtggttattagttttggggtggtagtcacaaaacacataaccaaaacaatgtgtacttagaaaatctaggccgggcgcggtggctcacgcctgtaatcccagcacttttgggaggccgaggcgggcctgatcacgaggtcaggagatggagaccatcctggctaacacagtgaaaccccttctctactaaaaaatacaaaaacaaaattagccaggcgtagtggcgggcgcctgtagtcccagctacttgggaggctgaggcaggagaatggcgtgaacccgggtggcggagcttgcagtgagccgagatcccgccactgcactccagcctggggtgacagagttgagactccgtctcaaaaaaaaaaaaaaaaaaagaaaccacagcagctgtggctggggagcccagatgaagtgtggctctatcttgtatgtgagcacacccacattttcactgccattatctgggacagcagaaccaggtttggctcaacagatttctctttccacccatctattgcaggagtagtggtcttgctgcttctccagggaggtaagtagtcaataagtcactaccgcctggatctcctggcttgggtgctttcatttttgatgtacagtttctttttctgctacatgctttttctcttgattactctctccggttctgccactgacatatttatgacactgagtttttattctatctttttgtgtatcccttgttctagttctttttgagccactctctctctcacccctcccccatagctggcctcaatatgtgtgtgtgaatacaaacatacacaatgtttgtattatctgtttctctactgatctgtgtcatccatccatacatacatactgaatcttagtgctccatgggtgtttcatatgttggtggtatctctgtctctcaatgtattttttttttaatttttttgagatggagtctcgctctgttgcccaggctggagtgcaatggtgcgccatctctgctcactgcaagctccgcctgctgggttcacaccattctcctgcctcagcctcccgagtagctgggactacaggcacccgccaccacgcctggctaaattttttgtatttttagtagagacgggggtttcaccgtgttagccaggatggtctcgatctcctgacctcaggtgatccgcccacctcggcctcccaaagtgctgggattacaggcgtcagccaccgtgcccggcctctgaaacatctttcttaatttaactttcaactaagttctagtctgtaaatgagaaatgcaagtaagaacaaggggtcaatttattttaagtaaatttgtcattaaatatcaatgtgtacaatttcaaacatttataaatcttccaatttatagaaaaattaatgtaatcttaaaattatttgaacagtgggctttcacaattatttacaatggaactcaacctacttttgtagaaacatttatgtttaaaagtacccctgccacaaagtgatcatttcacagtacctttctataatatttatgtcacttaagtggtggctgcatcaataaaacctagcagattcaataaattagaaacagcacaatcagaacagtcaataaagctaccattgattccaaacaaaacagaaccttttaatagtcaagatataaatgttttcccccatccagcactcattggaaaaaaataattaggaggcaatcttttcttcactgtttacttcagtacaaggtaattttaagatatttttaaaaattgatgttaagaagcaggattaggtaacttcttataatatgtgacattaaatattttgagaaattcttggtttcattggaaggtatttgtaatgataaaccttctttcagttataatgagatactaagcagaggtaattctgtcatcccagatagcaatttcttattaacaattgataacatttgaactgaaagagattcttggctttatttctata

SEQ ID NO: 157470 - DNA, 1221 bp, Homo sapiens
atgggcaaagtgtggaaacagcagatgtaccctcagtacgccacctactattacccccagtatctgcaagccaagcagtctctggtcccagcccaccccatggcccctcccagtcccagcaccaccagcagtaataacaacagtagcagcagtagcaactcaggatgggatcagctcagcaaaacgaacctctatatccgaggactgcctccccacaccaccgaccaggacctggtgaagctctgtcaaccatatgggaaaatagtctccacaaaggcaattttggataagacaacgaacaaatgcaaaggttatggttttgtcgactttgacagccctgcagcagctcaaaaagctgtgtctgccctgaaggccagtggggttcaagctcaaatggcaaagcaacaggaacaagatcctaccaacctctacatttctaatttgccactctccatggatgagcaagaactagaaaatatgctcaaaccatttggacaagttatttctacaaggatactacgtgattccagtggtacaagtcgtggtgttggctttgctaggatggaatcaacagaaaaatgtgaagctgttattggtcattttaatggaaaatttattaagacaccaccaggagtttctgcccccacagaacctttattgtgtaagtttgctgatggaggacagaaaaagagacagaacccaaacaaatacatccctaatggaagaccatggcatagagaaggagaggtgagacttgctggaatgacacttacttacgacccaactacagctgctatacagaacggattttatccttcaccatacagtattgctacaaaccgaatgatcactcaaacttctattacaccctatattgcatctcctgtatctgcctaccaggtgcaaagtccttcgtggatgcaacctcaaccatatattctacacgaccctggtgccgtgttaactccctcaatggagcacaccatgtcactacagcccgcatcaatgatcagccctctggcccagcagatgagtcatctgtcactaggcagcaccggaacatacatgcctgcaacgtcagctatgcaaggagcctacttgccacagtatgcacatatgcagacgacagcggttcctgttgaggaggcaagtggtcaacagcaggtggctgtcgagacgtctaatgaccattctccatatacctttcaacctaataagtaa

SEQ ID NO: 157471 - DNA, 1483 bp, Homo sapiens
atggcccctcccagtcccagcaccaccagcagtaataacaacagtagcagcagtagcaactcaggatgggatcagctcagcaaaacgaacctctatatccgaggactgcctccccacaccaccgaccaggacctggtgaagctctgtcaaccatatgggaaaatagtctccacaaaggcaattttggataagacaacgaacaaatgcaaaggttatggttttgtcgactttgacagccctgcagcagctcaaaaagctgtgtctgccctgaaggccagtggggttcaagctcaaatggcaaagcaacaggaacaagatcctaccaacctctacatttctaatttgccactctccatggatgagcaagaactagaaaatatgctcaaaccatttggacaagttatttctacaaggatactacgtgattccagtggtacaagtcgtggtgttggctttgctaggatggaatcaacagaaaaatgtgaagctgttattggtcattttaatggaaaatttattaagacaccaccaggagtttctgcccccacagaacctttattgtgtaagtttgctgatggaggacagaaaaagaggcagaacccaaacaaatacatccctaatggaagaccatggcatagagaaggagaggtgagacttgctggaatgacacttacttacgacccaactacagctgctatacagaacggattttatccttcaccatacagtattgctacaaaccgaatgatcactcaaacttctattacaccctatattgcatctcctgtatctgcctaccaggtggcaaaggaaaccagagaaaacaagtatcggggctctgctatcaaggtgcaaagtccttcgtggatgcaacctcaaccatatattctacacgaccctggtgccgtgttaactccctcaatggagcacaccatgtcactacagcccgcatcaatgatcagccctctggcccagcagatgagtcatctgtcactaggcagcaccggaacatacatgcctgcaacgtcagctatgcaaggagcctacttgccacagtatgcacatatgcagacgacagcggttcctgttgcaggaggcaagtggtcaacagcaggtggctgtcgagacgtctaatgaccattctccatatacctttcaacctaataagtaactgtgaggtatgagggaaaggtcttccataactggggggctcaaatcaagcacaatctatagggctttttttaaaatcagaatggtgattgggataactcggattttatcatactgctttaatcgtggccaaggcatctagtcttgttgaaatattaaaatcagtgattttatgaatttaagattaatcattttgtctaaagagaatgctttatactgaagccaaatgtatactctccccactaaagaagaaaaaagataaaaatctgtaacatcagagaacaattttggttcttggtgttctctggtcgac

SEQ ID NO: 157472 - DNA, 836 bp, Homo sapiens
gtatttttagtagagatggggtttcaccatgttggccagcctagtctcgaactcccgtcctcaagcgatgcacctgcctcggcctcccaaactgctgggattacaggcgtgagccactgctctcggcctgtgcgttttttctttgcgggaatgctcctcacttgttgcatttcttggcggtgttttgcatcccgagccctttgccgcttgcagcatccaattatctcctccagtcagcagccacttgccttccagtgtttctggagcacagacgttccaaaaacccgagtttatcaaattggaaccattctcccattaccgagtaagcttttagattcgtgggcagaaggatatcctgccacgttcgagtctcatgttcctggcatttactcacgcgtaggcgtctcatccatctggcacttaggttgtgtgtggagcgagccaggggtctcacgtttcttgcccatgagatgggacggccccagcgccagggagtggatggtcctctgccacgcacgcaaggcggcgccagctccttgctcccgcttcccagcacagcctgttctgagccaggccccaccgcctgcgactgtggctctttgtcatgtactcacctcacttattcctctctttaatctcccgcaggtgctcagctactggcttccctcccgggacgaggtcggagtctccgcctgggattctgaggcgtggcttttgcttcacagtgcccctaaacctcagtagtgtaggaaactttctgaaaggaaaacaaattctcagggatgcccagaacttatcagttcacttttattacagaacacgaattccaccgcacg

SEQ ID NO: 157473 - DNA, 356 bp, Homo sapiens
ttatataggaggttggtgggacaaagccggagcacattctatcctaaatggagtatggtacagaggaggccattacaaaatcaagcaccaagatggtattttctgggctgaatacccaggcgggtcatactccttaagagcggctcatatgatgatcaggcctattgactgaagagagacactcgcccctttaaatgacacagagctttgtacttttcagctgttaaaaatgtaaatgttacatgtatattacttggcacaatttatttctacacagaaagcccctaaaatgaattttaccgcaactataaaagggaacctatggatgtagtttcatctgtcgtcatttactgcat

SEQ ID NO: 157474 - DNA, 1301 bp, Homo sapiens
gagggtggcacaggcgtgcggtcgctgagcttctaccagcacatcatcactgtgggcaccggccatggttccctgctcttctatgacatccgcgcccagaagttcctggaggagagggcctcttccagcctggactccatgccggggcccgcagggaggaagctcaagcttgcctgcggcagaggctggctcaaccaagatgacgtctgggtgaactactttggtggcatgggagagttccccaatgcgctctacacccactgctacaactggccggagatgaagctctttgtggctggggggcctctcccttcaggcctccatgggaactacgcaggcctctggagttaaggatggacgccttgttctcaaagtgcacaggtggaaccagtccaacttacgtgtgcttaatgtattaggcagagaaagaaagagagagagcgggagcgagagagcacaagtggtcctttcggcagtcaaaactttggctttaaaactctcattcacgtttcccaacagcagtatatttttgccttctcattcacagagttttggctaaaccttaattgtgttctgtctttcagtgattcacataccctccttctttaggttgatgtagtcatagtcttcactactattcagtacgttagttttatcaatattgcaatagtgttcagatcttttacacatgttagatgtgtggtgttttggggaaatgtgagctacaaagcatctttggggttgttttgaggaactacccatcatttatagccttactctaattacaaaatgcagttcaggttctagattgccaccattctagagtgtggcacacaccattctagggcgtgattcatttggatgttggaaactcaatgtctgttgtttgtatagtgttgatgtgtaaaatgctttaaaaatatgttctgttagttagaaatcttacaatgttgttcatactattaatcaacatttttggttattcagtaaaacatttactatcctcaggccctccgtgttcttatttaaagccgctgtattatggcctgcttttctatgctacagattttcagaactactcaattctggtctatatatgtggtagtgcaatcagggaggtatttttgggggtatatggggtacacatctctttaaattcaggtagctatttacagtgaaaagccagttgtggcagttgtgctcagagtaggtgttgattttttattactgtatacatggataattctggatccagtatgtgatgcgttgcagaaaaataaataaaatgtgttaaaaatctt

SEQ ID NO: 157475 - DNA, 1687 bp, Homo sapiens
acagacttacgatgatggagctgcaacccgactaatgtcaacagtgaaacctttgagggagccagcaccctctgaagatgtgattgatattaagccagacccagatgatctcattgacgaagacctcaactttgtgcaggagaatcccttatctcagaaaaaacctacagtgacacttacatatggttcttctcgcccttctattgaaatttatcgaccacctgcaagtagaaatgcagatagtggtgttcatttaaacaggttgcaatttcaacagcagcagaatagtattcatgctgccaagcagcttgatatgcagagtagttgggtatatgaaacaggacgtttgtgtgaaccagaggtgcttaacagcttagaagaaacgtatagtccgttctttagaaacaactcggagaaaatgagtatggaggatgaaaactttcggaagagaaagttgcctgtggtaagttcagttgttaaagtaaaaaaattcaatcatgatggagaagaggaggaagaagatgatgattacgggtctcgaacaggaagcatctccagcagtgtgtctgtgcctgcaaagcctgaaaggagggcattttattctggagcatctacgcacagatgttttctccgtggaagttgttgctgtttttctcccgagggaaaagctttaccggaagtctcaaccgaatggaagttttttaagggcaaatgccgatactctagaggatctgtgttcttttcatcacagaaaagatatgatttcagatattcgattttcacctggtcaaaagaaggaggagcggttaaactgtgggatcaggaactgaggcggtgccgtgccttcaggcttgagacaggacaagccacagattgtgttcgttctgtgtgcagaggcaaaggcaagatccttgttgggacaaggaatgctgaaataatcgaagttggagagaaaaatgcagcttgtaatattttagttaacggtcatgtggatgggccaatctggggactagcaacacatccttccagggattttttcctttctgctgcagaagatgggacagtgagactttgggatattgctgataaaaagatgttaaacaaagtgaatttgggacatgctgctcgtactgtgtgttacagccctgaaggggacatggtggctgttggaatgaaaaatggagaatttatcattttactatattgttttggctatttggagccccttgcaggcccatgtgaatttgaggattggctttttatctctatgaaaaagcatattgggattgtgatagctacagctccttctattcacatctgggatgcaatgaacaagcagactttatctatcctaagatgctaccattcaaagggagtatgttcagtcagcttcagtgctactggcaaactattgctgtctgtgggactagacccagaacatactattaccatttggagatggcaggaaggtgccaaaattgccagcagagctggtcacaatcaacgtatttttgtggcagaattccgaccagattcagatacccagtttgtctcagtgggagtaaaacatgtgaagttctggaccctggcaggaagagctcttcttagcaaaaaagggctactgagcacactggaagatgcccggatgcagaccatgctcgctattgcatttggtgcagtggcatga

SEQ ID NO: 157476 - DNA, 406 bp, Homo sapiens; identical to SEQ ID NO: 156769

SEQ ID NO: 157477 - DNA, 1719 bp, Homo sapiens
gtgggaggtgttgctgtttttctcctgatggtaaagctttagccgtaggtctcaacgatggaagcttcttaatggcaaatgcggatactctagaggatcttgtgtcttttcatcacagaaaagatatgatttcagatattcgattttcacctggaatttggccagtaattggagaagttacagatgtaactgcttcttgcctcaccagtgacaaaatggttctagctaccggggacgatttgggatttgtgaagttatttagatatcctactaaagcctccagtgagcagggccccaccacagccagagaaactccagacaaacaatgtaggcaagaaaaagagacctatagagctacagctccttctattcacatctgggatgcaatgaacaagcagactttatctatcctaagatgctaccattcaaagggagtatgttcagtcagcttcagtgctactggcaaactattgctgtctgtgggactagacccagaacatactattaccatttggagatggcaggaaggtgccaaaattgccagcagagctggtcacaatcaacgtatttttgtggcagaattccgaccagattcagatacccagtttgtctcagtgggagtaaaacatgtgaagttctggaccctggcaggaagagctcttcttagcaaaaaagggctactgagcacactggaagatgcccggatgcagaccatgctcgctattgcatttggtgcaggcaagatccttgttgggacaaggaatgctgaaataatcgaagttggagagaaaaatgcagcttgtaatattttagttaacggtcatgtggatgggccaatctggggactagcaacacatccttccagggattttttcctttctgctgcagaagatgggacagtgagactttgggatattgctgataaaaagatgttaaacaaagtgaatttgggacatgctgctcgtactgtgtgttacagccctgaaggggacatggtggctattggaatgaaaaatggagaatttatcattttactagtgagttctctaaaaatatggggaaagaagagagacaggagatgtgcaatccatgatatcagatttagtccggattcccggtatctggcagtaggttctagtgagaactcagtggatttttatgacctaacgctgggccccactcttaacagaatcagctactgcaaagacattccaagctttgtcattcaaatggacttctctgcagatagcagttatctccaggtctctagtggctgctataaacggcatgtctatgaagtgccttcaggaaaacatcttatgggttcatgccgctattgacagaattacttgggctacatggactagtattctaggagatgaggttttgggaatctggtccagacatgctgagaaagctgatgtcaactgtgcctgtgtatctcattcaggaatcagtcttgttacaggagatgactttggcatggttaagttatttgacttcccatgtccagaaaaatttgcaaaacacaaaaggttcttgggtcattcgccccatgtgacaaatattcgatttaccagtggtgatcgacatgttgttagtgctggaggtgatgactgcaggttagtaactttctcagcccatgaagagcagactatgttactagttaagagacttaatacaacaactcctacagctttggtttatgaaatcagctag

SEQ ID NO: 157478 - DNA, 6084 bp, Homo sapiens
atgcccctcaagctgcaaaactgccttgcattgcatcctgaacgagtgttggtagcaacaggacaagttgggaaagagccttatatttgtatttgggattcatacactgtgcagaccatatcagttttaaaggatgttcatacacatggtatagcttgcttggcgtttgacttagatggacagtgcagtgtgaaagcagtcatagacaatgcacgaaggaatgagtgtggctatattccagtaaaactttatttacaaaaacatagtttctctttgatttgtttgcctttttattccttcctggacttcttggacataaatcagcgcttggtttcagttggacttgattcaaagaatgcagtttgtgtttgggactggaaaaggggaaaaatgttgtctatggctcctggtcatacagatagattctggagtttatgtggaaatgctctgaccccaaaacgaggtgtctttggtaagacgggtgaccttcagacaatactgtgcctagcctgtgcaagggatgaattaacatattctggtgcactcaatggggatatatatgtttggaaaggaatcaatcttatacgaacaatacaaggagcccatgctgcaggaatttttagcatgaatgcttgtgaagaaggctttgctactggtggcagagatggttgtattcgtctttgggatttaacttttaaaccaattactgtgattgatctcagggaaacagaccagggatacaaaggtttgtctgtaaggagtgtgtgttggcgaggtgaccacattctagttggaacacaggacagtgaaatttttgaaattgtggtgcaagaaagaaataaaccttttctaattatgcaagggcattgtgaaggtgaactttgggcacttgctgtccatcctactaaacctttggctgtgactggaagtgatgatcgttcggtcaggatatggagcctagtagatcatgcattaatagcaaggtgtaatatggaagaaccaattcgttgtgcagctgtcaatgcagatggaatccatcttgcccttggaatgaaggatggctcattcactgtacttagagtaagagatatgacggaagttgtacatattaaagataggaaggaggcaattcatgagttaaaatattcaccagatggaacttaccttgctgttggatgcaatgacagctcggttgatatttatggagttgctcagcgttataaaaaagttggcgagtgtttgggatcccttagtttcatcactcatctggactggtcttcagacagtagatatttgcagacaaatgatggaaatgggaaaagacttttttatagaatgccaggaggaaaggaagtgacaagtacagaagaaataaaaggtgttcattgggcttcatggacatgtgtttcaggccttgaagtaaatggaatttggcccaagtattcagatatcaacgatataaattcagtagatggaaattatattggccaagttttagttacagctgatgactatggaattataaaattattccgatatccatgtttaagaaaagaaagtctggctgactctcatagtgatgaatcagattcagatctgtctgatgttccagaactggattctgaaattgaacaagagacacagctcacctaccgtcgacagtgttctgcaggctgtacaagcagggcaccagcatctgctcagcttctggtgaagcctcaagaagcttttactcatggcagaaggcaaagggggagcagttacagaggttatgactgtcgaagtaatctgttttatactcaaattggtgaaattgtgtaccatgtggcagcagtgggtgtcatttataatcgacagcaaaacacacagcgtttttatctgggtcatgatgatgatattctctgcctaactattcatcctttgaaagactacgtggcaacaggccaggttggtagagatccctcaattcatatatgggatacagagaccattaaaccattgtccatattaaagggccaccaccagtatggtgttagtgccgttgatttctcagcggatgggaaacgtttggcatcagttggcatagatgatagccatactgttgtgctctgggactggaagaaaggagagaaactttcaatagcaagaggaagtaaagataagatttttgttgtaaagatgaacccctatgtgcctgataaactaattacagctggaattaaacacatgaaattttggcgtaaagcagggggaggattgattggaagaaaaggctacataggcacactggggaaaaatgacacaatgatgtgtgcagtgtatggatggactgaagagatggctttttctggaacatccacaggagatgtgtgtatctggagagacatctttcttgtaaaaacagtgaaagcgcatgatgggccagtgttcagtatgcatgcattggaaaaagggtttgtaactggaggaaaagatggtatagtagctctttgggatgactcttttgaaagatgtctcaagacctatgctataaaaagagctgcattggccccaggatctaaaggtcttctcttggaagataatccatctatacgtgccatatcattaggacatggtcatattttagttggcacaaagaatggtgaaatactagaagtggataaaagtggcccaataacacttctggttcagggacacatggaaggagaggtgtggggtttagctacacacccttatctgcccatctgtgctactgtaagcgatgataaaaccttaagaatatgggatctctcacctagtcattgtatgttggctgtccggaagctgaaaaaggtgcaaaagggaaatgtggggttggagcccccatacagagtccctactggggcaccgcctagtggagttatgagaagagggcaaccatccttcagaccccagaatggtagaacaactgacagcttgcaccatgtgcctggaaaagccacaggcactgaatgccagcctgtgaaagcagccaggaagggggctatactctgcaaaaccacaggggcagagctgcccaagaccatgggaacccacctcttgcatcagtgtggcctggatctgaggtttgctggaggtccactccagaccttctttgcctgggtccctcccacacctcgaggtatcaccagtggaggctgcaaaacagtaaagagggtcactgaactgataccagtggaaacgcccctgtataaggtgtctagcaacccctgttggggtggtctcacccagtcaggaggtacaggatccaggacccacttaatgaagcactctgactaccccttggcagagggggtgcattacactgggggaaatcccacttgtcctgactgcccagattcctcagagctgggagctcagtcatctgaggcagcagacagccaaagtgatgacagccgtcccttcccccaggaacttggtagtcttcggcagtctgtagctaagtggccactgagaatctgtgcagctctatgcttgggactcaaggaactggtggcatgggctcacggaggggatctcctgatccaccagttgcacagatccatggaaaaagtgtggtttcccgggcaggatagcacaatcactcactgcctctcttggctgggagtaggagctccccttgtcctgtgcagctcccagaaagcagcaaccctagtactaagggagagtgaacaagttaaaggtgattcagacctgtttggaaatggtgtggctgccaccagaacattcagtgagcttgtggcgaaaaagcttgccagagggtgcagccctcagtggaacagtgagagtagtcacttggtgaaggagaagcttgccagaggcagcaggccagagctgaatggtgggaggtgttgctgtttttctcctgatggtaaagctttagccgtaggtctcaacgatggaagcttcttaatggcaaatgcggatactctagaggatcttgtgtcttttcatcacagaaaagatatgatttcagatattcgattttcacctggaatttggccagtaattggagaagttacagatgtaactgcttcttgcctcaccagtgacaaaatggttctagctaccggggacgatttgggatttgtgaagttatttagatatcctactaaagggaaatttggaaagtttaagaggtatgtggcccatagtacacatgtcacaaatgttcgctggacttatgatgacagcatgttggttaccctaggcggtacagatatgtctttaatggtgtggacaaatgagatggaaggctatcgagaaaaaaggccttgtgatagtgaagaatccgacattgattctgaagaagatgggggctatgacagtgatgttacaagggagaatgaaatcagttacaccatcagagccttatcaacaaatattcgcccaatgttaggaatcaagcctcatttacaacaaaaagaaccctcaattgatgaaaggcctccagtgagcagggccccaccacagccagagaaactccagacaaacaatgtaggcaagaaaaagagacctatagaggaccttgtgttggagctcatttttggttatcgaggcagagactgtaggaataatgttcactatttaaatgatggtgatgatataatttatcacactgcatctgttggaattctgcacaatgttgctacaggttctcagagtttttatcaggaacataatgatgatattctgtgcctcacagtaaaccagcaccccaaatttatcaacatagtggcaactggccaagtagctacagctccttctattcacatctgggatgcaatgaacaagcagactttatctatcctaagatgctaccattcaaagggagtatgttcagtcagcttcagtgctactggcaaactattgctgtctgtgggactagacccagaacatactattaccatttggagatggcaggaaggtgccaaaattgccagcagagctggtcacaatcaacgtatttttgtggcagaattccgaccagattcagatacccagtttgtctcagtgggagtaaaacatgtgaagttctggaccctggcaggaagagctcttcttagcaaaaaagggctactgagcacactggaagatgcccggatgcagaccatgctcgctattgcatttggtgcaaataacttgacgtttacaggtaccatcagtggtgatgtctgtgtgtggaaagatcacatattgtgtagaatcgtggcgagagctcacaacgggcctgtgtttgccatgtacaccaccctgcgagatggacttatcgtgactgggggaaaggaaaggccgtcaaaagaaggaggagcggttaaactgtgggatcaggaactgaggcggtgccgtgccttcaggcttgagacaggacaagccacagattgtgttcgttctgtgtgcagaggcaaaggcaagatccttgttgggacaaggaatgctgaaataatcgaagttggagagaaaaatgcagcttgtaatattttagttaacggtcatgtggatgggccaatctggggactagcaacacatccttccagggattttttcctttctgctgcagaagatgggacagtgagactttgggatattgctgataaaaagatgttaaacaaagtgaatttgggacatgctgctcgtactgtgtgttacagccctgaaggggacatggtggctattggaatgaaaaatggagaatttatcattttactagtgagttctctaaaaatatggggaaagaagagagacaggagatgtgcaatccatgatatcaggttagtgaacaaatggaatagagtttctagtatatacttgatttaacttccatttgtaaaattttccatagccttgccttcaaaaagaggtccccagggcctgtagcatttcccgtattataaattgtatgctaaaatatggctgtttgtatactacttaattcttcttgctaaattataaacccactggggcaccaactataatagcaagtactagtagggtaatgttttgatggaattcatggtttaacacttaggccctgtcccttaagtt

SEQ ID NO: 157479 - DNA, 441 bp, Homo sapiens
  misc_feature (1)...(441): n = a,t,c or g
ctaaagcagcagattgaggagcagcgggtgcaggtgcaggtggtggagcgggcccagcaggtggcagtgcaggagcaggagatcgcccgagccgaggctgagcagatggccaagaaggcagaagcttccagctgtaccaagaggctgctcagctggacatgctgctagagaagctgccccaggtggcagacggagatcagtggtcccttgacttcagccaataagatcacactggtgtccagcggcagtgggaccatgggggcagccaaagtgactggggaagtactggacattctaactcgcctgccaagagagtgtggaaaagactcacaggccgtgacaatcctcccaaggttgaatcacaaagccttttgaagaacagccttgagccttcagccctcacagatgcccagcctcatagctgaanttgctgaatgattc

SEQ ID NO: 157480 - DNA, 1807 bp, Homo sapiens
tcgagcaacggggtgcgcagaggtggggaacgcgggacgggccagctcccaggaaagctggtctgcgagcggcccctgcccggctcccaggtccctgcgcgaccccgcccttcccgagaccccagccgggctgccgccgcgtcccggaagctccagcctgaaccatgtttttcacttgtggcccaaatgaggccatggtggtctccgggttctgccgaagccccccagtcatggtggctggagggcgtgtctttgtcctgccctgcatccaacagatccagaggatctctctcaacacactgaccctcaatgtcaagagtgaaaaggtttacactcgccatggggtccccatctcagtcactggcattgcccaggtaaaaatccaggggcagaacaaggagatgttggcggccgcctgtcagatgttcctggggaagacggaggctgagattgcccacattgccctggagacgttagagggccaccagagggccatcatggcccacatgactgtggaggagatctataaggacaggcagaaattctcagaacaggttttcaaagtggcctcctcagacctggtcaacatgggcatcagtgtggttagctacactctgaaggacattcacgatgaccaggactatttgcactctttggggaaggctcgaacagctcaagtccaaaaagatgcacggattggagaagcagaggccaagagagatgctgggatccgggaagctaaagccaagcaggaaaaggtgtctgctcagtacctgagtgagatcgagatggccaaggcacagagagattacgaactgaagaaggccgcctatgacatcgaggtcaacacccgccgagcacaggctgacctggcctatcagcttcaggtggccaagactaagcagcagattgaggagcagcgggtgcaggtgcaggtggtggagcgggcccagcaggtggcagtgcaggagcaggagatcgcccggcgggagaaggagctggaggcccgggtgcggaagccagcggaagcggagcgctacaagctggagcgcctagccgaggcagagaagtcccaactaattatgcaggcggaggcagaagccgcgtctgtgcggatgcgtggggaagctgaggcctttgccataggggcccgagcccgagccgaggctgagcagatggccaagaaggcagaagccttccagctgtaccaagaggctgctcagctggacatgctgctagagaagctgccccaggtggcagaggagatcagtggtcccttgacttcagccaataagatcacactggtgtccagcggcagtgggaccatgggggcagccaaagtgactggggaagtactggacattctaactcgcctgccagagagtgtggaaagactcacaggcgtgagcatctcccaggtgaatcacaagcctttgagaacagcctgagccttcagccctcacagatgcccagcctcatagctgaagttgcctgaatgatcctcctgttgcatgtaacccactggcctccctgagcatgtccattgacagtgaggtcccaccctcatctctccttgccaaatagtttgtgccttgtcttgaagggtgattgccaactccagcggtcccatgtcagccttctgatgatcccactccaccccacctcaacttatttaacttcctaattaaatcagactgtttgagcctgttgtctagaatattttcctgaccaagactgagggatgggctggaggttttcaactttgctacccaaataaattgctgtaagtaagtactaaaaaaaaaaa

SEQ ID NO: 157481 - DNA, 867 bp, Homo sapiens
  misc_feature (1)...(867): n = a,t,c or g
gggtggggtgtagtgaggggcttagggagaaacagcctagggggactctaaattaggggtgggaattattagtgaccaaagtgaggaaggatgatcagtggaacgaggaccttaaaacccagagtaagttgttttatgaggaatgtggtcagatcatgggcactgagtgggtgtctctctcctgccaggtggcagaggagatcagtggtcccttgacttcagccaataagatcacactggtgtccagcggcagtgggaccatgggggcagccaaagtgactggggaagtactggacattctaactcgcctgccagagagtgtggaaagactcacaggcgtgagcatctcccaggtgaggtctcaggttggagctgaggagaattgctaggttccttgtgtgtgtgacacagtatgcctagcatttaaccagcatccaggcctgggagtcattgatgtttattaatcactttctgtgtgccagacacagtgctaagcttctacataaatgagttgttttaaatcaaactaccattagggtatataggattttacaaagtccagaaactcaacatccagcatgttcctactcattctgctagtgcagctggagtgaaatccaggtcgactgtctctgcaacctgtgcttgtggtcaccccactagtatagggaactagttgcagcctattgacagttaattaattctagggcatatcactgcttttctcagcgcccccagttaaantccacctgtagatcatggtagaagtcagcaaacaggctctgggaaccactgttttgttgcgaatccctagctacaatgcctgctagctgttaatcttgggacaagtaatcaacctctctatac

SEQ ID NO: 157482 - DNA, 1887 bp, Homo sapiens
agcaacggggtgcggcagggtggggaacgcgggagcggggccagctcccaggaaagctggtctgcgagcggcccctgcccggctcccaggtccctgcgcgaccccgcccttcccgagaccccagccgggctgccgcccgcgtcccggaagctccagcctgaaccatgtttttcacttgtggcccaaatgaggccatggtggtctccgggttctgccgaagccccccagtcatggtggctggagggcgtgtctttgtcctgccctgcatccaacagatccagaggatctctctcaacacactgaccctcaatgtcaagagtgaaaaggtttacactcgccatggggtccccatctcagtcactggcattgcccaggtaaaaatccaggggcagaacaaggagatgttggcggccgcctgtcagatgttcctggggaagacggaggctgagattgcccacattgccctggagacgttagagggccaccagagggccatcatggcccacatgactgtggaggagatctataaggacaggcagaaattctcagaacaggttttcaaagtggcctcctcagacctggtcaacatgggcatcagtgtggttagctacactctgaaggacattcacgatgaccaggactatttgcactctttggggaaggctcgaacagctcaagtccaaaaagatgcacggattggagaagcagaggccaagagagatgctgggatccgggaagctaaagccaagcaggaaaaggtgtctgctcagtacctgagtgagatcgagatggccaaggcacagagagattacgaactgaagaaggccgcctatgacatcgaggtcaacacccgccgagcacaggctgacctggcctatcagcttcaggtggccaagactaagcagcagattgaggagcagcgggtgcaggtgcaggtggtggagcgggcccagcaggtggcagtgcaggagcaggagatcgcccggcgggagaaggagctggaggcccgggtgcggaacccagcggaaagcggagcgctacaagctggagcgcccagccgaggcagagaagtcccaactaattatgcaggcggaagcaaaaagccgcgtctgtgcggaatgcgtggggaagctgaaggcctttgcccatagggccccgaaccccgagccgaaggctgagcagatggcccaagaaggcagaagccttcccagctggtaccaagaggggtggctcagctggacatgctgcgtagagaaagctgccccaggtggcaggaggagatccagtggtcccttgaacttcagcccaataagatcaccactggtgtccagcggcaagtgggaccatgggggcagcccaaagtgacttggggaagtactggacattctaaactcgccctgcccagcagagtgtggaaagaactcacagggcgtgagcatcttcccagggtgaatcaccaagcctttgaagaacagcctggagccttcagcccttcacagatgcccagcctcattagctgaagttgccttgaatgatcctcctgttgcatgtaacccattgggcctccctgagcatgtccattgacagtgaggtcccacccctcatctctccttgccaaataagtttgtgccttgtcttgaagggggttgctcccctttgccaaccctcacactgctatgatttgccaacttccagcggtcccatgtcagcgcttctgatgatcccacgtccagccccaccctcgacttatttaacttcctaattaaatccagactgtttgagcctgttgtctagaatattttcctgaccaagactgagggatgggctggaggttttcaactttgctacccaaataaattgctgtaagtaagtactaataaaaaaaaa

SEQ ID NO: 157483 - DNA, 477 bp, Homo sapiens
ttttttttttttttttttgagagagagtcttactctcttgcccaggctggcgtgcagtggcacaatctcagctcactgcaacctctgccttccgggttcaagcgattctcctgcctcagcctcccgagcagccgggaccacgagcgtgcaccatcacacctggctgttgtatttttagtagagatggggtttcaccatgttggccaggctagtctcgaactcctgacctcaagtgatccacctgccttggcctcccaaagttctgggattacagtcgtgagccaccacgcccggcctggaattttaaattctatcaacagattcacataggctttttccagtacattaaagaaaaagactctcatataacagaactaagttgcatgttacctttgaggagtgaggttaaatgaattaaagcatccacacactcatatttgtaaacctttaaatgggaaattatggagagattaagat

SEQ ID NO: 157484 - DNA, 646 bp, Homo sapiens
atggagttgaggttgtctgccaacgctaactggccagctctgacaggaggtgcgtggcccaggaggagccatcaggccagttctctgggatactgctgtgtctccagctctgcagtttgctctgcgtcactcagcggcagacggagaggcagacacgagccccttgtgagccctcctccttaccgtcatctcacaatgctctgaaataaggaggcaaatggctgaggtcccctcagttgtagatgtgattgagttctatctaccagaagcatatgcctcctggaagcctggttctaacacctcccacaaaatccttcaagcacttttttctgttccaaggtttgcttatgggggacccagtgaagtgcttcagagccctagagatttgctgagtcatatgaggggtcagcaaacttttcctgtaaagggtcagataataaacattttaagctttgtagactgtataaagtctctgtttcttctccccctcctcctcctctttctccttcagcttctttcctttaaatatgtacaaaacctttcttcttttccaaaatctgtctatatttgacctgtgagctgtagtgtgctgagtcctgcattagtaggaaagatcttgagtttcagaatgacgatgtatagcagg

SEQ ID NO: 157485 - DNA, 499 bp, Homo sapiens; identical to SEQ ID NO: 133088
  misc_feature (1)...(499): n = a,t,c or g

SEQ ID NO: 157486 - DNA, 521 bp, Homo sapiens
ttttgctttgttccaataaaactttatttacaaacacaggctgtgggctggatttggcctgcaggctgtagtttgtgatccttgattcagacagtttagcaaggctgaaaagaacaccaacacccccttgttacccacagatgggtgggacttggccagaggccaagaggagggtgctcgcaggggaacatacagcgtgtagaggccgggaggtgctccagggcacgaagtgtgggaaagtgggacagaaagcgtgatgtcaagttggaggcggagcgctgctggggcgtgaagagtctcgagtccaagtgagggagttaggaacttgggagggtttgttgttgggtcggggacctggggtcagccaggtggtgacctgggatggggtggggacaggaaatgagttaagctctgctctttatttttttgcagatgcttttctcaaactttcctgatcctgcgggcaagctaaaccagttccggaagaacctgcgggaatcgcagcagctccgatgggatga

SEQ ID NO: 157487 - DNA, 871 bp, Homo sapiens
atggctctgggcttgggccaaagccgctctgcagggatgcgccggggcgcgcggggcccggccgccatggtgcagctggaggggcctcgggtccgcggagcccggaacccacccgggcagcccggttcctcccgagccgacagcctgaaatttcaaaaaggattcaagcctctaagaattaaaatgtttgaggcacagagctgtatatacaataacagtgaaattgatcccactactaattatgacaaaaatgatcttccacgtaaacaggtggtgaagctccttatggtcctgaccctacagttcctgtcccatgaccagggccagctcaccaaaggagctgcagcagttcgtcgtgagtggcagccccatgcgagcacccgaggaagaacctgaggacccagacacggagcggtcggccttcatggagcgggatgctgggagcgggctggtgatgcgcctccgcgagcggccagccctgctggtcagcagcacaggctggacagggtcggtggatctgggtgtctgtctgcacacgtcctgcagtggcctggacctgcccatgaaggtggtggacatgttcgggtgctgtttgcctgtgtgtgccgtgaacttcaagtggcaggagcagaacccgaatctttctggggatagcttcacagatccaccgctgaggaggaaacagtgcagagcgagctgcccacatttacatgagctggtgaaacatgaagaaaatggcctggtctttgaggactcagaggaactggcagctcagctgcaggtgcttttctcaaactttcctgatcctgcgggcaagctaaaccagttccggaagaacctgcgggagtcgcagcagctccgatgggattag

SEQ ID NO: 157488 - DNA, 1353 bp, Homo sapiens
atgccaggactgagagtgaagatgccctgtggaccaggcatctcccaggatgaagctgtttggtctatggatgacaattttgaggtgaacaaacaacatcctgtttggagggctgctactctggctaaagactgtaaaaatcagtcagctcaggctgtgaccgtctacaacaagccggcatctttctttaaagaggcacctctggacctgcagcaccggctcttcatgaagctgggcagcacgcactctccgttcagggcccgggtttttttctgctccttcatctcagaacctgaggacccagccacagagcggttggccttcacagagcgggatgctgggagtaggctggtgacacttctccacgagcggccagctctgctggtcagcagcacaagctggacaggcaaagggcctctgagggagtattacagccgcctcatctaccagaagcatttccagcacatccaggtctgcaccccctggctggagggccgaggactaccccctgcttatagggtcggcggacctgggttgtctgtctgcacacgtcctccaagtggcctggacctgccccatgaaaggtggtggacatgttcgggtgctgtttgcctgtgtgtgccgtgaacttcaaggtgtttacatgagctggtgaaacatgaagaaaatggccctggtctttgaggactcagaggaactggcagctcagctgcagatgcttttctcaaactttcctgatcctgcgggcaagctaaaccagtttccggaagaacctgccggagtcgcagcagctctgatgggatgagagctgggtgcagactgtgcttcctttggttatggacacataactcctggggccagaggctattaaaaccccagggcccctgctgtccttcccgcagcttcttcttgggagtctcagggcaaacccctttcgagcagcacctcccagtggccagaagctgaaatgacagcagtggtactgcctggtaaaagaattggttctgtgacccgggaagctttggttggccttgatttcttctcttggaaggcttgggaaacgctttcctctcttcttctgttcttcacgccccatgcccctgctagcgtattactgttctgtgacttccctgtgacctctgcagaactcctcatcctgcgtttggtctccaggtgtcccctttctgccgtgttcctaacattttgattcctgtcttgaaaaaagcacctgctgcaccgtaagcccagggatgtggcagctgcagtgggcttggctttgtgaggaactgagtgtgtccacgttgggggaacatcatacttgatacacacgtttttatttgcacaaaaaaaaaa

SEQ ID NO: 157489 - DNA, 2597 bp, Homo sapiens
ctgaaggtaaaattttccagatacggcagacggctttcagagtacaataaacagggaatgagaactatttacatggaagtttctttctcatgatgcggtggagaagcctcggccacttggttctgccagatgttcctggggttactgtaaatgggaaggacaggcagagctaaacaaggtttatcatttaaaagtgcctgytgtgaagtcacttttgctggaaaactgcagcttggagctttctttgtattcacatcccactcttctgtcaagtacactttaccctgaccttatgagtggatgaagatacctcagttgtctgactttgccaattgcttaatttcagaatttaaaaaggggaaagaaaaacatcctgctaaaatatgaacatctgagtgtcttattttccaacatcgtcaatagctgtgagcgtcagcattaaatattctcccaaggagtgccatgatattgaagtcactttattaataacagctgtatctgcaaaacagtcaagagactcggacgttgaaagccagagatgacactgagcatgcttttattgcggcctaccatctttaagtgggacatattgattgatgagtgattgcctgtccatacactctctcatcatcctgttccttggattggacttcactaagcaatttatcactcaccttcagacttacatgtgggagttttcacaacagtagttttggaatcattagaacttggattgatttcatcatttaacagaaacaaacagcccaaattactttatcaccatggctttgaacgttgccccagtcagagatacaaaatggctgacattagaagtctgcagacagtttcaaagaggaacatgctcacgctctgatgaagaatgcaaatttgctcatccccccaaaagttgtcaggttgaaaatggaagagtaattgcctgctttgattccctaaagggccgttgttcgagagagaactgcaagtatcttcaccctccgacacacttaaaaactcaactagaaattaatggaaggaacaatttgattcagcaaaaaactgcagcagcaatgcttgcccagcagatgcaatttatgtttccaggaacaccacttcatccagtgcccactttccctgtaggtcccgcgatagggacaaatacggctattagctttgctccttacctagcacctgtaacccctggagttgggttggtcccaacggaaattctgcccaccacgcctgttattgttcccggaagtccaccggtcactgtcccgggctcaactgcaactcagaaacttctcaggactgacaaactggaggtatgcagggagttccagcgaggaaactgtgcccggggagagaccgactgccgctttgcacaccccgcagacagcaccatgatcgacacaagtgacaacaccgtaaccgtttgtatggattacataaaggggcgttgcatgagggagaaatgcaaatattttcaccctcctgcacacttgcaggccaaaatcaaagctgcgcagccgcggccgcggccacagtcatgactcagtcgactgccaaagcaatgaagcgacctctcgaagcaactgtagacctggcctttccccctggtgctcttcatcctttaccaaagagacaagcacttgaaaaaagcaatggtaccagcgcggtctttaaccccagcgtcttgcactaccagcaggctctcaccagcgcacagttgcagcaacacgccgcgttcattccaacagggtcagttttgtgcatgacacccgctaccagtattgtacccatgatgcacagcgctacgtccgccactgtctctgcagcaacaactcctgcaacaagtgtccccttcgcagcaacagccacagccaatcagataattctgaaataatcagcagaaacggaatggaatgccaagaatctgcattgagaataactaaacattgttactgtacatactatcctgtttcctcctcaatagaattgccacaaactgcatgctaaataaaagatgtaggttcttctggacagaccacaactctaagaagctagtgctgctatctcatatatgagtattaaatatggtatgcttagtatattccaacctaagatagttaactacctgagaccagctgtgatgtttaaagacataaaggataaagtttacttttaaagggtttctaaacatagtttctgtcctaggaatattgtcttatctccataactatatagctgatgcagaaagtccagccagtttactcatttcgattcagaatatttcaaatttagcaataaacaattagcattagttaaaaaagaaacatattccaagggcaggttcgattctagctctaattactgtcatgtcatttacccactggatcaaagggtatgtttcacttcttgacaatataaatgctgcagcaaagatgagaggtgaagtaaaaccgatacctgtcctgcaggtctaaaatttgaatggaaattcaagcacaagtactggggacacatcaaagtgtggtgtttggtttgcctggagatgccacgttgaatcatgtgattctagagtcgacctgcaggcatgc

SEQ ID NO: 157490 - DNA, 585 bp, Homo sapiens
gctcttcatcctttaccaaagagacaagcacttgaaaaaagcaatggtaccagcgcggtctttaaccccagcgtcttgcactaccagcaggctctcaccagcgcacagttgcagcaacacgccgcgttcattccaacaggtatgtgcccttactgccctacgtcctgtgcccttctggtcatgtgctttcttctcatttctctaagctgtttggtggcatctagtttgcttttgaaggtataatacagtttgaaattcatcgttgtcctagctatctaaatgtatttaccttactttgaatgatagctaaagactgttaggattctaaagccaaatatttgatagattgaagagacagatttaacccatgagaaacagcagttagggcttttggtttcttgtatttgcacaagccctgtaaaattgtttatgtaaataaggcctcttatgtgtgacaattgaaatttgtccttaactctgaatgacctaaaaatagcaattccagtaaatactaaccatttttttctatttctattcagagcactaaaacaatgaggctattcaaattaaagcaattctacgaaa

SEQ ID NO: 157491 - DNA, 562 bp, Homo sapiens
ccgcggcacgagtcatgactcagtcgactgccaaagcaatgaagcgacctctcgaagcaactgtagacctggcctttccccctggtgctcttcatcctttaccaaagagacaagcacttgaaaaaagcaatggtaccagcgcggtctttaaccccagcgtcttgcactaccagcaggctctcaccagcgcacagttgcagcaacacgccgcgttcattccaacagataattctgaaataatcagcagagacggaatggagtgccaagaatctgcattgagaataactagacattgttactgtacgtactatcctgtttcctcctcagtagaattgccacgaactgcatgctaaataaaggatgtaggttcttctggacagaccacaactctaaagaagctagtgctgctatctcatatatgagtattaaatatggtatgcttagtatattccaacctaagatagttaactacctgagaccagctggtgatgttttaaagacataaaggataaagtttacttttaaagggtttctaaacatagtttctgtcctaggaatattg

SEQ ID NO: 157492 - DNA, 687 bp, Homo sapiens
  misc_feature (1)...(687): n = a,t,c or g
atgactgccttctttgtgaaacctgctaatgtttgccagctgccacattggaatgatataatttctaacagtttgtactgggaacgatacaagaagagagaaaatgcttcttctagttctacctgctcgtcgggccaggtcagtttcctagaaaagaaggtgctagctatggaagacaagcacatcatccaactacagtcaataaaagaagagaaagatcagctacaggtgttagtatccaagcagaattccatcattgaagaactcgaaaaaaaaatagtgactgccacggtgaataattcagttcttcagaagcagcaacatgatctcatggagacagttaataacttactgactatgatgtccacatcaaactacctacagatagtgatggaaatgtcacaagctttcttccaaaagcactgcagaactcctaataaagaatggaaattctcaggcggtgggggagtcaatagagggcagcggggatgccgagtcaagcccacagctgtcacaccagaagcacacccctcaccccgagtgggaacaaatgtggaaaatctgggaaatggtgagcaggccagttttggcacatacccttgtttccgcttcaccccggaganngggaatcatatcgaagagtacagtttctgttttggagaggaatggaagaagaaaggaaaatga

SEQ ID NO: 157493 - DNA, 1706 bp, Homo sapiens
tcaggggacaatgtttacatctcctggttttctcctggggctgtcatttgccatgggcatgatgaccgctgtgtgtagactcagcgtttcttgttccaggtcccccaggtggaagctggcatatgtgagcagactcatcctcatcggaagagagtatctagaagtggccctggtgacattagccactggtaagccctctccaacctccttcctgcagctcaggaagtccttgctgtactggcctccccgttgttcctgcaagcattttcctccatcaggacatttgttcctgctgttacctccagctgaaacatggattttgacagagtcacaggctccctctccctccccaggcctgtgatcggatgtcaccttctcagggaagccttcgttggtcaccttatttccactgtatcctccgggtaagttttccttctcttctgtagacgtctccatgttacagtcaactataaaacatggctcatgttcactctgggcttcgccttcagaggagtttgatattttggaagtggtacctttgttctgtgtgcttttcagaccaaccgcttctttcatttcttcaaggcttccttccaaaggagttaaatcatcatcatgtccttttgggaaggaggcaggggtcctcaatgggtgtaaggaaaaggccattttccctctgggggcatgcgtcttctttcccagcctgtctacaacaccttagggcttcttcaggggcagaagtcacgcaactcgaagttgcacggccttcaccatttccagttttccgaggactggagatggtttttgctgtgaaattggtaatgtcaactgttctggtttttttgccaacgcaggaaaaatcagacatttcaaatatgcttgttctctccttcttagaaagacttctgcagctcaactgagcagggcttgatggcagctgagattcaggaggaagattctctgaatacctttccttaagattatcaggtgaaaaatagtcatcatatgaagactccccacagctaagagcctccagggcaggtcccgccacgtgctgcagcctgtcttccgacctgcacagctgcagcctcggcatgatagatctcctggtgctcctctttctcttgcatttttccttcggaggtgaatgggagccatgtgatactctttttctctttactgaggaactcctgggtcttgaatgtatcaaaaggtggccttttgttgaagataaggtaggagacaaacgatacttctcttcaaacgtctcctgagacatacctgcagcctgcttttggtcaggggtgactactttacctgcaatatttctttgcaagtttatttcttcctttgaaagattactcagaaatttctgaggacttgatttatcgaggtgagtgaaagatggtgatgaatgaatattatttgctttcaatacaagtgaagaaatacacacatcacttttaatgtcattaatggatccttccaacttcctttcctgatttccacatcctgagtttccacaaagatcatcaaaagatgagtgtaagccaccagcaaagtattcatacagacaatgagaaattggaatttctttgtcaccagaactgaaatctgctgagggcgatgagagagctgctgtagagaagttctcataggcatactcttctctgggtagcattggaaactttcgaattcttactttt

SEQ ID NO: 157494 - DNA, 2613 bp, Homo sapiens
atggcggaaacagcggttatcaatcacaagaaacgtaaaaatagcccgcgaatcgtccagtcaaacgacctcactgaggcggcatatagtctctcccgggatcaaaaacgtatgctgtatctgttcgttgaccagatcagaaaatctgatggcaccctacaggaacatgacggtatctgcgagatccatgttgctaaatatgctgaaatattcggattgacctctgcggaagccagtaaggatatacggcaggcattgaagagtttcgcggggaaggaagtggttttttatcgccctgaagaggatgccggcgatgaaaaaggctatgaatcttttccttggtttatcaaacgtgcgcacagtccatccagagggctttacagtgtacatatcaacccatatctcattcccttctttatcgggttacagaaccggtttacgcagtttcggcttagtgaaacaaaagaaatcaccaatccgtatgccatgcgtttatacgaatccctgtgtcagtatcgtaagccggatggctcaggcatcgtctctctgaaaatcgactggatcatagagcgctatacggccaccatcgccaccactcaaaggtgcgcacagatacagacaaagaggggcgtgagggagctgcctgcaggggaagaagccttccgtatcgagctgggcggtcattacacaggctctaatctggagcatgtgggtcccgtcagcaccgagcacacgccctctgtggtggaagaggacacagtgcgcagccgtgactttcagtgcactgggcttaagtctttgaaaatagttcgagacagttcctcagcctataacaactttcggaagagcatggacagcataggaaagaagcaatatcaggtccagcatgggtcctgcagctacactttcctcctgccagagatggacaactgccgctcttcctccagcccctacgtgtccaatgctgtgcagagggacgcgccgctcgaatacgatgactcggtgcagaggctgcaagtcggcgacaactcaatcgacagctggaaaaacgcgggccgtgtctttaaagacagcgataagtgggacgccaacgatccgatcctgaaagatcagacgcaagaatggtccggttctgcaacctttacatctgacggaaaaatccgtttattctacactgactattccggtaaacattacggcaaacaaagcctgacaacagcgcaggtaaatgtgtcaaaatctgatgacacactcaaaatcaacggagtggaagatcacaaaacgatttttgacggagacggaaaaacatatcagaacgttcagcagtttatcgatgaaggcaattatacatccggcgacaaccatacgctgagagaccctcactacgttgaagacaaaggccataaataccttgtattcgaagccaacacgggaacagaaaacggataccaaggcgaagaatctttatttaacaaagcgtactacgggggcgggacgaacttcttccgtaaagaaagccagaagcttcagcagagcgctaaaaaacgcgatgctgagttagcgaacggcgccctcgaattggaaaaaactactttaaagttcatatggaaccaaaaaagagcccgcattgccaaatcaatcctaagccaaaagaacaaagctggaggcatcaagctacctgacttcaaactatactacaaggctacagtaaacaaaacagcatggtgcgcacagatacagacaaagaggggcgtgagggagctgcctgcaggggaagaagccttccgtatcgagctgggcggtcattacacaggtggatgttctgagacactgtcccagggctccttgggagatcctgtggggcttcttaccagccagcgcggcggtggccgcctgagtccacgtgtgcgaaccaccctgcggcgcccctgcctcccgcgcctgttcggcatggctgcgctctgggaccactgcctaaataaacttcctgcatgcctgcctttgtctcaggctctgcttttggggaaacccaagctaaggcagtgtgagaatctgctggtggtgcctctgagaagaggactgagaaccgcctgtgaaccccgcaatttcgtgggtgtggtggaagcaaaggcagagcgtgtgaacagcatttataaccacggtgtacctcggaagaagcgttctcagagcaacatgcacgtgttcccagctaacgaccccactgttgctaaagaagaacaaatcagcttcagagactgtgctgaagtattcaaatcaggacacaccacgaatggcatctacacgttaacattccctaattctacagaagagatcaagcccacagctgtcacaccagaagcacacccctcaccccgagtgggaacaaatgtggaaaatctgggaaatggtgagcaggccagttttggcacatacccttgtttccgcttcaccccggaggggagggcttgtggtgccctctccctgcctccactcaccttccaacaagtgctggagtttgattcacaccaaacagaaatagccaaaatttgtaagaactctattgggcagctcttctgtatcaatgactgtacaggctccaagggccagaaataa

SEQ ID NO: 157495 - DNA, 2271 bp, Homo sapiens
tgggttggtgtttatctcctcccagccttgagggagggaacaacactgtaggatctggggagagaggaacaaaggaccgtgaaagctgctctgtaaaagctgacacagccctcccaagtgagcaggactgttcttcccactgcaatctgacagtttactgcatgcctggagagaacacagcagtaaaaaccaggtttgctactggaaaaagaggaaagagaagactttcattgacggacccagccatggcagcgtagcagccctgcgtttcagacggcagcagctcgggactctggacgtgtgtttgccctcaagtttgctaagctgctggtttattactgaagaaagaatgtggcagattgttttctttactctgagctgtgatcttgtcttggccgcagcctataacaactttcggaagagcatggacagcataggaaagaagcaatatcaggtccagcatgggtcctgcagctacactttcctcctgccagagatggacaactgccgctcttcctccagcccctacgtgtccaatgctgtgcagagggacgcgccgctcgaatacgatgactcggtgcagaggctgcaagtgctggagaacatcatggaaaacaacactcagtggctaatgaagcttgagaattatatccaggacaacatgaagaaagaaatggtagagatacagcagaatgcagtacagaaccagacggctgtgatgatagaaatagggacaaacctgttgaaccaaacagctgagcaaacgcggaagttaactgatgtggaagcccaagtattaaatcagaccacgagacttgaacttcagctcttggaacactccctctcgacaaacaaattggaaaaacagattttggaccagaccagtgaaataaacaaattgcaagataagaacagtttcctagaaaagaaggtgctagctatggaagacaagcacatcatccaactacagtcaataaaagaagagaaagatcagctacaggtgttagtatccaagcaaaattccatcattgaagaactagaaaaaaaaatagtgactgccacggtgaataattcagttcttcaaaagcagcaacatgatctcatggagacagttaataacttactgactatgatgtccacatcaaactcagctaaggaccccactgttgctaaagaagaacaaatcagcttcagagactgtgctgaagtattcaaatcaggacacaccacaaatggcatctacacgttaacattccctaattctacagaagagatcaaggcctactgtgacatggaagctggaggaggcgggtggacaattattcagcgacgtgaggatggcagcgttgattttcagaggacttggaaagaatataaagtgggatttggtaacccttcaggagaatattggctgggaaatgagtttgtttcgcaactgactaatcagcaacgctatgtgcttaaaatacaccttaaagactgggaagggaatgaggcttactcattgtatgaacatttctatctctcaagtgaagaactcaattataggattcaccttaaaggacttacagggacagccggcaaaataagcagcatcagccaaccaggaaatgattttagcacaaaggatggagacaacgacaaatgtatttgcaaatgttcacaaatgctaacaggaggctggtggtttgatgcatgtggtccttccaacttgaacggaatgtactatccacagaggcagaacacaaataagttcaacggcattaaatggtactactggaaaggctcaggctattcgctcaaggccacaaccatgatgatccgaccagcagatttctaaacatcccagtccacctgaggaactgtctcgaactattttcaaagacttaagcccagtgcactgaaagtcacggctgcgcactgtgtcctcttccaccacaagagggcgtgtgctcggtgctgacgggacccacattgctccagattagagcctgtaaactttatcacttaaacttgcatcacttaacggaccaaagcaagaccctaaacatccataattgtgattagacagaacacctatgcaaagatgaacccgaggctgagaatcagactgacagtttacagacgctgctgtcacaaccaagaatgttatgtgcaagtttatcagtaaataactggaaaacagaacacttatgttatacaatacagatcatcttggaactgcattcttctgagcactgtttatacactgtgtaaatacccatatgtcct

SEQ ID NO: 157496 - DNA, 2828 bp, Homo sapiens
atgccgaacaggcgcgggaggcaggggcgccgcagggtggttcgcacacgtggactcatgcggccaccgccgcgctggctgcccacagctgtcacaccagaagcacacccctcaccccgagtgggaacaaatgtggaaaatctgggaaatggtgagcaggccagttttggcacatacccttgtttccgcttcaccccggaggggagtttcctagaaaagaaggtgctagctatggaagacaagcacatcatccaactacagtcaataaaagaagagaaagatcagctacaggtgttagtatccaagcaaaattccatcattgaagaactagaaaaaaaaatagtgactgccacggtgaataattcagttcttcagaagcagcaacatgatctcatggagacagttaataacttactgactatgatgtccacatcaaactcagctaaggaccccactgttgctaaagaagaacaaatcagcttcagagactgtgctgaagtattcaaatcaggacacaccacgaatggcatctacacgttaacattccctaattctacagaagagatcaaggcctactgtgacatggaagctggaggaggcgggtggacaattattcagcgacgtgaggatggcagcgttgattttcagaggacttggaaagaatataaagtgatgaccgatgtaagccgtatttttgcaattcagcttacaatggttcaacttaagatttttcgactttacgatgtgatatgtggcacgatgctccctcatgatgccaggcagcggcagcgagccacaggtcccagtcagtcctgtgatccccagggtgaacaacagacactgcgtgcaccgtgttgccaaatggctctgtctgactgtgggctaatgattcaccttaaaggacttacagggacagccggcaaaataagcagcatcagccaaccaggaaatgattttagcacaaaggatggagacaacgacaaatgtatttgcaaatgttcacaaatgctaacaggagatgaatactttgctggtggcttacactcatcttttgatgatctttgtggaaactcaggatgtggaaatcaggaaaggaagttggaaggatccattaatgacattaaaagtgatgtgtgtatttcttcacttgtattgaaagcaaataatattcattcatcaccatctttcactcacctcgataaatcaagtcctcaggaaatttctgaggtaatctttcaaagggaggaaataaacttggcaaaggaaatattgcagggtaaagtagttcacccctcacccaaaaggcagggctgcagggtatgtcttcagggaggacgtttggaggagaggtatccgtttgtcttcctacccttattcttccaacaaaagggccaccttttggatacctttcaggacccgggagttcctcagtaaagagaaaaagagtatcacatggctcccattcacctccgaaggaaaaatgcaagagaaagaggagcaccaggagatctatcatgccgaggctgcagctgtgcaggtcggaaggcaaggctgcagcacgtggccgggacctgccctggaggctcttatctgtggggagtcttcatatgatgactatttttcacctgataatcttaaggaaaggtattcagagaatcttcctcctgaatctcagctgccatcaagccctgctcagttgagctgcagaagtctttctaagacggagagaacaagcatatttgaaatgtctgatttttcctgcgttggcaaaaaaaaccagaacagttgacattaccaattttacagcaaaaaccatctccagtcctcggaaaactggaaatggtgaaggccgtgcaacttcgagttgcgtgacttctgcccctgaagaagccctaaggtgttgtagacaggctgggaaagaaaacgcatgcccagagggaaatggcttttcttacaccattgaggaccctgctcttccaaaaggacatgatgatgatttaactcctttggaaggaagccttgaagaaatgaaagaagcggttggtctgaaaagcacacagaacaaaggtaccacttccaaaatatcaaactcctctgaaggcgaagcccagagtgaacatgagccatgttttatagttgactgtaacatggagacgtctacagaagagaaggaaaacttacccggaggatacagtggaaataaggtgaccaacgaaggcttccctgagaaggtgacatccgatcacaggcctggggagggagagggagcctgtgactctgtcaaaatccatgtttcagctggaggtaacagcaggaacaaatgtcctgatggaggaaaatgcttgcaggaacaacggggaggccagtacagcaaggacttcctgagctgcaggaaggaggttggagagggcagccggaatgatgctctgaagaccttgttggacagtgcactcttcactcaaacctgcagcagatggaatgatgctctgaagaccttgttggacagtgcactcttcactcaaacctgcagcagctggaacgatgctctgaagaccgtgttggaccatgcactcttcactcaaacctgcagggctcccgcatctcttctggagcagaagcccacctgccagttcatcccgactgtgctgctgcctcctcttccccactggctcagccgtccatcaggccttgtgcatgcagctggccagctccctctccagggaacacttttcccctgcatctacttggccaacttcctgatctcttttaactcattcaccttctcaatgggacagtttagcgctgtggactcgagtccacactcctga

SEQ ID NO: 157497 - DNA, 324 bp, Homo sapiens; identical to SEQ ID NO: 135228

SEQ ID NO: 157498 - DNA, 421 bp, Homo sapiens; identical to SEQ ID NO: 132666

SEQ ID NO: 157499 - DNA, 552 bp, Homo sapiens; identical to SEQ ID NO: 135229

SEQ ID NO: 157500 - DNA, 600 bp, Homo sapiens
catcacttttaaacttctggaacctgcccaccactgcccaagtcacgattgaagcccagccaccaaaagtttccgaggggaaggatgttcttctacttgtccacaatttgccccagaatcttactggctacatctggtacaaagggcaaatcagggacctctaccattacattacatcatatgtagtagacggtcaaataattatatatgggcctgcatatagtggacgagaaacagcatattccaatgcatccctgctgatccagaatgtcacccgggaggacgcaggatcctacaccttacacatcataaagcgaggtgatgggactagaggagtaactggatatttcaccttcaccttataccgggaggccatggaaactgtgatcttaacctgtgatcctgagactccggacacaagctaccagtggtggatgaatggtcagagcctccctatgactcataggtttcagctgtccgaaaccaacaggaccctctttctatttggtgtcacaaagtatactgcaggaccctatgaatgtgaaatacggaactcagggagtgccagccgcagtgacccagtcaccctgaatctcctcc

SEQ ID NO: 157501 - DNA, 551 bp, Homo sapiens
tggagactcccaagccctccatctccagcagcaaattaaaccccagggaggccatggaggctgtgagcttaacctgtgatcctgagactccggacgcaagctacctgtggtggatgaatggtcagagcctccctatgtctcacaggttgcagttgtctgaaaccaacaggaccctctttctattgggtgtcacaaagtacactgcaggaccctatgaatgtgaaatacggaacccagtgagtgccagccgcagtgacccattcaccctgaatctcctccatggtccagacctccccagaatttacccttcattcacctattaccgttcaggagaagtcctctacttgtcctgttctgcggactctaacccaccggcacagtattcttggacaattaatgggaagtttcagctaccaggacaaaagctctttatcccccaaattactacaaagcatagcgggctctatgcttgctctgttcgtaactcagccactggcaaggaaagctccaaatccatgacagtaaaagtctctgactggacattaccctga

SEQ ID NO: 157502 - DNA, 423 bp, Homo sapiens; identical to SEQ ID NO: 101999

SEQ ID NO: 157503 - DNA, 1960 bp, Homo sapiens; identical to SEQ ID NO: 154400

SEQ ID NO: 157504 - DNA, 435 bp, Homo sapiens; identical to SEQ ID NO: 132668

SEQ ID NO: 157505 - DNA, 2008 bp, Homo sapiens; identical to SEQ ID NO: 132672

SEQ ID NO: 157506 - DNA, 14271 bp, Homo sapiens
gaattcggcacgagcagccctgctcaggaaagtctctggatcctaggctcatctccacaggggagaacacacagacagcagagaccatgggacccctcttagcccctccctgacactcagcacatcacctggaagaggctcctgctcacaggtgaggagaggacttcctgggagaggacaggaggaggaagcagagtgactggatggggtatcctggagaggatggggttctaaaaaataaaagaagccagcacttagggaggctgaggtgggtggatcacgagatcaggagttcaagatcagtctggccaacacagtgtagacgtgtctctaccaaaaaatacaaaaaattaaccaagtatggtggtgtgctcctgtaatcccagctttcgggaggctgaggcaggataatcacatgaacccaggaggcagaagttgcagctagccgagacagcaccactgcacgccagcctgggtgacagtacgagactccatttcaaaaaaaaaaaaaaaaaagaataaaaagaagaaagaaaaaaagggaaagaaggctctgttggagcctggataggggaaaatacaccagagagggacaggggtcaaaataggaaagtcacattgaaccggaattggtaagaggtagtaaaatcttaagtgttctgttttcctgattaatcatcaggggccaccacattttgaaaaatgataataatgactatatcagatgacacctcaaataaaaatgtaaccagggcatgaaacactttcctcagcaaaaaacctcaacaattgggggaaaaaaaacacccagggcatggagggccctgagaactctcacatctacaggagtctgcatcctgttccaggcactggggtgcaaccaacatgacaaaagtctctgtcctcacagagctcacactctcatggggaggaagacagacatgcaaagagatatagaatgtgaggtcaggtgttgacaagaaccctagagggagcagagcagggaaaggtcagaaagggaagacccagggtctctgaagcaggcatcaggaaagaagtctaaggatgccctgatgtgagcaggacctgagggcagtgtggagggggccgtgcggacccctggggaagaggattgcaaacagaaaaatgccaaggtcaggagtgttgaaggaatgggggtcatgctgctgaccttgacctagtaggacagtaggacacacacacatacacacacacaaacacacatgcccttttgtgtgtgtgtgtttgtatgtgtgtgtgtgcatatcttcaaggctgatgattgaagagaccttctcaggacacagggccccatcttttcaccccaatacataggtccaaatattaactgatgctgtctctacctcctagcatcacttttaaacttctggaacctgcccaccactgcccaagtaataattgaagccaagccacccaaagtttccgaggggaaggatgttcttctacttgtccacaatttgccccagaatcttactggctacatctggtacaaagggcaaatgacggacctctaccattacattacatcatatgtagtacacggtcaaattatatatgggcctgcctacagtggacgagaaacagtatattccaatgcatccctgctgatccagaatgtcacacaggaggatgcaggatcctacaccttacacatcataaagcgaggcgatgggactggaggagtaactggatatttcactgtcaccttatactgtgagtgattccgcatgatccctgggtgttggggggcaggggtcatttctacttcacacacacagaattgtcaggcctggactctgcctgtgtcactctctgcattatgtcccatgctggggtttgggcatttagtgcaggacacacacagaggagacacatttcaacagatcagaattcctttcccgcatccagaccctgcagacactcgctgcagaggaaggacagtctgatggggggactcagcaggaggagatcagtctcagccaagcacctcatgccctcttcataaatttgaccctgagaaagaccctggaaaactgagtagggcttggcctgaggggcccactgagataccctcagagaacctcagctctggaagcctcaatcccagacccctgtccctaaatccttgctccaggtaaagctgaggagcctgtgccaggactgggttgtggcttctttggcagggcttactgggaccaaggatttaccagctgtctgaggactgtgtctcctggagctgttcaccagccagggctcagtcctcagagcctcatctgggcaaggacagagctttcttcacctgacactcagagtggagaggacagaaagacaagctttgtaggccatcagccaactgccttaggaggcctaggacactccatagaaagtctaatatccccagaagcagaaacagaagagagaagatgcaccaggtagccgtttgtccacagggatctgacgcaaaggtgctttctcatggaagcaaattaataataaatgctgtttgtgtgaacacctccactgtgccaagcattaagtcagttgactgtgaatactttaacatttattcacagatagcatgaaaagccacagtccatttgccatttagctcatttgattgagagaaaactgaggcacaggaaggcacagtcactgagccacagtcacacaaacacaaaggggagatcggggtcacatgaggtctgtctgcagccacaggcccatcctctcctctaccagaagtgagggcttactgggttccaaggaccccatagtcatttattgactcaaatcctctcttcttaggcatccaaacctcagaggagtgagagcaaatggtcagctgattagtctgtactccagaactaaatcactggcttcaaccgccagagtcagtgcaaaaaaaatgtccaggtctccccctcagatcttaacctccatcactgaatgtgaaatcctgtgtttcccaagtgtccatgtcaccgtcatgagaggatcaaggagaggaccttgttttctttccccactcacaccctgcctcagcacaggcccagtgagagagacacactcaggagctctcacataacaaatgaaggaatggaatgaagaaatggatgatccaaaacctctttagagactggatcttggaatcagaatcctaggaggttctagccacacctgtcccttgtccttcagaggctgacacccatgtttcatccccccactacctcttgaccctaaagccaccccacctcatgcaactctgaagttctttggccaccggagggttctcagggctctttggtcctggactgtggagctgggggcacctggtccctggggtttttgaagtcagtgtctccctcactgctcactgccatggtgtctctgcctctctctgcttctctgtgtccctcatcttcctcccacttcattctgactggcaagccctgtcctgcacagcttcttcctccaaccctaggccttccccagacactccctctaactaggctggctgttctgttcccttcccgctaacactgtggcctggcccacctcccaggaaataggaaaggtgcagaaatcacctggagttgccactcctgccaggcttcctctcgagccaatgtccccaggtcactaagagaaaccttccactgtattcccatccagggctctttccctttgtgaggctgacctgtggacaagaccatgggacagggataggcagttcccccatccacccttgtaattgccagacaagttcctctggcctcctgcacacaaaaaaatataaaataaaataaaatttattgaaatggtggtttgcagtaaagaaagattttaagaactccaagtctgccaaacaggagggtggaggtttattattactcaaatcagcctccccagtggatcaggtgttagagattttcaaggatagtttcaggggcacaggactaaaaaatgagtactgctgattggtgatggaatcatgcgggcggagggaaatgatctgttagtgcttgaatctgcctctaggtaggggccacatgactggctgagccattaggcataggtatggatgaggtcagccggttgtcagaaggcaaaagaatgagaaacatttcaaaagaccaatctcacgttctacaatagtgatgttatctataggagcaattataggagcaattaagcccataggctcatttcacccatttcactagtgactccatcctcaacctgctatggagctcacattctccggtcactttctagagacttctggcttcctgtcaggcataaaacaagcttgaaatttgtcactcggttctaacactaagtaaaaagctgaacaaactcaaaagtcaacaactcattaaaatccttcagagatggctgggcacagtggctcacgcctataatcccagcactttgggaggctgaggcgggcacaaggtcaggagatagagaccatcctggctaacatggtgaaaccccgtctctactaaaaatacaaaaaattagctgggcatggtggtggtcacctgtagtcccagctacttgggaggccgaggcaggagaatggcatgaacccaggaggtggagcttgcagtgagctgagatcatgccactgcagctggggtgacagagcgagactctgtctcagaaaaaaaaatgctgttagagaaatgaagaatgcttttgatgcttactgatagaccgcacagagctgaggaaagaatccctagcttgagaatgtgtcaatagaaacttccaaaactgaaacaggaaagctcaaaaagagtggggaaaaaaagcggaacaacatattcaacttcatatttaatattttgttttgacaatagcaatttttaaattttgtagttgtgggacaactacaaaggctgtcacatacacttaacgggaatacttgtggtttggggaccagatggaggtggccaggtaggtcctatctcatggttttactgcctgtgccacatacaactatttcctcatgatgatgccgttttcataagttggagttcttcgtgtggggagacacaagagccattggcatctcacttagactcttcctaattcacacaaacttaaattttagtggtgtttcctgaccttaagagaaaatgaagaagacatttcacatacctgttttggggtcctccccatgttttgtaactctgcacagaaattagaagcaggttctttctatatttactaacataacacacatcacttcttttaatttggcatccttcctccttttatgtaattgacacactaaccagttcggtccttttaacaggactctctctacttaaggagttgctaatttcaaatcacctttggcatctttctttgagcataatgtgatcctgctggaattcatggcacacctaaaccttattttggtctcaagagaaatatgactaccagcaattgatcttagatgtttggaccatcagtaaaaatttccacttatgaaaacattttaaggtttcctccaaattttttttgttactagagtcagaatataacatgaggtctaaactcctgacaactttttatgggaaaattacagtattacaaattgagcatcggaaatccagaaatccacaatctgaaatgctcaaaactcaacacttctgaccactgatgtgatgctaaaaagaagtgctcactcgcgcattgtggattttaaatttttcagatttgggatgctaaaccagtacatatactgcaaatattccaaaataaaaaaaattagaaatccaaaacactttgttttaagctttctgcataaggagcactgtatctgcatgaagtataggcacgaggctgcacaggagatctctagaacctcctcatcctgcataacagaaaccgcacacccacggaacaacgccctatacccgtgatttcagttgctgcaaactactattctaatctctgattccctctggaatccactgatatgaggtacatagagtagtcaaactcagaatcagagagtagaatgtctaataagagaaagtatctgcaagacttcttcccaaatattggtctaatatccaccaaacacataaggtccctgagggccagacttctgtcatctgttcatgtttgccctttccaccagtcagttctgcatttgcaaacatcaacatgtatttctagaaagatccatatggtcctcaactgccctctacagggggaagggagcatcatggacccagaacagggatcatggtcttgggccaaacctatcagctcttgcctgtccctttcactctttgtaggtcattccttggactctgctctatctttagagtcattggctcaactcagtcactatgagacacctggaaaactgccccaccttgtggctccactgcctgatgactgaactgacctccaggcctgactctggtctcccctgtgttatttctgctgaagtacccagttccaggccaggctttctaatacccaaagggcttaaggacaatgggaagttccatcatccatctctaggatgtccttggcaagggaagctgatgagaaaacatacctcagggggcaaagtgagactgaaactaacaagattccagcactgcatgccccaagtaaggaccaaaaggtgggccaggcaggcagttggagacggagggactcagagaggcaccaggggctgtgactgctggtcctgtgtctttccatgacccaatgctgctgctcaattcacatttgagaaagtccatgcttctcctacataaagcaggcagcctcacaatcactgagccctcaggttgccatgcatctgtcttgtaacacacacacctgccatgggcttttaaggacttgggtgggctgagaggttggaaatgccaactctgattgaaaaatgcctttggaggaatcaaaggtgccacacagggcaatcttctctctgttttctgcacagcggagactcccaagccctccatctccagcagcaacttaaaccccagggaggtcatggaggctgtgcgcttaatctgtgatcctgagactccggatgcaagctacctgtggttgctgaatggtcagaacctccctatgactcacaggttgcagctgtccaaaaccaacaggaccctctatctatttggtgtcacaaagtatattgcaggaccctatgaatgtgaaatacgggaacccagtgagtgccagccgcagtgacccagtcaccctggattttcctccgtgaggtatcttctgttcctttgtgagccagggttggcccatcccaaatacaagtgggccagaggccaggcctctcagtccctctcaggtccaagtacagagacctttatccctgaacatcaaagctggccatgactttctgctccaggcaaaccagagtaggcctaggcttgatcaacaataagagagaagaggcttctcctgtcatgggagactcaggttccacagcttgtgatggaagaaacaggtgaatgtctcaggctccagatcagtgaacacagcggggatttggctgggacttcagtgttgcaacttggctcacagggtcactgtgactgtgtcccttccacagaccaggattttcccttccctctgacaatatcgcctgtgacattattctctttgctccgcatggcctggatgctcccaccgtttcttcctcatacacctattaccatacaggggaagtccccaagctctcctgcctcacagactctcacccactggcagagcattcttggctgattgatgggaagttccagcaatcagcacaagtgttctttataccccaaatcactaaaacatatagaggggtctatgtctgtttcatccataactcagccactggtggaacaaatctcataatcaagaggatcatagtccctggtaagtggatccctggagcattggcaccatgttttccagtaaagtctatctagctgtcagggaagagccacctgctctctgcaaagggagagggaaaatcaaaacccaggaaagggaatatgtttctgctccaaaaccaccagcttctgcctgtccccttcactctttctagatcattctttagacaatacactaacaatgaacaatctgaaaggaagttaaggaaagaatttcaattcacattaacatcaaaaggaataaaatattttggaataagtttaaccaaaaaggtcaaatgattataccctgaaaactacaaaacattgctgaaagaaattaaagacgatatcaatatatggaaacacatttcattttcatggattggaagaagcaatattgttagaaaggcaatactacccaattgagttgcagattcaatgcaacccctaccagaatcccagtaacattttttgcagaatttagaaaactctgtcctaaatctgagctgacaggctcttcttaatgactgccacaacacaaacactgagaaaaagaagcaaccagaaaaggtggaaagttctgatgacatagaaaatagcaatcagcctttctcacatcccaaagccttcaaaaatatacgagtgcagcatggccactatggaattcaccgaaaactaatcaccaagctagaaacatggtgagagaaaaaaaagggcaagaatatatctggcttatcacctcccacttttgcctactaatctgatgctgaaaagaaatgctcactgaagcattttacattttgaatctttcagatttgggatgctaaaccagtaagtatatgacaaatatttgagaatcaaaaaatatcagaaatccaaaacactttttgtcctaaaacttatgcataagagataatctgtgtgaactataggcatcaagctctacagcagatctctagaacctctccaacttgtataactgaaactgcacacccatgaacaacttctgattctccccactcccagctcctggcttccagcagcctcgtctcatattcaatctggaatcaacttacatgaggtccctagattagtggaacccatggaatcagagagtagaatgtccaatgaaagaaaatatttgcaaaacttctctccaaatttgtctcatatccatcaaacacacatggtccatgaggactagatttccagcagttcattcccaccctttccaccactcagttctgcatttgcaaatgtccacatgtatttctagaaagatccacatggtcctcacctgccctctgcagaaggagaggaaacttaaagaacccaggacagggaacatgcttctgctccaaagccaccagctcttgcctgtccccttcactctttctagatcattccttgcactctgctctatctttagaggtcactggttcaagtaagtcatcatgaaacacctgcaaaaaaactgccccacctggtgcctctagtgcctgatgactgaactgacctacaggcttgactctggtcttccctgtgttatttctgctgaaacatccagtcccaggccaggctgctcagtatctgcagggtttcaggacaatgggaagtcccattattactcatctctagaatgtccttggaaatggaagctgcagagaaatcacatctaggggggcaaagtaggatgtaatttggaaggggcccagcagttgcacattccaggtaaggaacccagggtgagccagccagtcaactgattatggagggactgggaggggtaccaggggctgtgactcccactgacgtgtctgtccatgacccaacactgctgctcaattgacacttgagaaagtctgtgcttccctaagacagagcaggaggcctcacagtctttgagcccttagatcatcatacatctgtcttgtgacacatgcaccagctactggctttcaaggactcatgtgggttgacaggtgggagatgccaactctgaatgaaggatgcctgtggaggaatcaaaggtgccacacaggacaatcttctgttatccacacagcgaagctgcccatgccttacatcaccatcaacaacttaaaccccagggagaagaaggatgtgttagccttcacctgtgaacctaagagtcggaactacacctacatttggtggctaaatggtcagagcctcccggtcagtccgagggtaaagcgacccattgaaaacaggatactcattctacccagtgtcacgagaaatgaaacaggaccctatcaatgtgaaatacgggaccgatatggtggcatccgcagtaacccagtcaccctgaatgtcctctgtgagtatcctttgttcctctgtgggccaggacaccagcttaactccaaacgaccagaggccaggcctctcagtctctctccggtccaagtatagacaactttacttctggacatcagacctggccatgactccctgccctgggaaatcctgggtaggcacagccttaaccaagaatataaggggaggggcgctcttgtcatgggacactaggggcccacagcttgtaatgagagaaacaggggaatacctcaggcttgggcttagtaaacatagatgggatttggctgtcacttgaggttgtgtcttggttcagagggtcactgtgtccctttaagagaccaggagcatccccttcccttggatgacatcacctgtggctttattctctttcctccagatggtccagacctccccagaatttacccttcattcacctattaccgttcaggagaaaacctcgacttgtcctgctttgcggactctaacccaccggcagagtattcttggacaattaatgggaagtttcagctatcaggacaaaagctctttatcccccaaattactacaaatcatagcgggctctatgcttgctctgttcgtaactcagccactggcaaggaaatctccaaatccatgatagtcaaagtctctggtaagtggatcccagcatccttggcaatagggttttaggtggagtctatctggctttcagagaagagtcaggaaaacatttgtattcccagactgtgtcccatgggcacaagcaaatcccaaattctcctcctgaaccctcccaacttatctctacagactctcttctgcttgtttttctgttttctcatggctgaccttgtgtctggcctgagaaaggtagggagggggctttatcagccctgagccctatgtggtagaagaggcttcacagagggacaagaaggagagtcctcaagatcaagttgcttctcgctgtcacgaacacatccccttctgccatgtctttgttttcttgtacctattccatgagctacaaggaacatctgaggctttgaaacaagctcacacttttcccccaaatgagaggaggaagccctttgggtgagggaggagcagctcagactctgcttcctgctctgctccgggctcctctggtgactggcctggccctgcctgactccacctggggtggaaccaacatgtgtggagaaagggccctggtggcctgtcctgaagttggctaaatcgagctgccagttgaagccaagcctcccccgggccaggctgcagggaaataagaagagagggagcttcagggctgactcctgagctgcatcctggctctgaagtcaccagctgtatgaggctttgggcacagcacgtgggacacagcacggaggacagtgactgatgcagagctagagaaatagggagattcacccctggggctctgcatggcaggaaaggggcagtgccaaaaagtgtgtaattatagagagggcaagaccacgagacactttatatatatctaatattagacttaccattaactaagtgtgcaatttagtgttgtgtaactatcacactatccatttccagaactttttcctcttaccatattaaacctctgtacccaataaacagtaactctcactccttctccccctaacccttaacacccaccattctactttctgtctctatgtaactggctattctaactatcttttataaatggaattatataataattatccttttgtgtctggcttatttcagttggcataatatcttcaaggttcatccattttgcacgatgtattgtaattttcttccttgttaaggttgaataacatttcaatgtatagatacatctcatttgcctacccacttatctttcaatggacttttcagttgtttccatttttggctagtgtgagtaatgcttctctgtacatcagtgtacaaatatttcttcaaatttctttcaattctatagggagtatgtccagaaggggaattgctggatcaaatggtaatttattgtttaattttttgaaaaacagccacactactttttacattggctataacatttcccattcccatcagcaatgcactagagctccaatttttccatctacttggaaacacctgttgtttagtgttgctgtcattgttgttgtttatcaaagccatcctaaagtgtgtgaggtgttgtaacattgtggttttgatttgcatatctctaagtattcgtgatgctgaggaactttgcatgggctatataaaaggttttgatttttatgaagtctgatttatccattttatttgttgcctatgcttttgttgttacaaccaagaaatcattgtgaaatccactatcatgaagtttttcttctaagagttgtatagtttttactcttacatttagatctttgatctattgtgggttaatttttgtacatggtgttaggtaaaggttccactcttcttgcccttggatatccacctttcccaatatcatttggtgagaacactgtcccttccccattgaacgatcttggcacactcgatgaaaatcatttggccatatatgcaagcatttctttctgggctatgatatttcattaatttctatgtcctcctttatgccagtaccacactgtattgattactggggctttgtagtaaatgctgaaatcaggaagtgtgagtcctccagcttcattcttcctcttcaaagctgtgtgtctatttagagtcatgagatgcaatataaattttaggacagatttttctttttctgcaaaaatgtcactgagattctgataggaattgtattgaatctgcagctcactttgggcagcactgtcctcctaacaatattgagtcttccaattcatgaacacaaaatgtctttcaatttattgatgtcatctttcatttctttcagcaatactttgtagatttcaggtataatcatttcacctctttggttaaacttattcctaaatattttattctttttgatgtgaatataaattgaaattatttttcttaatttcccttcagattgttcatggttagtgtattgaaatacaactgatgtttgaatgttgattttgtattgtgcaacattactgaatttattaattctaataggtttgttccatctttaggattttctacaaataagttcaagttatctataaacagaaataattttactccttccttccaatttgaatgtctttttaaaaattcttccctaatttttctgattagacctttcactactatgttgaataaaagtgtcaatagcaggcatccttgtcttttcctgctcatacagggaaagttttcagtctttctctgttatgtaagatgttagcattgggtttttcacatattgcctttatgttgaggtggttgccttccattcttagaatgtttttattatgaaaaaatactgaatttcatcaaatgcttttattgattcaatcttcttactgattatagttatattcatatttttgtgtgtttctaggagtttgtctatttcatctaggttatccaatttattggcatacaattatttatagtactttcataatcattattttattagaattggtagtaatcgcttcatttttcttttttctttttcttttaagacagagagacaggctctcactctgtaggccaccctaggatggaatacagtggtgtgattatggctcactgcagcctcaacctcctgggctcaagcaattctccttcttcagcctcccaagatgctaggactacaggtgcatgtcaacatgcccagctaattggttttttttttttttgtagagacagcatctccccaggttacctatgctggtccaaacacctggtttcaagaaatccttctgctgtgacctcccaaagtgctaggattaaaacatgacccaccatg

SEQ ID NO: 157507 - DNA, 2629 bp, Homo sapiens
gagaacaaccatcgtaatggatgtaaggtggtatctcactgtagttgtgatttttattttcctaatgattagtgatgttgagcatgttttcatgtgcttattggccatttgtaaattaattttacatttcctcctttgtaatgtaagaggtagcacaccgtgcattgttctgcttcttgtttttctcactgtgcggtgtatcttggaaaccttccccagtgcacagacagaaggatacctcattctttgccacagctgaccagtatccatgatgtggatcatggctcatgacccagttctctatggataaacgtcagggtcgttcccggtctgtgaccatcaccaacactgccgtgactagtctagaatgggtgccatttcatgcatttgcaattcccagaagtacactggttagtcagcagaggctcagcacagaaagaggaaggacagcacagctgacagccagtgctcagagagtttctggatcctaggcttatctccacagaggagaacacacaagcagcagagaccatgggaaccctctcagcccctccctgcacacagcgcatcaaatggaaggggctcctgctcacagcatcacttttaaacttctgggaacctgcccaccactgcccaagtcacgattgaagccgagccaaccaaagtttccgaggggaaggatgttcttctacttgtccacaatttgccccagaatcttacccgggctacaatctgggtacaaaagggcaaatgaggcacctctaccattacattacatcatatgtagtagacggtgaaataattatatatggggcctgcatatagtggacgagaaacagcatattccaatgcatccctgctgatccagaatgttcacccgggaggaccgcaggatcctacaccttacacatcataaaagcgaggtgataggactagaggagtaactggatatttcaccttcaacttatacctggagactcccaagccctccatctccagcagcaacttaaaccccagggaggccatggagactgtgatcttaacctgtaatcctgagactccggacgcaagctacctgtggtggactgaatggtcagaagcctccctatgactcacagcttgcagctgtccaaagccaacaggaccctctacctatttgggtgtcacaaactatactgcaggaccctatggaatgtgaaatatgggaactcagggagtgccaagcccgcagtgacccagtcacccctgaattctcctcccggaagctgcccaagccctacatcaccatcaacaacttaaaccccggggaggaataaggatgtctttaaactttcatctgtggaaccttaagagtgagaactacacctacatttggtggctaaatggtcagaagcctccgggtcaagtcccagggtaaagcgaccccattgaaaaacaggatccctcattcctaccccagtgttcacgaggaaatggaaacagggaccctattcaatgtggaattacggggaccgatatggtgggcatccgcagtttacccagttcacccttgaattgttcctcttatgggtccaggacctcccccagaattttaccctttcatttcacctatttaccgtttcagggaggaaaacctcgatttgttccttggtttcacgggaatttttaacccaccgggcacagtattcttgggacaattaatggaaaagttttcagcttaccaggggacaaaagctcttttattccggccatattactacaaagcatagcgggctctatgtttgcctctgttcgtaactcagccacctggcaagggaaagctccaaatccatgacaagtcgaagtctctgactgggatattaccctggaattctacttagttcctccaattccattttctcccatgggaattcacggaagaggcaaggaccccactctgtttccaggaaggccctattaaggtgggagggtgggacaactcaatgtaaaattttcatgggggaaaaccctttgttacctggaaggcatgaggccacttcaggaacttcacccaaaatatttcggacaaccttaaccaacagatgcttcaaactgtaaaccagggggcaacaagtgggatgactttcacactgtgggacagtttttttcccaaggtgttcaggaacaagactcccccatcatggatgagggtctcaccccctcttaactgtcccttgcctcatgccctgcctctttccacttgggcaggataatgcagttcattaggaatttcacatgtagtataggagcttcttgaggagtaacaacagagtgttcagattatgttcatcttcaaccttcaaactttttacgttaacatcttcagggggggaaatgtgggctctctccaccttgcattacagggctcccaataggaaatggaacacagaggtatttgcctgtgtgtttggcaggaggaaggtggtttgtatgaagacgtagggaaagctgaaattataatagagtccccctttaaatccacattgtgtggatggctcttgtccgtttcctaagagatacattgtaaaaacgtgacagtaatactgattctagcagaataaaacatgtaccacatttgctaaaaaaaaaa

SEQ ID NO: 157508 - DNA, 483 bp, Homo sapiens
gagatggagtctctgtccactccaggctggagtgcagtggcgtgatctctgctctctgaaacctccacctcccgagttcaagcaattctcctgcctcagcctcccaagtagctaggattacaggtgcccgccaccatgcccagctaatttttttttttttttgtatttttagtagagacggggtttcaccatgttggccaggctggtctcaacctcctgacctcacgtgatctgcttacctcagcctcccaaagtgctgagattacaggcatgagccactgcccccggcccactctatcaaattctagagttctctaaacctgagaaatcacagagctggtgtatcaacaaacatgttccaatcagctagattaggggctggcaaaagcctgactggtttccagattgggccggctgccttagcctgtgcacccaacgtgggcatctgactgctggcacacgggtctggaggaattccaccac

SEQ ID NO: 157509 - DNA, 537 bp, Homo sapiens
atgagctggctggaggagaacgtccacgaggttctgcaagcagtggacgccggggacccagccgtggaagcctgtgagaaccggcggaaggtgctctaccagcgtgcacccaggaatatccaccgccatgtgatcctctctgagatcaaggaagccgtcgctgccctgcccccgccccaccctaagctgatgaggaagcctcacgggccacccggggaatccagggcctgtgctcagctgctgctgctctgccccctggcggcccctccgtgtccctgcgagggaggcagctggcaggcagccccgctaagtcctatcagccatggaaacaccattgctctcttcttccggtcactgttgccaaactataccatggagggggagaggcccgaggaaggagtggctgggggtctgaaccgcaaccatggcctgaacaggctgatgctggctgtgcgcgacatgatggccaacttccacctcaacgacctggaggcgccgcacgaggacgacgctgagggggagggggagtgggactga

SEQ ID NO: 157510 - DNA, 1685 bp, Homo sapiens
  misc_feature (1)...(1685): n = a,t,c or g
gcggnggaattcgaggaaggatggtggctgtgctgagacggagaggatgaatgtgccctcaccatgctcaggggagagggtccttgtgttccccagcagagtcacgatgtgccgaggccctgtgccaggagcagagcacacggcacattgagagaacaaaagccccatggccagaccgggagagcagggctgcggcgcaagagggccaactgccaggcggccggtgtgtctggctttcagaatccgggtcattgaaaggctttttaccttttccttctgggctggaaagtacttgccttacccaggccccgtcacccgcacagcggtcgtcgtgattatccctgccggcagggtgttgcagcattgaggaatcgcggttctttgctgcctccctccgctgtggagcccaggctttcttccctccctagagctactgaggcctggccgctcaacgttctgtagagccgggccggtagcccttcgcaccgtgagggtctccgcttaacgcaggccctggaagcttctgcctttgcgtaaggagtgggtgctgaaggagacgttgaaactgcagcttttctgaaaagcaaggcacctgtgcagtgtccgaggatggctgtgggagcctcgctccggacgccacgcctgcctcagctgagttggtctccctcatcctgttcacgctgtccacagccccaccctaagctgatgaggaagcctcttgtttcacccggggaatccagggcctgtgctgagctgctgctgctctgccccctggcggcccctccgtgtccctgcgagggaggcagctggcaggcagccccgtgagccgggttgggtcccacgagtctcagttcagtgtcgtttctgacttttcttgactttctttcaggctaaagtcctattcagccatgggaaacaccatttgctctctttcttccggtcactgttgccaaactataccatgggaggtaggttgagctcgtcccagcccctgcctccccagtgggttgcgggcatatccattccagtgcgaatgcctggagcctccttgaaccaggactgtgccagccggcacagggagcagggaaggaccaaggctgcattgtgccagtggggtgcccattctgccggggaaactggggcctgcccagatggtagcagatgcagggccgtgagtcagccggcttgatcccactctgtgcctggcttggtctagacacggcatttggttttgagagcttcctcctcacagggaccctggggagggttcagggtccggtgctggggcaaagggccacctcgggctccacagtgcctcctgcttgggccccgggcccctagtcccagcacagacagcccccttctcagacatgtccccttgctgcagggggagaggcccgaggaaggagtggctgggggtctgaaccgcaaccagggcctgaacaggctgatgctggctgtgcgcgacatgatggccaacttccacctcaacgacctggaggcgccgcacgaggacgacgctgagggggagggggagtgggactgagcgtccgcagaggtgaccgaaaagccgtatgatgatgttcccgatttctctgttggtcggagtcggccagttgcctgaagtagggaagctgagtgtgtcgctccctggtccactgtttctcctataaatgtaaatgggt

SEQ ID NO: 157511 - DNA, 1826 bp, Homo sapiens
gaagaagaaaaaaaaacagaaaaacaagaaaagcagcacgggagaagcatcggaaaacggactagaagatatcgatcgcatcctagagaggattgaggacagcactgggttgaaccgtcccggcccagctcccctgagctccaggaagcacgttctctacgtggagcacagacacttgaatccagacacagaactgaaaaggtattttggtgcccgggcaatcctgggggagcaaaggccacggcagagacaacgtgtgtaccccaagtgcacatggctgaccacccctaaaagcacctggccccgctacagcaaaccaggtctgtccatgcggctgctggaatcaaaaaaaggcctctccttctttgcgtttgagcacagtgaggagtaccagcaggctcagcacaagttcctggtggccgtggagtctatggagccgaacaacatcgtggttctgctccagacgagcccttaccacgttgactcactcctgcagctcagcgatgcctgccgctttcaagaggatcaggagatggctcgagacctcgtagagagagcgctgtacagcatggaatgtgcgttccaccccctgttcagtctcaccagtggggcctgccggctggattaccgcagacccgagaacaggagcttctacctggccctctacaagcagatgagcttcctggagaagcgaggctgcccgcgcacggcgctggagtactgcaagctcatcctgagtctcgagccggatgaggaccccctctgcatgctgctgctcatcgaccacctggccttgcgggcccggaactacgagtacctgatccgcctcttccaggagtgggaggctcatcggaacctgtcccagctccctaattttgccttctctgttccactggcgtatttcctgctgagccagcagacagacctccctgagtgtgagcagagctctgccaggcagaaggcctctctcctgatacagcaggcgctcaccatgttccctggagtcctcctgcccctgctcgagtcttgcagtgtgcggcccgacgccagcgtttccagtcaccgcttctttggacccaatgctgaaataagccagccccctgccctgagccagctggtgaacctgtaccttgggaggtcacactttctctggaaagagcccgccaccatgagctggctggaggagaacgtccacgaggttctgcaagcagtggacgccggggacccagccgtggaagcctgtgagaaccggcggaaggtgctctaccagcgtgcacccaggaatatccaccgccatgtgatcctctctgagatcaaggaagccgtcgctgccctgcccccggacgtgaccacgcagtctgtgatggggtttgatcctcttgccctcttcggacacaatctacttcctacgtcaggccagagaggctaaagtccttatcaagccattggaaacacccattgctctcttcttccggtcactgttgcgcgaactataccatggagggggagaggcccgacggaaggagtggctgggggtctgaaccgcaaccagggcctgaacaggctgatgcgtggctgtgcgccgacatgatggccaacttccacctcaacggacctggaggcgccgcacgaggacgacgctgagggggagggggagtgggactgagcgtccgcagaggtgaccgaaaagccgtatgatgatgttcccgatttctctgttggtcggagtcggccagttgcctgaagtagggaagctgagtgtgtcgctccctggtccactgtttctcctataaatgtaaatgggtcacgctctgcaaaaaaaaaaa

SEQ ID NO: 157512 - DNA, 802 bp, Homo sapiens
  misc_feature (1)...(802): n = a,t,c or g
tggttggttaacatcaggttactcttttgtaaggatgccaattgaaactggcctgtttgggagattagatttttaggttattaggttattatctctctctcctgatttttccaaaggccagataagaatgtagtttctgtttggtgacttgaaactttatcgtgggtgattccattttgatttttagtctgttctgtttgggcctagtgcaggagcttagtgcaaaacaacagcctcctaaaatttaaaagactttaaagaacatacatgagtttttcatcagataatatttatttgtattcattaatttatttgattggttaagtcttggctcccgagaatctttgctcagaggaatttttcaatccttggctattattctccttatagttattgtatttacctccccggtgtattgaattatcctatgggttttaaatgctttcctgcagccacctggacgtcatatgattgccatcagagagagacaacctggaagaaccaacagtgactatgaaacagctgacggcgtctacatgactctgaaccccagggcacctactgacgatgataaaaacatctacctgactcttcctcccaatgaccatgtcaacagtaataactaaagagtaacgttatgccatgtggtcacactctcagcttgctgagtggatgacaaaaagaggggaattgttaaaggaaaatttaaatggagactggaaaaattcctgagcaaacaaaaccacctggccccaagaaataggcttaaactttgctanactacaacacaagcaaaactcag

SEQ ID NO: 157513 - DNA, 658 bp, Homo sapiens
gttccgtgtcgacgatttcgttcaaaaactccaggctggcagcattgcaatagtgaggcagactttcaataaggagatcaaaaccatgaagaaattcgaatctcccaacatcctgcgtatatttgggatttggattgatgaaacagtgactccgcctcaattctccattgtcatggagtactgtgaactcgggaccctgagggagctgttggatagggaaaaagacctcacacttggcaagcgcatggtcctagtactgggggcagcccgaggcctataccggctacaccattcagaagcacctgaactccacggaaaaatcagaagctcaaacttgctggtaactcaaggctaccaagtgaagatatgggtacctggctgagtttggggctggcaggcttcagcacaccaatggtgtcgatggcaggagtgcgtggtacaagaacatatgctgtcatgattgtgctacagtttctttaagaacaccagcttgcaggatttgagttgaggaaaacacagacttccatgagtttgggaactacgagagaaaagacagacagagtcaaatctacagcatatctctcacctcaggaactggaagatgtattttatcaatatgatgtaaagtctgaaatatacagctttggaatcgtcctct

SEQ ID NO: 157514 - DNA, 1313 bp, Homo sapiens
  misc_feature (1)...(1313): n = a,t,c or g
agtcaagtgccgtggaattcccaacatcctgcgtatatttgggatttgcattgatgaaacagtgactccgcctcaattctccattgtcatggagtactgtgaactcgggaccctgagggagctgttggatagggaaaaagacctcacacttggcaagcgcatggtcctagtcctgggggcagcccgaggcctataccggctacaccattcagaagcacctgaactccacggaaaaatcagaagctcaaacttcctggtaactcaaggctaccaagtgaagcttgcaggatttgagttgaggaaaacacagacttccatgagtttgggaactacgagagaaaagacagacagagtcaaatctacagcatatctctcacctcaggaactggaagatgtattttatcaatatgatgtaaagtctgaaatatacagctttggaatcgtcctctgggaaatcgccactggagatatcccgtttcaaggctgtaattctgagaagatccgcaagctggtggctgtgaagcggcagcaggagccactgggtgaagactgcccttcagagctgcgggagatcattgatgagtgccgggcccatgatccctctgtgcggccctctgtggatgaaatcttaaagaaactctccaccttttctaagtagtgtatcaaaatctaaaccaaggagtctctggacaagaagctgggagaggcacaaactggacatctctctctctcatatccttcggcattgggttatctatgggagcaaggagtgggcacgcttctctgttacaaatagaaaacgattccagtcatacaggacacatcccactccaaatgatatttccaaaaacatacctctgacagtaactttgatagatggtttgtcaaatgtatctttctggggtatccacacctcttgggcaatggaaatttggcagctcctcccttccataaatgaagtctctttcccccaccatttgaatctggggctgggcactgtgacttgatttggatcaatagaatgtggaagaagtgactgtatggccagttcccaagcctaggtttcaagaggccttataaatgtctgttggaaccttacccagccatgaacatgttgagtgagcatgctggagaatgagagaccacatgaagcagaaacatgctttcctagctgaagtcatactagcccaaccaacatggcagctaacacatgaatgaggccaatcaagaccagaagaaccactcaagcagatcccagcccaaattgcccattccacaatcaggagctaaataaattnctgttgtcttaacac

SEQ ID NO: 157515 - DNA, 1654 bp, Homo sapiens
catggctacctcagagctgagctgcgaggtgtcggaggagaactgtgagcgccgggaggccttctgggcagaatggaaggatctgacactgtccacatgccaggtacagtcctgccccagggcctttgcatgggcagtgcactgcgtggaatgctgttcccctcactgtcctgaccaccctgtgtacaagccagcatccccgccgccctcgctctgtgccgccttccttctgtgtgccttgtcagaggacacaggtcaccaaggtcaccccctgtctctgccactggcctgtgagtcagagaggaggatggatggagcctcgccctgccatctctctccctgcacctgttatccctgcaggggagctgcccccgcaaccttcactttacagaaaagggtattagggctcagggagggaattaagtggcccgaggtcacctggaggagcaagtggccttctttgcagccatcagagggtgcagccctggtggagaaggccacgcttggcacaggggagcccgtctggagcatgagccagacatcactcctgccctcccatgggcccgggctcagcgtcagtgcccgcctgtgcccctggcctacccccagcccgccaaggctcgggccctcagggccagcgggaggagtgaacgagccctcttgcagctcagccgctctggcctggcatgttgggagtgatgaatggcaggttccaggcaggcagagagggagggtgcgagggcagggcctacgccgtcactgctgtctctgcgtcaagaccttggggaggccttgtccctacccagctcccactggaactggtcagaggttgcaggtgggttgaggtcttgactgtaacccagctcaggctggaactgctccctgtccccaagccagcctccctgtctctcttcaaagagtgtgagtccctttaggtcctggtgtgtggggacacacctccttcctcctctggcccggaggcttcggagcaggagagcctggagaagtgggggcactgtcggggctcctcggtacacagaccacgggacagatgcgtggcctggccctggcatccatgggcaaaggagagactgagacacaccgatgtgtcaccatgggcccggtgccacaccctttgcccagccccagttgggggcagacacggtttcctcgaaaggggaaagtaattgtggggcgggattaggacccaaaagcctcggtttcttgttgggaaagcaaccttggaatcccggcctcccttttgtgcatcagtttccgacatctcccagagtcctagggccccttcttcttgaagtgaacttaaatccctgaaagaagagtgtccctgtcaggggtcctcaagtctggctccccagggtgggcaccggcccagggcgtggagcgtcttggttccggccgaagccccacccggggcttgacatcacttccccattcccacagcgcacaactacggggaattgcgccgccgcctgcgtgtactttggcatagcggcctccctggtcaagatgggccggctggagggctgggaggtgtttgcaaaacccaaggtgtgagccctgtgcctgccgggacctccagcctgcagaatgcgtccagaaataaattctgtgtctgtgtgtgaaaaaaaaaaaa

SEQ ID NO: 157516 - DNA, 664 bp, Homo sapiens
  misc_feature (1)...(664): n = a,t,c or g
gtttttcgtcagtactgggatatccccgatggcaccgattgccaccgcaaagcctacagcaccaccagtattgccagcgtcgctgtagggactgaaggttggagaagcatattaactgctccagggtcatttgaagctgggctgcaagtccaggtcggctgacctgctcctaggggtctctgaagcaaggaatgttcccatcaggcctgaaccgccgcttgcctacagagtcaccacttcaaatcctccgggcaactttcctttgaaaggaagtggcctaagggttgcaccaataccaccttccactgccagctgctgtcggggcccgtgtttggcctcacccacctgcaatcagcgcccatnttccgcgagaagcccgacgacccccctgaactaccttccctccgcgtgctgcgccggacgctggactcctggggagcacgcacgcacaactacgggatttgnggncttggcgccgccgcctgcgtgtactttgccatagcggcctctcctggtccaagatgggccggctggagggctgggaggtgttttgcaaacacccaagggtttaagccctgtgcctgccgggacctccagccctgcagaatgcgtccagaaataaattctgtgtctgtgtgtgaaaaaaaaggaaaaagccacaagg

SEQ ID NO: 157517 - DNA, 402 bp, Homo sapiens; identical to SEQ ID NO: 148931

SEQ ID NO: 157518 - DNA, 4384 bp, Homo sapiens
aatcttttttttttttttttttgcagtacatgaatgttttattcttcataaagtgcttaaaacatgaagaagaagctctttataaagagccttaactaggaagacaaacagcaaagcagaaccatgcctgctccctgctctaacccacttgcaactttcctccaagtcgtggctcggagaagaaacatcaacaagggaccctgggcttcgattcaaaaacttcctctgaagccattccatgccctgggcattagggaggcccacaaaggtcagggcccagggctgggagtgaattaaagcccaaaggaaatccccagtaggggggggtgactccccctctcttcagaaaagatacttactttctctaattacccaatggacccccaaaagcatggactggaaaccctggggaccagtgggatacttttctcagatttgatgagtggagtttaaggtaggtaacgttacaggggctttcctccatgtgtggcgctcctctgctccatcctggcagcagacagacatcacccagagggcacgtgtctgcctgaggccttccaaaagcaagcccacaggccctctcctgaagaagtggtggtcccagaggagctcttgcctcctcactaagctgttaagtatccttcttcagcacctcatcaccccccatttttgctaattcagggtgccccaagctgccaaagttccctgcagatgccttggggaagcctaccatgttttctacaagcaaaccaggggctgggccaaaggacagatacttcatttcaaagtgcactgcagccaagccaggcaagcccctggggcagaagggacaggctgagatagcagcttaatggatggatgggaggacaacaaaggctttttcctaagtataggtgtctcccaaaggcatagtgggacctccctcttccaggcaagctgactggtctagtatggctaagtcctgaggccagacaatgagagtgagcagggcagccccaggcctgcctgcccgcctgcccagcagtgtttatcctgggatcctcctattggggttgagggaggggaagacagcaggaaggttgagggagcagcaacttggccagaccaagagattaactttaggggaagggaacagcccacagcagtgctgtccattcccattcccagggccctgagagagccatccctatgtattcaacaggtgggagggggacgccacacagcgggagaggtcgacatccaggggctcttgaccccgcccaccaaaggcacattttaattggtttccaaaagttcaaaccctgcagcaacacagagttttggcatctggacaggcaacaagaatagacatggaggcttgatccccaaatcataagcagtcccaagccccagcctggagggacctacacattggaggtggtcaagagctcgaaaagcaaaaaggtgctctctccgcacccgcccctgcgccccacacattcccatgtgacactcgtggaaaggtcagaggggtcagggagcagcctgaagcacacacatcatccaccactgtccacatggcactcgccccacaaacagctccagactgaagcagactcaggacatggcagagactggcccagaccacacaggcttcttgctctcaggggaatgggtgtgaggctgaagaggctggttgcccgtaactcacagacaaacaggcagcgtggtcattgtcccagtaatactagaagcccctccagggactggagggaaatgaaggggatggggctttggctgtgggaagaaatggctgaccatccttgggggataataaagtatgtgctagcaaccagtcttgtcccagattactgcatcaagctacagttcacccctgctctgtcttgggggaagagttccaattccctggggcccccaaagctgagggatatgaaaacaggcaggtgggaaagacccagggctcccaaagacacacaagttgtgcacagaacctgatgcctccaaagggaatccagagggcccccttccagcagccccagttgaggcaggagggagaggagcaaggagtgacaaggcaagacagacgatgccccactgcagatgagagagttcaggaggagagagggcaggcagcaataggtccatgccaaccctcctgggggtagggtgaggaaggctatttgggggggcccggggggatctgcagcagcgtgggtgaggtctccatgatccgcaccagcagccggtcgatgtagctctccagctcctgcacatgctcgtcccgctggctcagctcccgctcccgctgcaggagcaggctgatgagctcatcgtgggtcaggtggtagtacttggccgactggtccagcacagctgagtccttcagccttttggtgtccaccatctggccagcctggggggcctgggtcacaggctgaatgctcccagatgtgactgttttgagcttctccagcccactgctcagggctatgctcagactggagcgggactgcttcctgtcggggctgccctccacaggggcggcactgaggggcttcacggggtggggactgggtttctgagtcgggtccttggcttctctcaagccaaaccagctactcttggccttttcctccccactggatgagtgatgtggggaggccccccaggatgggacccccccttttccccccagagagcttcggcgacccaactcgctccgacttaggccttggtggtggtggtggaagagacccatccggggcttgcgttcctccttccgggctccctccttctctgccacagcctcagaggaggccactatgggtgtggcaacctggactggcttgccctctggtagccgggcccccctcctcctctcccagggtggctggccccaggggccaggactttagcctgagcactcagctcctcctgtccaagcactgcctctgagctgctgttgctacgactgcctctgggccaggtgtcatctgtggaacgaggcccctcctcggagaaccgggaagagacagcttgcaaggagccagaggatggaagcgagcccgagatggagctgcggtgccgcacagggccctggggctcctcattgtaaatgtggctcccattgacacagagcgaagagcgggaggcagcatccaggtggccctgaaggtccagaagggcccgaggaggagccactcgcatctggttggcctcatcgctgtaggtcctcttatgggtgaacagcttgggggactgtgcagagtccctgcccccttcagtggacagccagctgctacggcttggtgagcgggtgaggagttcggcgccaggtccctggtaggccaagctcccgctggctgaggacagggtgctgtccgagcccagcgaggtgttggactgggtcagggacgacttgcgcagcttgttgcggaggaagaagcctttggctttgcccatcttgcccaggctgcccaggtcaggatcctctatggcgctgcttgggaggatggcagaggcagattccagatcatacttcttcttgcccttcatcttgtccctgatcttgctgaagggagaccttggcttgtccttcatggacaggtcaaacatactggcgctcaggttgttgcgcgtgaactggatggtgacttcaatctcgccgcgttccttctccttcttgcctggcttggagtgcagcttgtaccactgcgtgtgctgggcgcggcctgcgccgaagacctcgtccagcgccaccgtggcctggcccaggaacttgtcgacgccgatgagcgagcggtgcatggtggtgagcaccagctcgcaggcggcggcggagctcgcggcccagggcgccgggcccgcgtcggcctcctgcgcccgcagcaggccatccagggcccccggcggcagctcgaaggagcactcctcacgccactcgggacagccgtgcgtcttctccaccaccgacgtactgtacttctcgcggcccacctggatcaccgtgtacgcgtcgctggtgctgcccgctcccgagctcttgccccgcagcccgcgggcccgcagcaccgtcacctggacgtgcgtgggcagccagcgggaaggccccgccgccggctccgcgccccgcaccagggccatggcggagaagcggggggcgaggtctggccgagccggtgcagaccccaggacctggtgacaaacccggccgcggcagaaggcggtcaggaaccaactctgagcgccgccgcagctgcgggctgggctgggccgggccgaccggccgccgcctccccgcctcaccgggccgctggccgcgggccgcgccgcgacgtcagcgccccgccccctgccccgccccgcgcccgccgccccaaccggc

SEQ ID NO: 157519 - DNA, 2966 bp, Homo sapiens
  misc_feature (1)...(2966): n = a,t,c or g
ccgagatcctcccagcctctcatctgcatccccgccagggtcgagggaatcttctattcattctggtccagaagagctgcccactcccccagagcctgactttccaccgccccctctcccgccttgggccagccaccaccgtggggggcccagccctccatgctctcccctgtctgaagcctggcccctgactacctcctctgcaccaccaggggagccagccttactccctggcccccatgagccctccccacctgggggctcccctgccctacttagggaggacctcgctgcagccaccccagcctccccgcttgtgcttctgcccttggagacacgaccagctgaggagccacagcccagtgccagtccccaccccgtgaagcccctcagtgccgcccctgtggagggcagccccgacaggaagcagtcccgctccagtctgagcatagccctgagcagtgggctggagaagctcaaaacagtcacatctgggagcattcagcctgtgacccaggccccccaggctggccagatggtggacaccaaaaggctgaaggactcagctgtgctggaccagtcggccaagtactaccacctgacccacgatgagctcatcagcctgctcctgcagcgggagcgggagctgagccagcgggacgagcatgtgcaggagctggagagctacatcgaccggctgctggtgcggatcatggagacctcacccacgctgctgcagatccccccgggcccccccaaatagccttcctcaccctacccccaggagggttggcatggacctattgctgcctgccctctctcctcctgaactctctcatctgcagtggggcatcgtctgtcttgccttgtcactccttgctcctctccctcctgcctcaactggggctgctggaagggggccctctggattccctttggaggcatcaggttctgtgcacaacttgtgtgtctttgggagccctgggtctttcccacctgcctgttttcatatccctcagctttgggggccccagggaattggaactcttcccccaagacagagcaggggtgaactgtagcttgatgcagtaatctgggacaagactggttgctagcacatatctttattatcccccaaggatggtcagccatttcttcccacagccaaagccccatccccttcattttccctccagtccctggggggggcttcttagtattactgggattttgtctcacgctgcctgtttgtctgtgagttacgggcaaccagcctcttcagcctcacacccattcccctgagagcaagaagccctgtgtggtctgggccagtctctgccatgtcctgagtttgctttaatcctgaaccggttggtggggcaagtgccttgtggacagtggtggatgatgtgtgtgcttcaggctgctccctgacccctctgacctttccacgagtgtcacatgggaatgtgtggggcgcaggggcgggtgcggagagagcacctttttgcttttcgagctcttgaccacctccaatgtgtaggtccctccaaggctggggcttgggactgcttatgatttgggggatcaagcctccatgtctaatnccttgttgcctgtccagatgccaaaactctgtgttgctgcaagggtttgaaactttttggaaaccaattaaaatgtgcctttggtgggcggggtcaagagcccctggatgttcgacctcttcccgctgtgtgggcgttccccctcccacctgtttgaatacatagggatggctctctcagggccctgggaatgggaatggacagagctgctgtgggctgttcccctcccctaaagttaatctcttggtctggccaagttgctggctccctcaaccttcctgctgtcttcccctccctcaaccccaataggaggatcccaggataaacactgctgggcaggcgggcaggcaggcctggggctgccctgctcactctcattgtctggcctcaggacttagccatactagaccagtcagcttgcctgggaagagggaggtcccactatgcctttgggagacacctatacttaggaaaaagcctttgttgtcctcccatccatccattaagctgctatctcagcctgtcccttctgccccaggggtttggctgggcttggctgcagtgcactttgaaatgaagtatctgtcctttgggcccagcccctgttttggcttgtaggaaaacatgggtaggcttccccaagggcatctgcagggaactttgggcagcttgggggcacctggaatttagcaaaaatggggggtgatgaggtgctgaagaaggatacttaacagcttaagtgaggaggcaagagctcctctgggaccaccacttcttcaggaagagggcctgtgggctttgcttttggaaggcctcaggcagacacgtgccctctgggtcgatgtctgtctgctgccaggatggaagcagaggagcgccacacatggaggaaagcccctgtaacgttacctaccttaaactccactcatcaaatcttgagaaaagtatccactggtcccccagggtttcagtcatgctttttggggggtcattgggtatttagagaagtaagtatcttaatctgaagaagaggggaagtcaaccccccctactggggattccctcttgggctttattcacttcccagcccctggcccctgaccctttgtgggcctcccctaaatgcccaggggcatgggatggctttcagaggagtttttgaatcgaagccccaggggtccttgttgatgtttcttctcctagccacacttggaggaaagttgcaggtgggttgggcagggagcaggcatggttctgctttgctgtttgtcttcctagttaaggctctttataaagagcttgttcttcatgttttaagcactttatgaagaataaaacattcatgtactgcaaaaaaaa

SEQ ID NO: 157520 - DNA, 880 bp, Homo sapiens
cgacttcgctgacgacgatttggtactgaaggaattacgaggtcattcctcctttgttaacgaagcaacatttacacaagatggacattacattattagtgcatcctctgatggcactgtaaaggttaagtatttgctatcagtttattttgggatgtctaccccatctttgtcctttgaggagttttcagtggtgataatgggaatgattgtgctgtagtaaacctctttcctggctattttagctgtaattgaggtgagtctgagacaacaacagtattctgtgggtaattcccattggccttgggaccccaatctcaaaccttttcaatccaaacaaactttatcatgtgtaggaaaagaggaagggtgaagagtcctaaacttaagccatcccccattcacagatacacatggtggttaaatctgttttgccatagggatgtgccacctgctaacagtcaaattcacgaaagtctcagtggcctaataaatagatctcttttttgttgcacagcctcactgcactcctggtccccagatttagggccttcctagtagcatttatagaggaataggagaggtgttgagtaaaactaagccttctcctagatagttatttaataagtaatttgctgaaagtaatggatcttcagtacctttaaagatttagttatttgaagagaggttctcatttcctagaaaagatatgagaaacccaaatagaaaattattagagatctttgagacactctatttacattctggacctaatctttttgaattgtcttatatgagtgagtactttgtggcagaagatctagacattttaataaaacattttaatacaaatatctagatattttagatacatatttaa

SEQ ID NO: 157521 - DNA, 612 bp, Homo sapiens
cgatgatgggggaggctgtgtatatgtgagggtaggggatatatgggaaatctctgtaccttctgccccattttgctgtgaacctaaaatttctctaaaaactagtcttttatataaatgggcatacatatacatatatatgtcagcactaaaatatcacgttccaataaatataaaggagaaattattgaaagtcatgtacagtgaaatgtgtttccttccatctatcatggaattcatgaggagtgatactcttaggagtaaggtataatgggaataatgaaggggaccagaccttgttctagggtatgttaggaaggaagaggtgatctccaggcaccctcctgagagtcagctgacattgtcctaagttggggataatgttgtatcacgtaatatccaaaactgaaggaagaatagtgaagcttcagatacagtgctggatgaggtgaagggaggtaatgggtgagcagacattggtataagatgttgagcagcatgtgatgggccatcagatactgtgaagaagtgcccaagcagagataatgatggctcagtagccattgatctaaggtgaggtaatgggatgtgtccgaattcctccacagggat

SEQ ID NO: 157522 - DNA, 6359 bp, Homo sapiens
ggcctggctgttgctcaggtgaccagcttgtgtctctgggagggcgctgctttccccggccacccggcgcgatgatccagaatgtcggaaatcacctgcgacggggcttggcctctgtgttctccaaccgcacatcccggaagtcagccttacgtgcggggaacgacagtgccatggcagacggcgagggataccggaaccccacggaggtgcagatgagccagctggtgctgccctgccacaccaaccaacgtggtgagctgagcgtcgggcagctgctcaagtggattgacaccacggcttgcctgtccgcggagaggcacgctggctgcccctgtgtcacagcttccatggatgacatctattttgagcacaccattagtgttggacaagtggtgaatatcaaggccaaggtgaaccgggccttcaactccagcatggaggtgggcatccaggtggcctcggaggacctgtgctctgagaagcagtggaatgtgtgcaaggccttggccaccttcgtggcccgccgagagatcaccaaggtgaagctgaagcagatcacgccgcggacagaagaggagaagatggagcacagtgtggcggctgagcgccggcgcatgcgccttgtctatgcagacaccatcaaggacctcctggccaactgcgccattcagggcgatctggagagcagagactgtagccgcatggtgccggctgagaagacccgtgtggagagtgtggagctggtcctgcctccccacgccaatcaccagggcaacacctttgggggccagatcatggcctggatggagaatgtggccaccattgcagccagccggctctgccgtgcccaccctacgctgaaggccattgaaatgttccacttccgaggcccgtcccaggtcggcgaccgtctggtgctcaaagccatcgtgaacaatgccttcaaacatagcatggaggtgggcgtgtgcgtggaggcctatcgccaggaggctgagacccaccggcgccacatcaacagtgcctttatgacctttgtggtcctggacgcagatgaccagccccagttgctgccctggattcggccccagcccggcgatggtgagcggcggtaccgagaggccagtgccagaaagaagatccgcctggacaggaagtacatcgtgtcctgtaagcagacagaggtgcccctctccgtcccctgggaccctagcaaccaggtgtacctgagctacaataacgtctcctccttgaagatgcttgtggccaaggacaactgggtgctgtcctcggagatcagtcaggtccgcctgtacactctggaggatgacaagttcctctccttccacatggagatggtggtgcatgtggatgcagcccaggccttcctgctgctctcggacctgcgtcagaggccagagtgggacaagcactaccggagcgtggagctagtgcagcaggtagacgaggacgacgccatctaccacgtcaccagccctgccctcggaggtcacacaaagccccaggacttcgtgatcctggcctcgaggcggaagccttgtgacaatggggacccctatgtcatcgcgctgaggtcggtcacgctgcccacacaccgagagacgccagagtacagacgcggagagaccctctgctcaggcttctgcctctggcgcgagggggaccagctgaccaagtgctgctgggttagggtctccctgactgagctggtctcggcaagtggcttctattcctgggggctcgaatccaggtcaaagggtcgcaggagcgacggttggaatggaaaactagctggaggacacctgagtactcttaaagcaatccccgtggccaaaatcaacagccgatttggataccttcaagacacctgaaaccttatcatgagccagatgccaaggaagagactctgggaggatccagaggaccccctggttgcagccacgtagagactgacgctgaggaggactccaactatcatgagcaacacccgtcgaacacagccaccccgctaagaacagatcaagaagctgtcacagatggcggaagaaaacctgaggaaagcgggacaaccagtcacaatgaataatttaatggtagctatgatagcagttatcaccactgccgtgagtattccttcaataagggctggtaataatgcctggatgcaatcattctatgacacagttacacatgctttctgatctcagtatttaccataataaatcggctcctataattgaggcataccaccctcaaaaacctatttgtaaacaggattggacccagttagaaaaaatgaacgtacttatttaggaagattgctttgcagaataggcagagatgctgcacaacgattcctatggaatcattactaattggtcccccaaggggatgtttagcttgaattgcacctctcagtctgcatgccacggtcacactatgttcagatgatctgaacaaaacagtcagatggtagaaatgttaagtacggcaaaagttcctattatctggaaccatggcggtatagtggcacctcaacctcaaataatatggcccgctctaggagctaaacataaggatttgtaaaaactattaaatgctcttaataagatcaaaatttgggaaagaataaaagagtatctagaaggacactctacaaacttgtttttggatatagcaaaattaaaagaacaaatatgtaaagcatcccgggcaacctgaccttaatgccaggaaccagagtgcttaaaggagctgcagaaaaattagcagctagtaacccatttaaatgggtaaaaacacttggaagctctgtgatttcaatgatgactatgctttttaatctgttgtttgcctttgtatagtctgcagatgcggatcccgactcctgcgagagtctctttgcaaatcgaagaagggagacatgttgggagcaagccccccagagtctggccataaactggccccaaaactggccataagcaaaacctctgcagcactaaaacatgtccataatggccctaacgcccaatctggaaggttgtgggtttatgggaatgagagcaaggaacacctggcctgcccagggcggaaaaccgcttaaaggcattcttaagccacaaacaaaagcatgagcgatctgtgtcttacgggtgtgttcctgctgcaattaattcagcccatccctttgtttcccataagggatacttttagttaatttaatatctatagaaacaatgctaatgactggtttgctgttaaatgaaggggtgggttgcccctccacacctgtgggtgtttctcgttaggtggaacgagagacttggaaaagagacacagagacaaagtatagagaaagaaaagtgggcccaggggaccagcattcagcatacagaggatccacactggcaccggcctctgagttcccttagtatttattgatcattatcgagcatggcaggataataggataatagtggagagaaggtcagaaggtaaacacatgaacaaaggtctctgcatcataaacaaggtaaagaattaagtgctgtgctttagatatgtatacacataaacatctcaatgccttgaagagcagtattgctgcccgcatgtcatacctacagccctaaggcggttttcccctatctcagtagatggaagtatattccatgtaaagtaaatcggctttacacccagacattccattgcccagagacgagcaggagacagaagccttcctcttatctcaactgcaaagaggtgttccttcctcttttactaatcctcctcagcacagaccctttatgggtgtcgggctgggggatggtcaggtctttcccttcccacgaggccatatttcagactatcacatggggagaaaccttggacaatacctggctttcctaggcagaggtccctgcggcctttgcagtattttgcgtctctgggtacttgagattagggagtggtttgagattagggagtggtgatgactcttaaggagcatgctgccttcaagcatttgtttaacaaagcacatcttgcacagcccttaatccatttaaccctgagttgacacagcacatgtttcagggagcacagggttgggggtaaggttacagattaacggcatctcaaggcagaagaatttttcttaatacagaacaaaatggagtctcctatgtctacttctttctacacagacacagtaacaatctgatctctcttttccccacagttaataaatatgtgggtaaatctctgttgggggctctcagctctgaaggctgtgagacccctgattttctacttcacacctctatatttttgtgtgtgtgtctttaattcctctagcgctgctgagttagtgaccgagctggtctcggcaggggtgggcgggtcttttgagttcaggagttcaggagcagcctggccaacatggtgaggccccttctctactggaaatatgaagattgtccgggcatggtggtgtgcctctgtactttcagctactcgggaagctggggcacaagaattgctggagcatgggaggtgggggctgcagtgggctgagatcgtgccactgcactccagcccgggcgatagagtaagactctgtctcaaaacaaaaagagttttaggccaggtgtggtggctcacgcctgtaatcccagcactttgggaggctgaggtgggcagatcacctgaggtcaggagttcgagaccagtctggccaacatggcgaaaccccatctctctctactaaaaatacaaaatttagccaggtgtggtggtgggtgcctgtggtcacagctgcttgggaggctgaggcaggagaattggttgaacccaggaggcagaggttacagtgagcggagatcgtgccactgcattccagccggggtgagagagcgagactctgcctcaaaaaaagaaggcttagtgtgcaactcatcagagttgcacagggcagagaaagaatgggaaaaaaaacaatttctagaaaacttttcgaattttctgatcaacaccaaatattccaaataggaaaaatacaaaaaaatccatacctatatgtggcataatatgattgtagagcaccaaagtaaaagatcttattttttattaaaattaaaaaaaaattaaaatagagggtctcactatgctgcccaggctggtcttgagctcctggcttcaggctatcctcccaccatggcatcctaaagtgctgggattgcaggcatgagctgctgcatctggcccaaagtaaaagatcttagaagcagccagaaaaaatagatttgggctgggcatgaatagattgatcaccaaaaaggtggcagactaacttctcgacagaatccacagaagccagaaggcagtggaacattagctttgatgtactaaaataaaataccacgctaggctcctacatacagtgaaaatgttttgagaatgagaattataattttttggcaaacaaaactaaaggagtttacaactaagaaactcttttgtgagacggccttgctctgttgcccaggctggagtgcagtgacgaaatctcagctcactgcaacctcggcctcccgggttcaggcaattcttgtgtctcagccttccaagtagctgggattacagatgtgcgccaccaggcccagctactttttatatttttagtggagatggggtttcactgtgttggccaggctggtctcaaactcctgacttcaagtgatctgcccgccttggcctgctaaagtgctgggattacaggcatgagcgactgtgcctctccagtccctgtgtttttttttgtttttggaggttttatttgtttgtttttggaggcactttcactgtgttgcccaggcctgtctgttggcctcaagtgatcctcctgccttggatctcccagggtgctgggattacaggtgtgaaccactgtgctcagcccattttttatttgtttcttgaaggaaggtagcagtattaattaattttggactttgctcactaaagtttgaatgttaagaatagatgtatacagtctggatgcagtggtgcatgcttgtaattttagcactttggggggctgaagcgggaggatcgcttgggctcaagagtttgagaccagcctgggcaacatggtgaaaccttgtctctacaaaaaaattttaaaaaattagccagacatgatggcatgcacctataatcccagctacttgggaggctgaggtgggaggattgcttgagtccagggaggtcgaggctgcagtgagccatgatcacaccactgcactccagcctgggtgacagagtgatactgtctc

SEQ ID NO: 157523 - DNA, 1218 bp, Homo sapiens; identical to SEQ ID NO: 155165

SEQ ID NO: 157524 - DNA, 1652 bp, Homo sapiens
atggtgtccctgctgattggagagctaaagagccaccaagatctgcacaccagtcactgtgctcagtgcccctgtgtgcccccaattcacccccagatggtacaaccctcctggtgttccccatggttcctatggagtgcatctggagtaggcttctcacaaagattccagaccagtggcaaaaatgaatgtccacctccaattccctcctatcaccctataagccataggtctagaaaaattctctgtgagtggcattatgccagcttggggaaggaagtggcacagactgaaacgaccttttctcttaccagtcatggcttatctcgatcctcccctgaagttatcagtgcccacgactatagccagcagtgtgacatttggagcataggcgtcgtaatgtacatgttattacgtggagaaccaccctttttggcaagcttaaaaaagaagctttttgagttaataagaaaaggagaactacattttgaaaatgcagtctggaattccataagtgactgtgctaaaagtgttttgaaacaacttatgaaagtagatcctgctcacagaatcacagctaaggaactactagataaccagtggttaacaggcaataaactttcttcggtgagaccaaccaatgtattagagatgatgaaggaatggaaaaataacccagaaagtgttgaggaaaacacaacagaagagaagaataagccgtccactgaagaaaagttgaaaagttactcaaccctggggaaatgtccctgatgccaattacactctagatgaagaggaggaaaaaccagtctactgcttatgaaaagcaatttcctgcaaccagtaaggacaactttgatatgtgcagttcaagtttcacatctagcaaactccttccagctgaaatcaagggagaaatggagaaaacccctgtgactccaagccaaggaacagcaaccaagtaccctgctaaatccggcgccctgtccagaaccaaaaagaaactctaaggttccctccagtgttggacagtacaaaaacaaagctgctcttgttagcactttgatgagggggtaggaggggaagaagacagccctatgctgagcttgtagccttttagctccacagagccccgccatgtgtttgcaccagcttaaaattgaagctgcttatctccaaagcagcataagctgcacatggcattaaaggacagccaccagtaaggctgggcaagtgggttgcagtggaaatcaactcaagatgtacacgaaggttttttaggggggcagataccttcaatttaaggctgtgggcacacttgctcatttttacttcaaattcttatgtttaggcacagctatttataggggaaaacaagaggccaaatatagtaatggaggtgccaaataattatgtgcactttgcactagaagactttgttagaaaattactaataaacttgccatacgtattacagcagaagtgcttcagtcattcacatgtgttcgtgagattttaggttgctatagattgtttaagacagcttattttaaatgtagaaaaataggagattttgtaactgcttgccattaacttgctgctaaattcccaatgtattgattaaatcaataaaaaacagatgttactcaaaa

SEQ ID NO: 157525 - DNA, 9534 bp, Homo sapiens
  misc_feature (1)...(9534): n = a,t,c or g
cagtaaaaatatagcacagggccgggcgcggtggctcaggcctgtgatcccagcccaggctggcggatcacctgcggtcaggagttcaagaccagcctggccaacatggtgaaaccccgtctctactaaaaatacaaaaaatttaggtgggcgtggtggtatacgcctgtaatcccagctactcgggaggctgaggcaggagaattgcttgaacctggagaaggaggttgcagtgagccgagtttctgccactgcactccagcctggggaaagagtgtgaccgtctcaaaaaaaaaaaattatatatatataaatatgtgtgtgtatatatgtatattatatatgtatgtattatatgtatgtatattatatatatatagtacacaaggttataagtggtgcacccgaagaggagggcacttaccatgaatggagcttgctgagctggaagttgccctggttgagtcggtgactgaatgtgaaggcctcagacattacactactggagactttataatctgtacacctaggctacactaaatttataaaaatatatttttcttcagaataaatcaaccttagcttactgtaactttataaactttttacttcgactgttgtaataatacttagcttaaaacaaacacattatttagctgtacgtaaatattttctctgcttatctccttatttataagttttctattttaaaattttttaatttttttcttaaaaaatttttttttgttaactaagacacaaacacagcacacacagtagccttgacctacacagggtcaggatcatcaagacatcactaggagataggaatttttcagctctgttataatcttatgggggccaccatcacatacgcagtctgtacttgcaaaacattatgtggcatgtgactgtaattgtagacctaaaatccatttcctacctgccctaatttcggtctttattttaaacccttgtttcatttattcttggggaaaattcccaaatcctgtgtttgtttttttagtaattattttgccaaagaaacataagaagaaaaaggagcggaagtcattgccagaagaagatgtagccgtgagtagtaatgtgtttgacttcactttgactaaaaagaaagtttacttaaataacaaactaaaggaaagaagtgtttttaaaggtttccaaggaatgggccagcattggtagtcattgtgtagattcgaaaaagcactgaaatgacacagccccagacagtccaagtgtccttcaggcatagcttactaaatggtgctggccttaccaactgctgtctctgaatttgtcttccttatgccacccacagacccgccatccccctttctctttaaatgtttggacccatcttagtgacatttcacttcccctctgtactcctggttcatttcttctctctctttcccttggaggtcccagtgaaaaggcataggaagccttgttttctgtttaaaaggcatacatttccatggcagtaatggaattgttcaaaatcgggtgggaagtttaataggttatatttctgtcctgtcgaaggaaatacaacacgctgaagaatttcttatcaaacctgaatccaaagttgctaagttggacacgtctcagtggccccttttgctaaaggtatgtggttaaaatcgtgcatcagatgaatgcctgcttttacgttatttccaagtgttaaacaattgattgagaatgcttactgctggcatccttgactttgggaagtgcccactgatacagtttaaagcaggattccttaaggtatctgaaatgagaaccaagtttttaaaaaattggcagtgcactcaacactgttgtagaacacatgtccccacaatgttaaattgctgagtttgtcaacagttctcagtttttgtacttagtccatcttgcagacctatgccagtttgtgggccacatagtggtactgactctttttttacatgtgctcacgacatggtattttgttttgtgttgtgtcgttgctttgtagaattttgataagctgaatgtaaggacaacacactatacacctcttgcatgtggttaaaatcctctgaagagagagattggggactatatcaggtaagtgttgggaggaggcactgtgcaaacttactttcttttgaaaatgctttcacatcagctattcaggaaggcagtggcatgccagaatagctttgtcttgaatatataacctgtacccgcagtgaattatttttctttttaacttttcagatttgttgtttcactggagcattaagagtgggtgatacattaattttttttttttccattccaggacaggtttcattaatcttgacaagccctctaacccctcttcccatgaggtggtagcctggattcgacggatacttcgggtggagaagacagggcacagtggtactctggatcccaaggtgactggttgtttaatcgtgtgcatagaacgagccactcgcttggtgaagtcacaacagagtgcaggtatgtgggagagggagggaaggactggctagagtgaaaagctttctgtatttcccttctatgttttgtctgctggaaactatttcttcattaagaaaaaaaaaaatcctaaagcaaggatattgttttggtttctgtgtacgttctgtcccctgccagatcttggtggtccgcgctttttggaattccacatactaagcatgtattcatcaagctgactggatccatttgtccgggttcagctctcagcttgtcactccaggcttctcactctgtgctaccgcttctgcctaaagtatccttcgttcatttttatctgagaaaagcctgcttatcttgcaaggctttttccacgcagcttctacactgagtactcccaactgtccctgttagtacattgaattcccagtgagaaagtgtcttcattctttcccacatcatcaccatgaaatctctcttaatgcaaattttatagaaacacaaggtcaaactgccgcttttcctgctgtgcaaaatgggagtgactgagcatataagaaatatggaaaacagaaaactcagtggccacacctgactactcttttgtcatttttcaggcaaagagtatgtggggattgtccggctgcacaatgctattgaaggggggacccagctttctagggtaagtctgcaattgtagggaggacaccctttgttgacttggatctctgagcccctaaacatctggagatgggttagctgtcctgactgactccttttgtccccttttcagtcggctgctgcagccagcctggaccagtgactgcacatgtacattctgatgaggtgtttgttttcatttgtgtttgttcttaggccctagaaactctgacaggtgccttattccagcgacccccacttattgctgcagtaaagaggcagctccgagtgaggaccatctacgagagcaaaatgattgaatacgatcctgaaagaagattaggtgagtcattaggcctgtgagtgggtatgaacacattcttcaggattctgttctcttattaaaagtagatgcccttgaagttgaagactttctaaaacctgccctacagctgggatattgtctgtgggcgatagtttttgttatcttttgttgaaaaagtgaacagtgcctagtaaagtgagatggcttttacaccttttatgatgactgcttctgctggagttgaaatgttttcattctgcatttgtgtagttcggtgctttgttcaaaggtaagtgttttcaccaaagtatgttttgcatgtgttttttatttgctgcaattttgactgcttagaagtttctgttgtcagaagtaaatttaagacaatgccaattttcctcccatccatgaaacataccatgctgaatatacctgcaacttaagtgttaaaaattctgctaatatcagaattacagatctttttttttttttttttttttttgagacggagtctcgctctgtcgcccaggctggagtgcggtggcatgatctcggctcactgcaaactctgtctcccgggttcacaccattttcctgcctcagcctcccaagtagctgggactataggcgcccgccatcatgcccggctaattttttgtacatttagtagagacggggtttcaccatgttagccaggatggtcttgacctcctgacgtcgtgatccacccgcctctgcctcccaaagtgctggaattacaggcgtgagccaccgtgcctggccagaattacagatctttacagcaaatgcttatattttaagaagtgtgtctgtcacctctagtcttggtggctcagatgaaggataactgcatttctcaaccagtgatgtatttacagtaggtgctgcttttcttttgtgtgtgtgtatcttaggaatcttttgggtgagttgtgaggctgacacctacagtcggacattatgtgtgcaccttggtttgttattgggagttggtggtcagatgcaggagcttcggagggttcgttctggagtcatgagtgaaaaggtatgtgttacggggctagaagttttagagctggttcttaccatctgccagcctttgatggcactccacttgcttcatgtcgtgggaaagatgctttccaaagtgttgagttcagtccagggcagcttccctgttctgttaattaaactttgggacattaaaatgggctaagggagatgattgggtagaaagtattattctattcatttgcctcccagcctacaaaaatgcctgcttggggtctaatacttcaacggttaaagatgcctggaagagggcgcggtggctcacgcctgtaatcccagcactttgggaggccgaggcgggtggatcatgaggtcaggagatcgagaccatcctggctaacaaggtgaaaccccgtctctactaaaaatacaaaaaaaattagccgggcgcggtggcgggcgcctgtagtcccagctactcgggaggctgaggcaggagaatggcgtgaacccgggaagcggagcttgcagtgagccgagattgcgccactgcagtccgcagtcccacctgggcgacagagcgagactccgtctcaaaaaaaaaaaaaaaaaaaaaaaaagatgcctggaagagccaggactgaagaggctgaaaacataatgagcttggactagtaaacaagtgacattcagttttaggaagtttggggtctgatgggctgagatacaaataaactgaattattttcatacatggctgcttttcaggaccacatggtgacaatgcatgatgtgcttgatgctcagtggctgtatgataaccacaaggatgagagttacctacggcgagttgtttaccctttggaaaagctgttgacatctcataaacggctggttatgaaagacagtgcagtaagttccgggttaggagtttatatttggaaagaacgtactccaaagatgacgcttgctctttttattgttttccttgggttttattttatttttttcaagtccaaaccaagtatattaatttaaagtaaaagtttaatggtaggcatacttaaaaataaggcacattaggccaggcacagtggctgatgcctataatcctagcactttggcaggctgaggcaagaggatcacttgagtccaggaaggagtttgagaccagcttgagcccaggagatcaaggctgtgagctgtgtttttatgatgatcagagagttggccttttataaattaaaacattgtctttttctctaacttgagggataaaaatttctggatatttaaaatgtttgtagttggtaattatttatattcaaatcttgtatagatgttcacattttttgtatgtgtataggctgtaataaatactgaaagatggcaccataatagttgaaaaaactcagtcacaaaacagtggacaacataaatgtgatgtcctctccttatcaaaccattggcttctgggtgaatgtaaagggaggggagaatgtgatcaaaagaggtctaggtgagtggagatggtatgaggcagatgggtgcattgggtaccattgaacctctggagaggtagccttaacttgtacccactgacctataaattctgcaccaagacttttgtgtgattggttcaacagggctcagtaatcttgttctcaagttctttaagagcctgttattgcctggatctccagtaaatctgttctttctcctcataaggaggagagaggagtaattaaggaatgccaaggctatttttatgtttcaaatgaaaatatggaccacgtgcggtggctcacacccataatcccagcgctttgggaggccgggccaggcaaattgcttgagctcaggagtttgagaccagcctgggcaatatggtgaaaccctgtctctattaaaaatacaaaaattagctgggcgtggtggcacgtgcctgtaatcccagctccttgggagactgagaatcacttgaacttgggagatggaggttgcagtgagccgagaatgtgccactgcactccaccctggacaacagagggaggttctgcctgaaaattaaaaaaaaaaaaaaaaaaaagaaaatacttgtgagtctctagaacctgaaaacctgaaagtcttctttactacttttgagtcgtgtgtaatgtgcggagagtggtacctatagcacagtgaggtggctcttctgagtaccactcatgccccttgcagctagtgggctataagtgtcatccctgtttcctggtgtcaggccccactcccttgttgtcctcctttactctggtgtgggagtggggtggagggcagcagctgggccccttacacttggtgccatctctgcaggtaaatgccatctgctatggggccaagattatgcttccaggtgttattcgatatgaggacggcattgaggtcaatcaggagattgtggttatcaccaccaaaggagaagcaatctgcatgggtnagaggggatgtttatttcccaaattctaaatgtttgtggttacatactaggtgtatatatttatggggttcatgagatgttttgatacaggcatgcaatacataataatcacatcatggagaatggggcatccatcttaagcatttatcctttgtgttacaaacaatcctattttactgttagttatttatcaccttagttattttaaaatatacacttaagttattattgattatagtcaccccgttgtgctattaaatagtctcactcttcttgttcattcttttggttttttggtggtggtgttttttttttttttttttttttgagacagtcttgctcttttcacccagactgcagtgcagagacgtgacctcggctcactgcaacttctgcttcccaggttcaagcgattctcgtgcctcagccttccgagtagctaggattacaggtgcacaccatgacacctggctaattttttgtatttttagtagagacagggttttgtcatgttggtcaggctggtctcgaacttctgacctcaggtgatctgccctcccaaagtgctgggattacaggtgtgagccaccatgccgggcctgattttttttttttttgtacccattaaccatccctacctccctgccagccccccactaccctcccagtctctggtaaccattcttttactcttctctgtccatgagttcaattgtttcgattcttagctcccacaaataagtgagaacatgcaatgtttgtctttctgtgactggccgattacacttaatataacgatcttcagttccatccatgttgttggaaatgacaggatctcattcttttttaaggctgaatagtaatccatcgtgtatatgtaccacattttctttatccatttatctgtcgatgggcacttcggttgcttccaaatcttggctactgtgatctctttgataacactgatttcctttatttggggtatatacccagcagtgggattgctggatcctatggtagctcaatttagtttttcgaggaacctccaaactgttcttcatagtggttatactaatttacattcccatcaacaatgtacaaaggttcccttttctccacatccttgccagcacttgtcattgcctgccttttggatataaaccattttaactggagtgaaatgatatttcattgtagttttgatttgcatttctctcgtgatcagcattgagcactttttcatatgcctgtttgccatttatttgtcttcttttgagaagtgtctgttcaaatcttttgcctgttttttgatcagattattagattttttttcctatagtgctgagttccttatatattctggttattaatcccttgtcagatgggtagtttgcggatattttctcccattcttatgcatatggatatctagttttcccagcaccatttattgaagagactggtttttacccagtgtatgttcttggcacctttgtcaaaaatgagttaaatgtaggtgtgtgcatttgcttctgggttccttattctgttccattggtttatgtgcctgtttttatgccagtaccatactgttttggatactgtagctctatactataatttgaagtcaggtaatgtgattcctccaggtttgttctttttgcttaggatagctttggctattttgagtcttttgtggttccatgtaaagtaccagtgttttttaacttgtgaaagcttagctactgttggattgtctcttaagactttaaatgctctgcgcaccctcttagtgaatgaaccttagagctattcatttaatgggtctaatttgtaccagaagtaagcatgtcatcaggattccttagctctgtgagcaggcaaggcagccacggcttatggacagcagcagaaaaggaatccttaaaacttcaaaggttctgtggccccaaagggagtgtgcatgccgttcttatagacgtcttgagctgcaagcctgttatgtgtatcgttaggtgctttggttaggtgttttttaacttcagaagtttaacgtcatttcaaaggcctccttctcataatggagtatttcctccatatgcacatcctgagcaaaggtaaccccaattaaagtagtagctcagagttttaaaagttttaaagtggcatacaacagtagaattggggctcatcaattatcaattctttcacccttcaaataattcttttctttattcaatgcctgtagctattgcattaatgaccacagcggtcatctctacctgcgaccatggtatagtagccaagatcaagagagtgatcatggagagagacacttaccctcggaagtggggtttaggcccaaaggtaagtggtactgggttgcgtgccctgccaggttcttttttttttttttttttttttaaatttatttttttattgataatttttgggtgtttctcacagagggggatttggcagggtcataggacaatagtggagggaaggtcagcagataaacaagtgaa

SEQ ID NO: 157526 - DNA, 578 bp, Homo sapiens
atggacaagtccctcttgctggaactccccatcctgctctgctgctttagggcattatctggatcactttcaatgagaaatgatgcagtgatagaaattgttcagtgtaggatgtgccacctccagttcccaggagaaaagtgctccagaggaagaggaatatgcacagcaacaacagaagaggcctgcatggttggaaggatgttcaaaagggatggtaatccctggttaaccttcatgggctgcctaaagaactgtgctgatgtgaaaggcataaggtggagtgtctatttggtgaacttcaggtgctgcaggagccatgacctgtgcaatgaagacctttagaagttaatggttcttctgtgactccaatttctgggtgaggttgttgcctcagcctcttcacaatgactttctaaaaaaaatcacacacacacacacacacactacagaagaggattgcaaacacatggctccatcttctgcacacgaaaggaaagtccctctccttttctacagtctctgtcacgccccttaaaataagtaaataaataaccttgagagaaaaaacaagaaaa

SEQ ID NO: 157527 - DNA, 856 bp, Homo sapiens
attatgggcctctgaatttacttacctttaatgtgttttatcataatgaacatcatgatttgcccaacattcctggaaaaagtcttccactggtgaggaaaatagcagctgaatactatgacaacctccctcactacaattcctggataaaagtactgtatgattttgtgatggatgatacaataagtccctactcaagaatgaagaggcgccccccaggcagagatggcgctggacctaatatcattattgccctagggattcttctccaaaactttagatgataaaatggagcttttgcattattaaacttgagaccagtgatgctcagaagctcccctggcacaatttcaaagtaagaactcggtgatcccaataagtgaatctggcttttaaacagtcagcctgactctgtactgctcagtttcactcacaggaaacttgtgacttgtgtattatcgtcattgaggatgtttcactcatgtctgtcattttataagcatatcatttaaaaagcttctaaaaagctatttcgccagggcacggtggctcatgcctataatcccagcactttggggaggccaaggtggggtggatcaccttgaggtcagtagttcgagaccagcctgggccaacacggtgaaaccccatctctacttaaaaaatgcaaaaattagccgggcgttggccggcacatggcctgttaatccccagctacatgggaggctgaggtgggagaattgcttgaacccagggaggcggaggcagaggctgcagtgacccaagattgtgccactgcacttccaccctggggcaacagagcaagaccccatctcaaaaataaataaatatatat

SEQ ID NO: 157528 - DNA, 517 bp, Homo sapiens
ttttatgttttacaatttgtatggctgattctacgcacgtttaaatgtgtttatgacaattgtagatttcggttttcctctggttaaaccaatgtggaagtacacaggatgggagctgagagacaagcatcctgggctcagccatgctggcctcagtgggccaagctggggacagatgtcctctgctccgtggatcctgctggctcagggtggggaaggggcctcaggagaggagtcaggctctcttctttattctcctcacagccatggtgaatggcattcctgggaggctggtttggagaactcgctgaaccatgctctgcatccagtctaggtggctcctagcggggcttggtgggttctccatcctcagcaccatctgcagcaccatcttggtcatctgagaagcagggttgcagaggacactgtggtctgggtggcagtctggtgccacatggcagaattcatcacagtagcaacttcccctcttgcagtggtgatccgtcccaagacagca

SEQ ID NO: 157529 - DNA, 546 bp, Homo sapiens
gactttactcacagagttcttttcacagcctgaatgtgtttgcaaccaagttcttcactgtggcatttgtaaaactggaaacaatcaaaatgtccatcagtaggggattaggaacattaattcgtacagtggggaactcagtaccagaaggagggatgaggaagacctattgataaggggcagagtacataccatataatgcaaatatatatttgctttttcttaaaacagtgcaaagataaaagtctaaagtggttgctgtggaggacaggggtcagtggtggaagtgagaccgaaatagactctgaagtaatatctggactttgaaattgttaagtgttttacatattaccaaactaagtttttaagatagtccctaaaattgaaagaatggtatctgaaatgaatgaatctaaattccttggattgcattctacaggcgccaaccctgagaccaaaatttggaaggtggccctgagcagcagctgaagggaagtgggaggtgagacaggaaagaggcggcggcatggggcgtccgggagccgg

SEQ ID NO: 157530 - DNA, 655 bp, Homo sapiens
cggaattcccgggtcgaccagcgtccggagaatctggtacagtgtcattttcgttgctctgttccactctaccgatctgccgtcatttacagtcccctgttgcgcatgtagatcatttttgaatttgttattggaaaatactgcagcaaataccttaaagttcacatgccgtaaatctacttttatagttaaaatttttcaaaaggaacacaagagatggctttttgtacatttttgtgcttaacttaccactgacttcttttcaaggtcactgtggaatatagacccataatcgacaaaactttgaatgaggctgactgtgccactgtccccccagccattcactcctactgatgagacaagatgcggtgatgacagaatcagcttttgtaattatgtataatagctcatgcatgtgtcaatgtcataactgtctttatacgcttctgcactctggggaagaaggagtacattgaagggggattggcacccagtggccggggagcgtggcactttgtcccttgcttcattcttgtgacaagataaaactgggcacagctcttaaataaaatataaatgaacaaactttcttttatttccaaatccatttaaaatattttactgttgtgactttagtcatatttgttgacctaca

SEQ ID NO: 157531 - DNA, 2108 bp, Homo sapiens
gttccgattcatgagttcgatcactctatgcccttccgtgggcacagaaagaagccctttggggggcactgggggaagcacaccctgtcctatgtggacgtcagcactgggaaggtcactgtgaaatgtagacccataatcgacaaaactgtgaatgaggctgactgtgcccactgtcccccccagcccattcactcctactgatgagacaagatgcggtgattgacagaatccagctttttgcacagcccagagaaacaaccccatcacacacaagaaacagttgtgcctcatgtgatggggccctcagcacctaggaaggagtggactgttggcgcacgcagcagcttgaataaatctgaaagtcacctacgctgcgtaagagaagccaaatttaaaaagtgcatgctgtggtacagagggtgtcgagaatgcctcctacgtgacggaaagcagatccgtggttccctgccagactggcaggagcagattccaaaggcacaggaagaagcttgcagtacaaagataaaaatctaaagtggttgctgtggaggacaggggtcagtggtggaagtgagaccgaaatagactctgaagtaatatctggactttgaaattgcagctgctcccaaccccagaacctttgctgtcttgggacggatcaccactgcaagaggggaagttgctactgtgatgaattctgccatgtggcaccagactgccatccagaccacagtgtcctctgcaaccctggtaactcacatacaggcccgattccaccgacagcaaagctggatgcgatggctggcagaggcaaaccctttgcctgcacttcaggccaaagccgggatgtggcctagatggttcctaaggtccctgacaatcctgagatcttgcatcttgtctatttcaggtcaaaggtgcctacatgctccttctagctttgtttccctgatgttccttgccacctgctactcctctctgagctacttttccaggttccacagggagaggttcatgctgtccgtggtagacatgagggtagagaatgaggtggttgggttccacttacctttctatcatcttgcagtatggatgtctcttgactggtaccgtgtagacttttgagggcacacagggagtctgcagagagatactgggggacattgaggcagcagcagtgggggttgggagggcagaaaatgagggacagggaacatttaccttgtgtttctctcagcttctcagatgaccaagatggtcatctgaagaaagctgaggatggagaacccacccaaagccccgcttaggagccacctagactggatgcagagcatggtgagctccctgcaggttctctgagaaggggtggatggcagcctgctccttgcctttgtgccctccaggccccaaagtcagggaaccaaaagaagaaaggggccgtagctagggcagagctccactgcaatgattgttttaggggtaggagccaggattgccgtctgtggacactgaaatttgaatctcatatacttttgtgacaaaacattcttcctcttttgttcttctcctaccatctaaaaatgtagaaaacattcttagcctatgagttgcacaaaaacaggcagtggccagatttgggccccaaagacccatagtttgctgacttctgccctaaatcatccctcccatttctttccttctgtgtccttgttactgacaaagccactttccctaaaatggggtctttccctgtttggtgccatgaagccaatatgcaaaaccgaaagtgagcctcaagcagtgcaggctttatttggtggccatggaattgagaagtgagagcttggctcacaaatcaacttttctgctcgtgagacccaggaagtcacagatacagggcatctttagtgaaggggctgagcattaaaagcaaggggaggagtggccaggtgcaatggctcactcccataaacccagaactttgggaggccaaaatgagaggattgctgagaccaggagttcgagaccatcctggtcaacatagtgatacacccccatctctacaaaaataaaaatgaaaaaagcaaaaaaaaaaaacttaaaaa

SEQ ID NO: 157532 - DNA, 298 bp, Homo sapiens
cctgttggccagactggtctcgaactcctgacctcaggtgatctgacagcctcggcttccctaaatgctggcattccgggcatgagccaccatgcctggctgaaacttttctagacatacaaaagtgagaatatgcatcccctgcagagctgcacatcatgaaaagtgaaaggaagtccttcccacagaagagcaatggtagcaaaagggaatctgactctacatgagagaatgaagagccctggaatcagtaactacatgggtaactacaagatccttttttcctattttaaaaaaa

SEQ ID NO: 157533 - DNA, 1735 bp, Homo sapiens
atggaggccggagaggaaccgctgctgctggccgaactcaagcccgggcgcccccaccagtttgattggaagtccagctgtgaaacctggagcgtggccttctcgccagacggttcctggttcgcctggtctcaaggacactgcgtggtcaagctggtcccctggcccttagaggaacagttcatccctaaaggattcgaagccaagagccgaagcagcaagaatgacccaaaaggacggggcagtctgaaggagaagacgctggactgtggccagattgtgtgggggctggccttcagcccatggccctctccacccagcaggaaactctgggcacgtcaccatccccaggcgcctgatgtttcttgcctgatcctggccacaggtctcaacgatgggcagatcaagatttgggaggtacagacaggcctcctgcttctgaatctttctggccaccaagacgtcgtgagagatctgagcttcacgcccagcggcagtttgattttggtctctgcatcccgggataagacacttcgaatttgggacctgaataagcacggtaagcagatccaggtgttatccggccatctgcagtgggtttactgctgctccatctcccctgactgtagcatgctgtgctctgcagctggggagaagtcggtctttctgtggagcatgcggtcctacacactaatccggaaactagaaggccaccaaagcagtgttgtctcctgtgatttctctcctgattcagccttgcttgtcacagcttcgtatgacaccagtgtgattatgtgggacccctacaccggcgagaggctgaggtcacttcatcacacacagcttgaacccaccatggatgacagtgacgtccacatgagctccctgaggtccgtgtgcttctcacctgaaggcttgtatctcgctacggtggcagatgacagrctgctcaggatctgggctctggaactgaaagctccggttgcctttgctccgatgaccaatggtctttgctgcacattttttccacatggtggaatyattgccacagggacaagagatggccacgtccagttctggacagctcctagggtcctgtcctcactgaagcacttatgccggaaagcccttcgaagtttcctaacaacttaccaagtcctagcactgccaatccccaagaaaatgaaagagttcctcacatacaggactttttaagcaacaccacatcttgtgcttctttgtagcagggtataatcgtcctgtcaaagggagttgctggatataatgggccaaacatctggtcttgcattgaaatatgcatttctttgggattgtgaatagaatgtatcctactcctgattccagtgtactagttatggatctttctctccctggcatgtgaaagtcagtcttagaggaagagattccacttgcacggcaacagagccttacgttaaatcttcagtccagttatggaacagcaagtgttggaactctttctgcttgttttgattcaaagggcagttactgatgttgttttgattatgcaactaagtaggcctccagagcctctctagtggcagagcagcttacacctccctccgttgagaacgatggcttctgcctagtacctatccttgtgtttctgatgcaggggtagcattggttcaagttctctcctgctgtggtcagagttgcttcgatgttggccaagtgcttttcttcttgggctccc

SEQ ID NO: 157534 - DNA, 429 bp, Homo sapiens
gttttcggcacgagcaggcctccaaggaccgcaacgtggttttctcaccctatggggtggcctcggtgttggccatgctccagctgacaacaggaggagaaacccagcagcagattcaagcagctatgggattcaagattgatggtgagccacgggacaccaggggaggtgggtggcatgcagaacagacctaccagaagccaaggaaaggctggctctggcttagccgagccaagccccatacagctgtgctgcaggggccaccccatcttcttcccactacactccaagtcactggacccttgaatctccaagggtgtctgaccagtagatttaccgcttattcaccaccgtgtgatcttaacctcgttaagtttgcccatctacaaaatgaggattatttgctgtcctaaagaattcatgagccgg

SEQ ID NO: 157535 - DNA, 1588 bp, Homo sapiens
  misc_feature (1)...(1588): n = a,t,c or g
gaactgaggctgatttgacgtcgtagacgcccgaacacgcgtncggccaagagcgctgtcaagaagacccacacgcccccctccagcagactgtaattcctagcagcgtaagcagaccgccgccagagcgaggagcgaaccgacaatcgcaaggcacctctgagaacttcaggatgcagatgtctccagccctcacctgcctagtcctgggcctggcccttgtctttggtgaagggtctgctgtgcaccatcccccatcctacgtggcccacctggcctcacacttcggggtgagggtgtttcagcaggtggcgcatgcctccaaggaccgcagcgtgggtttctcaccctatggggaggactcggtgttggccatgctccagctgacgacaggaggagaaacccagcagcagattcaagcagctatgggatacaagattgatggtgagccacgggacaccaggggagacaagggcatggcccccgccctccggcatctgtacaaggagctcatggggccatgggaacaaggatgagattcagcaccacagacgcgatctttcgtccagcgggatcttgaagcttggtccagggcttcatgccccacttcttcaagctgttccggagcacggtcaagcaagtggacttttcagaggtggagagagccagattcatcatcaatgactgggtgaagacacacacaaaaggtatgatcagcaacttgcttgggaaaggagccgtggaccagctgacacggctggtgctggtgaatgccctctacttcaacggccagtggaagactcccttccccgactccagcacccaccgccgcctcttccacaaatcagacggcagcactgtctctgtgcccatgatggctcagaccaacaagttcaactatactgagttcaccacgcccgatggccattactacgacatcctggaactgccctaccacggggacaccctcagcatgttcattgctgccccttatgaaaaagaggtgcctctctctgccctcaccaacattctgagtgcccacgtcatgagccactggaaaggcaacatgaccaggctgccccgcctcctggttctgcccaagttctccctggagactgaagtcgacctcaggaagcccctagagaacctgggaatgaccgacatgttcagacagtttcaggctgacttcacgagtctttcagaccaagagcctctccacgtcgcgcaggcgctgcagaaagtgaagatcgaggtgaacgagagtggcacggtggcctcctcatccacagctgtcatagtctcagcccgcatggcccccgaggagatcatcatggacagacccttcctctttgtggtccggcacaaccccacagaggaggctaccttctatcacccacagacagtgccgggtccccgctctgtgactcaggcagctgcgactccagacagctcactcatctgcctagatctcagtccttccacccacatccagcctgatgagctgtcccactccttctgcttctcaacccccatggttcttccaccctcaggaacagtccttttcatgggccaagtgatggaaccctga

SEQ ID NO: 157536 - DNA, 802 bp, Homo sapiens
ttttttttttgagtctcactctgttgcccaggatggagtgcagttgtgcgatctcagcttagtgcaacgtccgcctcctgggttcaagcaattctcctgtctcagcctcccaagtaggtgggactacaggcacacgtcaccacacccagctaatttttgtatttttagtagagatggggttttaccatattggtcaggctggtctcgaactcctgacctcaggtgatccacctgcctcggcctcccaaagtgttgagattaaaggcatgagccacctcgtctggccaaagcctgaggttttaaggcactacacttaacagcttataaacacataaagtaacaaagggtaacagagtgggacacgtgggtgccaggggccctctaaatgggaagcctatacaggctcagaaaccatgaagatctcctggttctttctaaagaaaccagaagagcaggttttagcagcataaaattttaaagaggcccatcaaatcaaatagtctggtatctatactccccgttgtctctctaaggttggtcaccccacacccacgtctcttcccctgaggccaagaacccaggagtgaggttgaatgacattatctggttcaagccactccttttactcacaggcacagtgacagaaaagggcctggccctaagtcacacagcgcaggcaagcagtcaaaccctgatattccaggttggcagaagggaggcagcctttacctcctgcctgactctccatctactcactcaccggaccaacgatgtcagagacatgggagaccgtggtgcccga

SEQ ID NO: 157537 - DNA, 393 bp, Homo sapiens
ttttggtttgtttcctttaattaaatctcaaatttacaagagtccagactgtctggacagcccaacagggacacagagagttttacacactgatgtctcaacagcacagggttccatcgggacttcgtgagaaaatcaggatccatgtacgttcttgaagagctgtctctcggcctaagataagtggagaaggttgccttggaagcgtggggtagaggtaggaacagctggctctctggccaaggcctttggctttttcgcggaagcaaaaaccgaaccacgggaaggctgctccgagtctggggtcagaatttcctatcagtgagtgcagcagacaaattccaaatgtctcaaatactgaatggagccagctagacctaccttctcaccaag

SEQ ID NO: 157538 - DNA, 410 bp, Homo sapiens
  misc_feature (1)...(410): n = a,t,c or g
aagtcgtggtaccacccgagatgtgtgnnnnnnnnnnnnnnnnnnnnnnnnnnnnnnnnnnnnnnnnnnnnnnnnnnnnnnnnnnnnnnnnnnnnnnnnnnnnnnnnnnnnnnnnnnnnnnnnnnnnnnnnnnnnnnnnnnnnnnnnnnnnnnnnnnnnnnnnnnnnnnnnnnnnnnnnnnnnnnnnnnnnnnnnnnnnnnnnnnnnnnnnnnnnnnnnnnnnnnnnnnnnnnnnnnnnnnnnnnnnnnnnnnnnnnnnnnnnnnnnnnnnnnnnnnnnnnnnnnnnnnnnnnnnncacaatggaatatcgggatttcattatttggagaatcaggaaccaaccagccaaccatgttgcttttataagacagagctgagaaagcaaagcttggctgtcgtcttggctctg

SEQ ID NO: 157539 - DNA, 1109 bp, Homo sapiens
tcccgcctcagccccgggtagctgggactacaggtgtgtcacgagcaccacccgtgctaatctttgtattttttgtagacagaaggtctcaccatgttgcccaggatggtctcgaactcctgggctcaagcgacctacctacctcggcctcacaaagtgtgcacattgtaatatcgtgatttcatatttggagaatcagcaaccaaccagccaaccatgttgcttttataagacagagctgagaaagcaaagcttggctgtcgtcttggctctggtaccacccacgagatgcgggcgattctcagctcagggcgtggaggcgtggtgtgggggagtctatttgccatttttgtttgtcagcagggggcaggggttctcaaagattgcaaaatgctgctgcaggtcaggaaggatattttgggtgcctgtgggggaggtgaaacaaggtcccatgacatgttttgcagaaccttgtctgtggagggtagaggttgcggcaggggcctgtgggccttacttggtgagaaggtaggtctagctggctccattcagtatttgaagacattttggaatttgtctgcatttaaaaccaagagatcacacacacctgtctggatttggagtttctcttggaaaactcgccagtccggccgtctgagcctgcaatgaagccctggtgaaagctgtgcaggggccgcccctctcccctttgggccaaaaatcctctcccaaatccctttcggcctctcccctggcctgctgcactcacttgataggaaatttctgacccccagactcggagcagccctttcccgtggttcggttttttcttccgcgaaaaaagccaaaggccttggccagagagccagctgttcctacctcttaccccacggttccaagggcaacctttcttccacttatttttagggccgagagacagctcttcaagaacgtacatggatcctgattttctcacgaagtcccgatggaaccctgtgctgttgagacatcagtgtgtaaaactctctgtgtccctgttgggctgtccagacagtctggactcttgtaaatttgagatttaattaaaggaaacaaaccaaaaaaaaaaa

SEQ ID NO: 157540 - DNA, 311 bp, Homo sapiens
  misc_feature (1)...(311): n = a,t,c or g
ccccnnnnnnnnnnccnnnnnnnnnnnnnnnnnngcagtgttcttgtttatttgtttactagttcatcnnnnnnnnnnnnnnnnnnnnnnnnnnnnnnnnnnnnnnnnnctcagctgtgtccaccatggtatcatgaactcagtaccaggcttggcaaaaagcgtgggactccttagaaccaggtatgattctcccaaacaacccttgctctgctctgaggctgtcgtactaatttgcaaagatctgagccgggggtggcagaagcctggtacccaggggattgggggctgatgagagacatgggaccagg

SEQ ID NO: 157541 - DNA, 1342 bp, Homo sapiens
  misc_feature (1)...(1342): n = a,t,c or g
cgctgtacccggcaaaactcagcgggggctggatagccatgcccaagtactggagggcgccgaactgctccaacactgggggccgcctgggtgcaaacaaccgccctgggagcttctacaagttcccactgaaggatggtccccggctgcaggcctggctgcagcacatgggctgtgagcactgggtgcccagctgccaccagcacttgtgcagcgagcacttcacaccctcctgcttccagtggcgctggggtgtgcgctacctgcggcctgatgcagtgccctccatcttctcccggggaccacctgccaagagtcagcggaggacccgaagcacccagaagccagtctcgccgccgcctcccctacagaagaatacacccctgccccagagccctgtctttccagtctctggcccagagcgcctagaggtgctgggccccacatcggggagccccaagactgtggccaccatgctcctgacccccctggcccctgcgccaactcctgagcggtcacaacctgaagtccctgcccaacaggcccagaccgggctgggcccagtgctgggagcactgcaacgccgggtgcagaggctgcaatggtgccaggagcggcaccaggcgcagctgcaggccctggaacggctggcacagcagctacacggggagagcctgctggcacgggcacgccggggtctgcagcgcctgacaacagcccagacccttggacctgaggaatcccaaaccttcaccatcatctgtggagggcctgacatagccatggtccttgcccaggaccctgcacctgccacagtggatgccaagccggagctcctggacactcggatccccagtgcataaggatcaagacagacaatgtcgagggacaaaagatagaagatggaggaggaaagacattatacgtgggcttggcccagccccaccgcccangccctgggtagtagcagtccctccctcaagggcctggggttataccaccccactcctagggatctcttgaaccttaggggtgacctgggcccaagtctctcatcagcccccaatcccctgggtaaccaggcttctgccacccccggtctcagatctttgcaaatcagtacgaccagcctcagagcagagtcaagggttgtttgggagaatcataacctggttctaaggagtncccacgctttttgccaagcctggtactgagttcatgataccatggtggacacagtctgagaaaaatccctgtccctcatggtgctcattctacttgagtagacgatgaactagtaaacaaataaacaagaacactgcagacatgaaaaaaaaaaaaa

SEQ ID NO: 157542 - DNA, 378 bp, Homo sapiens
ggcacgagggcccactagcactgggcttccacttggcctacatcaccatgaggcttttcttggccctcataatcaccaccatctaccactgtgagtaccaccttccctttctgacttcccctgaatgccacgactaccaccatattaagcaatgaccttctccccacaatgggtccctaagcaacaaacatgaccctccctccttaagcttatgataacacgcactggcatctcaggttacatgccattgctattagcagaacatgcctcatgggtgcgaaaataaccacactgggatgaccctactcttttacttctgaaaatgtgtgcttctccaactgggggtgttaaacctttatttggactctgggccctttc

SEQ ID NO: 157543 - DNA, 398 bp, Homo sapiens
  misc_feature (1)...(398): n = a,t,c or g
acccgggtcgacccacgcgtccggaagaaaaccactatgaagataatcccattcaacagactcacaattggagaaggacagcaacaccacctggggggagccaaacaggctggagacgtttaaaagaccgtttcaaaagagatttacttttttaaaggactttatctgaacagagagatataatatttttcctattggacaatggacttgcaaagcttcacttcattttaagagcaaaagaccccatgttgaaaactccataacagttttatgctgatgataatttatctacatgcatttcaataaaccttttgtttcctnnnnnnnnnnnnnnnnnnnnnnnnnnnnnnnnnnnnnnnnnnnnnaaaaaannnnnnggggggcctccacctccccct

SEQ ID NO: 157544 - DNA, 891 bp, Homo sapiens
  misc_feature (1)...(891): n = a,t,c or g
ctggcatacaaatctgtgggtcggatatgagaaatatcatttgataatcacacagtctgccatcccatatgcattaagagtgaaactggaaggctggaatgggcagacccagtactgcagactatgccatgttcaaggttgtacatgaagttgacagagtaccgctttacatatgcatacttcgctggtggggatgctgaagatgcctttgatggctatgattttggcgatgatcctagtgacaagtttttcacatccccataatggcatgcagttcagtacctgggacaatgacaatgataagtttgaaggcaactgtgctgaacaggatggatctggttggtggatgaacaagtgtcacgctggccatctcaatggagtttattacccaaggtggcacttactccaaaagcatctactcctaatggttatgataatggcattatttgggccacttggaaaacccggtggtattccgatgaagaaaaccactatgaagataatcccattcaacagactcacaattggagaaggacatgcaacacccacctggggggagccaaacaggctggagacgtttaaaagaccgtttcaaaagagatttactttttttaaaggactttatctgaacgagagagatataatatttttccctattggacaatggacttgcaaagcttcactttcattttaagaagaaaaaaaccccatgttggaaaactccataaccagtttttatgctgattgataatttatctacatgcatttcaataaaaccttttgtttcctaagactaccagaaaaaaaccaaaaaaaaacacnnnnnnnnnnncaaataacactctttctttttttctcgcggcccctgggttcttctttgggggggggagg

SEQ ID NO: 157545 - DNA, 418 bp, Homo sapiens; identical to SEQ ID NO: 115881
  misc_feature (1)...(418): n = a,t,c or g

SEQ ID NO: 157546 - DNA, 614 bp, Homo sapiens
  misc_feature (1)...(614): n = a,t,c or g
tttttttttttgagacggagtctcgctctgtcacccaggctggagtgcagtggcgggatctcggctcactgcaagctccgcctcccgggttcacgccattctcctgcctcagcctcccaagtagctgggactacaggcgcccgccactacgcccggctaattttttgtatttttagtagggacggggtttcaccgttttagccgggatgggtctnncgatctttcnccctttgggnaaaacccctccctttttccccggggtttgggggaaaaatttttcccccggcccgggggnnccccncccccccccccgggggggcccccccccccttttttttccccaaaaaaaagggggnncccccccccccccctttcccaaagtgctgggattacaggcgtgagccaccgcgcccggcctgtaccttctcttaagtcagcttgcaatttaaatttttagttagtaaatttaactaattttaaaatatgttagtgtctgtctgcttaactattgcatacttattaaagaaacatgcgtggttatccattggaagagatcgatcctagggcttcctgatacaaacacacccacagaccccagccactctagatttctg

SEQ ID NO: 157547 - DNA, 705 bp, Homo sapiens
tttttttgagatggagtcccgctctgtcgcccaggctggagtgcagtggcgcgatctcggctcactgcaagctccgcctcctgggttcacgccattctcctgcctcagcctcccgagaagctgggactacaggcgcccgccaacactcctggctaatttttttgtatttttagtagagacggggtttcactgtgttagccaggatagtctcgatctcctgaccttgcgatccgcccgcctttttttttttttttttgagacggagtctcgctctgtcgcccaggctggagtgcagtggcgggctctcggctcactgcaagctccgcctcccgggttcacgccattctcctgcctcagcctcccaagtagctgggactacaggtgcccgccactacgcccggctaattttttgtatttttagtagagacggggtttcaccgttttagccgggatggtctcgatctcctgacctcgtgatccgcccgcctcggcctcccaaagtgctgggattacaggcgtgagccaccgcgcccggccgtacgtgtctatttttataacagaagtgtatttatagagtatgtgcaattttgtaaattgcttttcacgtttaaaataaatgtcaggtctcaaaatatattaggttctccgaatattctcaaaagccttttaaaaaatctaaattaattgtatctacccacgccacct

SEQ ID NO: 157548 - DNA, 459 bp, Homo sapiens
  misc_feature (1)...(459): n = a,t,c or g
tttttttttttgagacggagtctcgctctgtcgcccaggctggagtgcagtggtgccatcttggctcactgcaacctctgcctcccaggttcaagtgattctcctgcctcaacctctcgagtagccggtgtgcaccatcacagccacctgagtagctgggactacagttgtgcgccaccatgcctggctaatttttgtatttttagtagagacggggtttcaccatgttggtcaggctggtctcgaacatcttgacctcaggtgatctgtccatctcggcctcccaaagtgctgggattacaggcgtaagctactgcgcccggccagatttgctttgactggcctgatgtttgctcagatgtggccagcaccagcacctgctcctgggtaatgaggttactgttaatatctngggtggtcactgctttcccaggtggctcaggggtcacctgatactct

SEQ ID NO: 157549 - DNA, 583 bp, Homo sapiens
  misc_feature (1)...(583): n = a,t,c or g
ggccgcccttttttttttttttttttttttgagaaggagtctcgctctgtcgcccaggctggagtgcagtggcgcgatctcggctcactgcaagctccacctcccgggttcacgccattctcttgcctcagcctcccaagcagccgggactacaggtgcccgtcaccacgcccggctaattttttgtatttttttagtagacacggggtttcaccgngttagccaggatggtctcgatcccctgacctcatgattcacccgcctcggcctcccagagtgctgagattacaggcgtgagccaccgtgcccggcctcgcttggctaattttttaatgttttgtagagatggggtctcactatgttgcccaggctggtctcaaattcctgggctcaggcaattctcctgccacggcctcctgaagtgctagggatgctctcctcttaccccaacaactcagggcttgaaatgtctactatttggcttattaaagtaactcttcaaaatatacttatatggggcctttcacatcccaaagaagaaaagcgttttctttttttgagacggagttttgcttgtcgccca

SEQ ID NO: 157550 - DNA, 566 bp, Homo sapiens
tttttttttttaatgttggtttcttcccccagatgaccaatggtgttagattgtttgctcatatttaagaataagcccctgaaaagaactaactgaaagatctgtgtgggaaaacagggcttaacgactggtagaattcacttaaggtactctcagcagaaagcctatcagtatctgaagatgctgttatcttcagtcttccacaggagaaggataggacaggcttgactgtgcagttctggaaggagagcagaggaagagagctaacacttctatagttcaggcgtaggtttcccttgatctccttgttttttttttttttgttttttttttgtttttttttttttgagacggagtctcgctctgtcgcccaggctggagtgcagtggcgggatctcggctcactgcaagctccgcctcccgggttcacgccattcgctctgtcacccaggctggagtgcagtggtgcgatcttggctcactgcaagctccttctcccaggttcaagccattctcctgccctcagccaaccgagtagctgggactacaggcacccgccaccacgc

SEQ ID NO: 157551 - DNA, 523 bp, Homo sapiens
  misc_feature (1)...(523): n = a,t,c or g
ttttagttaagaaacagaacaccttttgtttaagcaactaaattaacacgtgatggttcttggcaagatcccatccatgacagcattcccgtccaccaatcttttccgaaagtctggagcttactggacgtagtgtaatggcaactcctcccactaaaaggccccgtcaggctgggcacagcggctcatgcttctaatcccaacactttgggaggccaagacaggaggatgcttgaccccaggagttcaagaccagtcctggcaatgtagcaagaccccaactctataatttttttttttttttttttgagacggagtctcgctctgtctcccaggctggagtgcagtggtgcgatcttggctcactgcaagctccacctcccgggctcacaccattctcctgcctcagcctcctgagtagccgggactacaggcgcccaccaccacgcccggctactttnttgtatttttagtagagacagggtttcactgtgttagccaggatggtctcgatctcctgacc

SEQ ID NO: 157552 - DNA, 14624 bp, Homo sapiens
  misc_feature (1)...(14624): n = a,t,c or g
tgggggctcaaggttctgctgctacctgtggtgagctttgctctgtaccctgaggagatactggacacccactgggagctatggaagaagacccacaggaagcaatataacaacaaggtgcctggggtcctggagggggcatggcaggaaggctgagacctgagctctctcatcttagcttccagactcccttcttcaatccaaatgctttattccaagcaaatcagtccctcttccctaactcatgttaacatacggttttcattcctatgcttcaatcatcctcttgtcaaacttgtattccttccctttggttttataagtgtgtaacattcctcttttgggaagagtcccaagattaatgctgttaatccataagcaatttttctgtctctccagagcttgtgtggttgtttacatattatctctcttcttgcaggctcttaattccatggttagttccccaactaaactgtaaacttttatgattgtgagtttcctttattctcctaaaacccttcacaatattacatatgaactgtagacagtctatacaagtactgactatgctttgtttaggtggatgaaatctctcggcgtttaatttgggaaaaaaacctgaagtatatttccatccataaccttgaggcttctcttggtgtccatacatatgaactggctatgaaccacctgggggacatggcaagtatagcttcagctcctgtcccacctgcaccatttgctttagttccctgctgatgcctggcctctttcttctttgtcttagaccagtgaagaggtggttcagaagatgactggactcaaagtacccctgtctcattcccgcagtaatgacaccctttatatcccagaatgggaaggtagagccccagactctgtcgactatcgaaagaaaggatatgttactcctgtcaaaaatcaggtactctcctttcttctgggtgtgcatatgtaatctggcatgaccttttcctttttctgctgctttgttcttgaggtgaaagggcaccaggaaaagagggcaaggaattaaggtacatctccccattcccattctgttatttaacctcatttgtttctgtacatttgggttgtttctggtttttctttttcttttcccttttttttttttttttttttttgagatagagtctcactctgtcgcccaggatggagtgcagtggtgcaatcttggctcactgcaacctacacctcccgggttcaagcgattctcctgcctcagcctcctgagtagctgagattacaggcacgcgccactacgcctggctaatttttctatttttatagagatgcgttttcaccatgttggccaggctggtcttgaactgacctcaggtgatccacctgcctcagcctcccaaagtgctgggattagagtcatgagccatcgcggcctggtttttctttattacaaatagtgttgcaataagcacccttgtgcatatgtttttgtgcacatgtacaaatatttatgcaaaataagtcctaaaattggaattgttaggtcacaaataatcctttccccccccccaaattttttttttttttttgagacagcgtctctgtcacccaggctggagtccagtggcgcaatcatggctcactgcagcctcaacgtctcaggctcaagtgattctccaacctcagcctccctagtagctgggaattagaagcacatgccaccacacccagctaattttaaaaaattttttgttagagacagggttttgccatgctacccaagctggtctcaaattcctgggctcaagcaatctgcccgcttcggcctcccaaagtgctaggattacagacatgagccaccatgcccagcccaaaaaagtttttgcaatcttacattcttactagcatgagaatgtcagttttttcacaacccaaacaacacaggattgtatcagcaagataaacaattgatttaacgttcatttaacaaacactttttgacccccagaacctaccagatgcagtgttaggcagcagagactcaagatgactaagacacaacctgtgtcctcaggaaatctcaatctaaaaaaatagaacaggaaagaaagaaaaatctacaatctagctgcacaaacaataatagctaatactttttgagattttattgtttgtcaggaacttcttaactctttacatgagtttaaatatttaatcccttataacaatattttatgcatagagaaactgagacacaggcaaatttagtaacttacccggggtcacatagctactgggtggcaaagtcagggttagctcccaggacaaatgcctccacagctggtactgtgctctgctttactgtagctaatagtaaaaatggtagcaaaaatcaatagcagtagaacagtgcaacagatattaagcggaagaggaagactcacaacaatgacaacatttgtgctgaaatttttaagaacacatggaatttccttcagccgggtagagagaagatatagaaatgtaaacaccaaagattcatagtttctctgtatccctttcagggtcagtgtggttcctgttgggcttttagctctgtgggtgccctggagggccaactcaagaagaaaactggcaaactcttaaatctgagtccccagaacctagtggattgtgtgtctgagaatgatggctgtggaggggctacatgaccaatgccttccaatatgtgcagaagaaccggggtattgactctgaagatgcctacccatatgtgggacaggtgagattgctccacacaattatacagctctgttggctcctcctccccagcatgatgttttgtactggaaacaattccagaaatactgttttctgttatcctatcctgctttcttgatggaataatttcccacagaaggccaagaagatttccacaatctgggggaatttagggagcttaagctactatagctcctatttgcatctctgccatggagagaaaacagaggctaggctacctaccccatagacttccgagctgggttctataaccctctgctcaattcctcactcccacaacaaacccacaaacccaccatgctattttcacaaattgtgtggctttattttatatgatctcagtgtgagttttcagaacatttcagcaaattatgtaagtttacatgctaacatctataaaatgagagaaaaaacaagttgcttcatataagagataagggattaactcagttcctcctgcatgatcctctagtcataggaaggaaatcatatctgaaagggaggcaacctgaggggttttttatacacatagggctgggtctgatagacaatataatgtagggccttcacaacagaaacctctgaaacagggacagcaagtttgagaataaaaatgatggctactgtgttctaagccgtgtccttagtgcattttttctttttctttttttcatttaatctcataacaactctgttaggtagacttatcttgaatgtataggtgaggaaatggacacttaaggagataagacagtataattcataccactagtatgtaacaatgtaagatgtatctaccagggatgtttatcttctgcaaacattcctaggtatatctcccatgcacatgtgcaagaatttcttactaggatataatgccttggaactgaattgtctgggtcttagggtatgtctgtcttcactttactacacaatgtcaaattgtttgccaaaatatttggaaaaatttatacctgcaatgtgtaagaaatccccttcaatcacctttttatcagtatgtttatctggccatttgcatttcttcttcagtgaattaactgtttttatctcttgctcatttgtttttctttttatttttttgaaatagggtcttactctgttgcccaagctggagtgtggtgaacagtcatagctcactgcagcctccacttccgggctcaagcaatcctctcgcctcagcctcccaaatagctaggatataggtgcatgccatcatgcccaccaatttcaaaaaacctttgaaatttttttttgtagaggctaggcatggtggctcatgcctgtaatcccagcactttgggaagctgaggtgggaggatcgcttgagcccagcactttgggaagctgaggtgggaggatcgcttgagcccaggaattggaggtcggcctgatacaacatagcaagacctcatctctacagaaaaaatttttaaaagtagccaggtatgatggcgtgcatagttctagctactccggaagctggttgggaggacaacttgagcctgggagttcaaggctgctgtgaactgtgatcatgtcactgctctctaacctgggtgacagagtgagaccctgtccccaaaaaacaacaaccgtttttttttggtagagacattgtctcgctatgttgccaaggctagtctcaaactcctgggctcaagcaatcctcccacctccccaaagtgctgggatttatagatgtaagccaccatgcctggcctaccctttttttttttttttgaaatggagttttgcttttgtcacctaggcttgagtgcagtggcgcgatcttggctcactgcaacctccacctcctggattcaagcaattctcctgcctcagcctcctgagtagctgggattataggcacccgcaaccacgcccggctagtttttgtatttttagtacagacagggtttcaccatgttggccaggctggtcttgaacccctgacctcaggtggtccgcccgcctcggcctcccaaagtgctgggattacaggtgtgagccaccatgccccaccccttactcatttttaattggattgttttttctctttcttagcgattcttaaaagtttaaagagaatatttggatacaatactatgtatttaaaagttgaggtctgtctttccattctttttatgatgtctttcaatctacaaaagttaattttaatagcctggcgccggtggatctcgcttattatcccctcactttgggaagctgagatgggtggatcacaatgtcacgagatcttgaccatccttcctggcgcggtggctgctaatggaagcggaacacgtataaagccagtccgcacaaacggtgctgaccccggatgaatgtctgctactgggctatctggacaagggaaaactcaagcgcaaagataaagcaggtagcttgcagtgggcttacatggcgatagctagactgggcggttttatggacagcatgccaaccggaattgccatctggggcgccctctggtaaggttgggaaaccctgcaaagtaaactggatggctttcttgccgccaaggatctgatggcgcaggggatcaagatctgatcaagagacaggatgaggatcgtttcgcatgattgaacaagatggattgcacgcaggttctccggccgcttgggtggagaggctattcggctatgactgggcacaacagacaatcggctgctctgatgccgccgtgttccggctgtcagcgcaggggcgcccggttctttttgtcaagaccgacctgtccggtgccctgaatgaactgcaggacgaggcagcgcggctatcgtggctggccacgacgggcgttccttgcgcagctgtgctcgacgttgtcactgaagcgggaagggactggctgctattgggcgaagtgccggggcaggatctcctgtcatcccaccttgctcctgccgagaaagtatccatcatggctgatgcnactgcgtttcaaaaaaaaaaaaagttaattttaatatagtaaaattagtaaaaggattaattttccctttgcaatttttgtaatgtgttttattcgtttatgaatggagaaaggtaagaaaaaataaaatttaaaaaagaagagatgtggccaggtacggtggctcacacctataatcccagtagtttgggaggctgaggcaggcagatcacttgaggtcaggagtttgagaccagctgggataacatggtgaaaccccatctctactaaaaatacaaaaattagccaggtgtgattgcgcacgcttgtaatcccagcaggctgaggcaggagaattgctcgaactcaggaggcagaggttgcagtgagccaagatcatgccattgcactccagcctgggtaacagagactctgtttcaaaaaataaaaagataaaaagggaagagatctgatagggcgcccagaaaaacattttaaaggggatggtattataagtttgttcccagcataatgccaggttatttctgactttaaagtatcatcacataatatctttttgagtcaatttccaagatattctgtttcacttgtaattctgtgtaatttttggcaccaggaggcatcagggatttggagcacatggcagaaacaaaggcatcttgaaaaatatcaaggcagtagaccactgtaatcttaaaatggcatatcaaatgctgctattgctgttaatatttagataatgttagataatgtatttttttagagggtatctcactatcttgcacaggctggagtagagtggctattcacagcatgatcacagtacactaaaggctcaaactcctgggcacaaacaatcctcctgcctcagcctgctgagtagtagataataagttcttgtggatgcaaccttagggttctgaaggggtagtctgtaggaaaatgaattgctgaaaagaatacaccaccttaacatgggctattattcgattccataattgtggcttgccaatgaaacattgctaactacctgtaaaatatagtgttggaagtcataggctaaattgctaagttctttaatctattttagtgtcttgttatgtacttttatattttgtctttgatgagagcacaaggatcacaccagttcccctgatataggtgcagagggcccaggtcttccctctagctaagccttggccttggcctcctacccacacagcagctggtgccttcctgccccctgaggctaatacatactatgtggccagaagatggtttatgctttttaaaaaaatcttatttcagaaatctttccctactgttttcctcccacatttatgtcttaaaacacctgtaggggattttttttttttttttttttttgagatggagtctcgctctcgcccaggctggagtgcaatggcgcgatcttggctcactgcaaggtctgcctcccaggttcacgccattctcctgcctcagcctccccagtagctgggactacaggcgcccgctaccacgcctggctaatttttttgcattttattaattttccctttgcaatttttgtaatgtgttttattcgtttatgaatggagaaaggtaagaaaaaataaaatttaaaaaagaagagatgtggccaggtacggtggctcacacctataatcccagtagtttgggaggctgaggcaggcagatcacttgaggtcaggagtttgagaccagctgggataacatggtgaaaccccatctctactaaaaatacaaaaattagccaggtgtgattgcgcacgcttgtaatcccagcaggctgaggcaggagaattgctcgaactcaggaggcagaggttgcagtgagccaagatcatgccattgcactccagcctgggtaacagagactctgtttcaaaaaataaaaagataaaaagggaagagatctgatagggcgcccagaaaaacattttaaaggggatggtattataagtttgttcccagcataatgccaggttatttctgactttaaagtatcatcacataatatctttttgagtcaatttccaagatattctgtttcacttgtaattctgtgtaatttttggcaccaggaggcatcagggatttggagcacatggcagaaacaaaggcatcttgaaaaatatcaaggcagtagaccactgtaatcttaaaatggcatatcaaatgctgctattgctgttaatatttagataatgttagataatgtatttttttagagggtatctcactatcttgcacaggctggagtagagtggctattcacagcatgatcacagtacactaaaggctcaaactcctgggcacaaacaatcctcctgcctcagcctgctgagtagtagataataagttcttgtggatgcaaccttagggttctgaaggggtagtctgtaggaaaatgaattgctgaaaagaatacaccaccttaacatgggctattattcgattccataattgtggcttgccaatgaaacattgctaactacctgtaaaatatagtgttggaagtcataggctaaattgctaagttctttaatctattttagtgtcttgttatgtacttttatattttgtctttgatgagagcacaaggatcacaccagttcccctgatataggtgcagagggcccaggtcttccctctagctaagccttggccttggcctcctacccacacagcagctggtgccttcctgccccctgaggctaatacatactatgtggccagaagatggtttatgctttttaaaaaaatcttatttcagaaatctttccctactgttttcctcccacatttatgtcttaaaacacctgtaggggattttttttttttttttttttttgagatggagtctcgctctcgcccaggctggagtgcaatggcgcgatcttggctcactgcaaggtctgcctcccaggttcacgccattctcctgcctcagcctccccagtagctgggactacaggcgcccgctaccacgcctggctaatttttttgcatttttagtagagacagggtttcactgtgttagccaggatggtatagatctctgacctcgtgatccacctttcttcagccttccaaagtgctgggattaacaggcatggagccccaccgcactggcctgtagttggtttttatgtgtggtggaaggcgggaatcctcttttcatattcgtttttgtgaggaagaacagaccctctttagaagccctagactgctgcctctgttagttcactggcatcactcaaaatattggttgagtttcttactcactgactcattgcctattgctttgtcctagtcctattacaatcttgtttcttccagccaggaagagagttgtatgtacaacccaacaggcaaggcagctaaatgcagagggtacagagagatccccgaggggaatgagaaagccctgaagagggcagtggcccgagtgggacctgtctctgtggccattgatgcaagcctgacctccttccagttttacagcaaaggtaagaagctgctgatcctatacagcactgtcttttatgatacaaacttgatggtttctcgaaggaccttgggtattttcagtacttagtttttgtattcacatggaggtggccagagagaaattaacaactgctgcagtatggagcagcatctctgtggtaaaccctcctgacacggatggaattcttcaaacagtctcctagactgggagatcccacagggtgacccttggattgcatagagcctcacgctggtagtttgtattctaggtgtgtattatgatgaaagctgcaatagcgataatctgaaccatgcggttttggcagtgggatatggaatccagaagggaaacaagcactggataattaaaaacaggtaatgatgggaacactacttttgttattcagtcacccttttaacactcaacctcacctccagcttcccgatattcctttctctgtcccaaatcaagaaaaaattatctcagagttctcacttctatcttctcagtcagaggctcttaattctcagtctgacacttaatggccagtgtgttagtccattttgcattgccacaaaagaatacccgagactgggtagtttataaagaaacgaggtttgtttggctatacaaagcgtggcactagtatctgctcagcctctgatgaggcctcagagcttttactcatggcagaaggcaaaagagggagcaggcatgtcacatagtgagagagggagcaagagagagagggaggtgccgactctttaaagaaccagctcttgcatgaactaatagagtgagaactcactcatcaccaaggcgatggcaccaagccattccatgaggaatccactctcataacccaaacacctcccactatgccccacctcccacattggggatcacatttcagcatgagactgggaggggacacacatccaaaccatatccgccagacaatagtgctcaattatgtgctgggcagatgctccctgtgtgcaaggtgcttagtgacatacataaaccaacgagcagatgacaccttcagtgagctcagagcccaataagacagacctaactaaccatgagataaagcagtacaaagaaccagcaggagctttggaattacgtatttttactttcttttgtctctaatgtgatcagtttcttagatggtttccattagcaatctgtctttaacagtaggggagcagcgttaaaggtttaatattccttttgaacagtttttttccttcaaaatacacttaagatacacgtatataagaacttgccaaagattgtgaagagaaacattttttagaaataagatataaacaaaaaaagttagtgttactttcctatgttggggaacaaagaaaactccagggtaccttgcttcccatttctctttagcaccttgtgacttttggggaggggcagattgataacaattatagttttcctttcctggctgatcaccattaacctggcagcagcactggctaaatctcctgtccttagtgccctccaaggagcaggagccctagactctgggtcgctgacagactcacgcagtggtgttgttcaaacctgaagcaactttttatatcacagttccaactcaaggtgaacctgagcatcttcccaagtctcccacagcttctgtcctgtgttgtcccttctcttgactcccaggtccaagcacttaccctgttctttcatgatcaggtaccatgtgtggagatagcttccaagagagctgggaggaagaaaggacacacccgggcaggatcaggaacactgggggcccctggagaaggggagagtgggggagggtacaggttttaaataaaatgtgttggtaattagagaattgctggttggggaaagaggtctgaaaacaattcaggaagataaacaagacaatctctcctctctcctctttctcacgtcgtctctcttgtcttctagtctcgctactcatttccttagtaatctcatccactctcatagtttcatccatctctcctatggggtttacccccaaatcaagattagtagagacagggtttcactgtgttagccaggatggtatagatctctgacctcgtgatccacctttcttcagccttccaaagtgctgggattaacaggcatggagccccaccgcactggcctgtagttggtttttatgtgtggtggaaggcgggaatcctcttttcatattcgtttttgtgaggaagaacagaccctctttagaagccctagactgctgcctctgttagttcactggcatcactcaaaatattggttgagtttcttactcactgactcattgcctattgctttgtcctagtcctattacaatcttgtttcttccagccaggaagagagttgtatgtacaacccaacaggcaaggcagctaaatgcagagggtacagagagatccccgaggggaatgagaaagccctgaagagggcagtggcccgagtgggacctgtctctgtggccattgatgcaagcctgacctccttccagttttacagcaaaggtaagaagctgctgatcctatacagcactgtcttttatgatacaaacttgatggtttctcgaaggaccttgggtattttcagtacttagtttttgtattcacatggaggtggccagagagaaattaacaactgctgcagtatggagcagcatctctgtggtaaaccctcctgacacggatggaattcttcaaacagtctcctagactgggagatcccacagggtgacccttggattgcatagagcctcacgctggtagtttgtattctaggtgtgtattatgatgaaagctgcaatagcgataatctgaaccatgcggttttggcagtgggatatggaatccagaagggaaacaagcactggataattaaaaacaggtaatgatgggaacactacttttgttattcagtcacccttttaacactcaacctcacctccagcttcccgatattcctttctctgtcccaaatcaagaaaaaattatctcagagttctcacttctatcttctcagtcagaggctcttaattctcagtctgacacttaatggccagtgtgttagtccattttgcattgccacaaaagaatacccgagactgggtagtttataaagaaacgaggtttgtttggctatacaaagcgtggcactagtatctgctcagcctctgatgaggcctcagagcttttactcatggcagaaggcaaaagagggagcaggcatgtcacatagtgagagagggagcaagagagagagggaggtgccgactctttaaagaaccagctcttgcatgaactaatagagtgagaactcactcatcaccaaggcgatggcaccaagccattccatgaggaatccactctcataacccaaacacctcccactatgccccacctcccacattggggatcacatttcagcatgagactgggaggggacacacatccaaaccatatccgccagacaatagtgctcaattatgtgctgggcagatgctccctgtgtgcaaggtgcttagtgacatacataaaccaacgagcagatgacaccttcagtgagctcagagcccaataagacagacctaactaaccatgagataaagcagtacaaagaaccagcaggagctttggaattacgtatttttactttcttttgtctctaatgtgatcagtttcttagatggtttccattagcaatctgtctttaacagtaggggagcagcgttaaaggtttaatattccttttgaacagtttttttccttcaaaatacacttaagatacacgtatataagaacttgccaaagattgtgaagagaaacattttttagaaataagatataaacaaaaaaagttagtgttactttcctatgttggggaacaaagaaaactccagggtaccttgcttcccatttctctttagcaccttgtgacttttggggaggggcagattgataacaattatagttttcctttcctggctgatcaccattaacctggcagcagcactggctaaatctcctgtccttagtgccctccaaggagcaggagccctagactctgggtcgctgacagactcacgcagtggtgttgttcaaacctgaagcaactttttatatcacagttccaactcaaggtgaacctgagcatcttcccaagtctcccacagcttctgtcctgtgttgtcccttctcttgactcccaggtccaagcacttaccctgttctttcatgatcaggtaccatgtgtggagatagcttccaagagagctgggaggaagaaaggacacacccgggcaggatcaggaacactgggggcccctggagaaggggagagtgggggagggtacaggttttaaataaaatgtgttggtaattagagaattgctggttggggaaagaggtctgaaaacaattcaggaagataaacaagacaatctctcctctctcctctttctcacgtcgtctctcttgtcttctagtctcgctactcatttccttagtaatctcatccactctcatagtttcatccatctctcctatggggtttacccccaaatcaagatcaccagcttcagcctccttcttatgctctaaactcacattttcaagattaatattccccaaatacagctctgatcatatcactctcccactcaaaatccctcactggctcctcacgatgatgggtcacagagtaaaggtgaagctttttaaccttgcagtaaaggtaattcaacctgatctcaatctgcctttccagacatctctcccactacaccctgttaggcacactgcttttcagctacatgatcctaacagtgccccacactttcctgcctctgttgttcatttcacacccttccactggcatccccttcccacaggtcgaaattctacttagccttttggctcagctcaaatgccacctcttacatcaagcctctaagattctcttgatcagaaggaatctttccctcctttgatacctacagtattatgccttctccctatttcttgactttaaactctttaaagttaaaaaacatcatattcatttttgtgtaccatcagtacctcgcacaatactcagtaaatattttaatgaataaataaactgagagtactaagtatttttcttgattggtcttacagctggggagaaaactggggaaacaaaggatatatcctcatggctcgaaataagaacaacgcctgtggcattgccaacctggccagcttccccaagatgtgactc

SEQ ID NO: 157553 - DNA, 9620 bp, Homo sapiens
atgggtgccccgacgttgccccctgcctggcagccctttctcaaggaccaccgcatctctacattcaagaactggcccttcttggagggctgcgcctgcaccccggagcgggtgagactgcccggcctcctggggtcccccacgcccgccttgccctgtccctagcgaggccactgtgactgggcctcgggggtacaagccgccctcccctccccgtcctgtccccagcgaggccactgtggctgggccccttgggtccaggccggcctcccctccctgctttgtccccatcgaggcctttgtggctgggcctcggggttccgggctgccacgtccactcacgagctgtgctgtcccttgcagatggccgaggctggcttcatccactgccccactgagaacgagccagacttggcccagtgtttcttctgcttcaaggagctggaaggctgggagccagatgacgaccccatgtaagtcttctctggccagcctcgatgggctttgttttgaactgagttgtcaaaagatttgagttgcaaagacacttagtatgggagggttgctttccaccctcattgcttcttaaacagctgttgtgaacggatacctctctatatgctggtgccttggtgatgcttacaacctaattaaatctcatttgaccaaaatgccttggggtggacgtaagatgcctgatgcctttcatgttcaacagaatacatcagcagaccctgttgttgtgaactcccaggaatgtccaagtgctttttttgagattttttaaaaaacagtttaattgaaatataacctacacagcacaaaaattaccctttgaaagtgtgcacttcacactttcggaggctgaggcgggcggatcacctgaggtcaggagttcaagacctgcctggccaacttggcgaaaccccgtctctactaaaaatacaaaaattagccgggcatggtagcgcacgcccgtaatcccagctactcgggaggctaaggcaggagaatcgcttgaacctgggaggcggaggttgcagtgagccgagattgtgccaatgcactccagcctcggcgacagagcgagactccgtcataaaaataaaaaattgaaaaaaaaaaaagaaagaaagcatatacttcagtgttgttctggatttttttcttcaagatgcctagttaatgacaatgaaattctgtactcggatggtatctgtctttccacactgtaatgccatattcttttctcacctttttttctgtcggattcagttgcttccacagctttaatttttttcccctggagaatcaccccagttgtttttctttttggccatgttttcattgtaatgcagttctggtaacggtgatagtcagttatacagggagactcccctagcagaaaatgagagtgtgagctagggggtcccttggggaacccggggcaataatgcccttctctgcccttaatccttacagtgggccgggcacggtggcttacgcctgtaataccagcactttgggaggccgaggcgggcggatcacgaggtcaggagatcgagaccatcttggctaatacggtgaaaccccgtctccactaaaaatacaaaaaattagccgggcgtggtggtgggcgcctgtagtcccagctactcgggaggctgaggcaggagaatggcgtgaacccaggaggcggagcttgcagtgagccgagattgcaccactgcactccagcctgggcgacagaatgagactccgtctcaaaaaaaaaaaaaaaagaaaaaaatctttacagtggattacataacaattccagtgaaatgaaattacttcaaacagttccttgagaatgttggagggatttgacatgtaattcctttggacatataccatgtaacacttttccaactaattgctaaggaagtccagataaaatagatacattagccacacagatgtggggggagatgtccacagggagagagaaggtgctaagaggtgccatatgggaatgtggcttgggcaaagcactgatgccatcaacttcagacttgacgtcttactcctgaggcagagcagggtgtgcctgtggagggcgtggggaggtggcccgtggggagtggactgccgctttaatcccttcagctgcctttccgctgttgttttgatttttctagagaggaacataaaaagcattcgtccggttgcgctttcctttctgtcaagaagcagtttgaagaattaacccttggtgaatttttgaaactggacagagaaagagccaagaacaaaattgtatgtattgggaataagaactgctcaaaccctgttcaatgtctttagcactaaactacctagtccctcaaagggactctgtgttttcctcaggaagcattttttttttttttctgagatagagtttcactcttgttgcccaggctggagtgcaatggtgcaatcttggctcactgcaacctctgcctctcgggttcaagtgattctcctgcctcagcctcccaagtaactgggattacagggaagtgccaccacacccagctaatttttgtatttttagtagagatggggtttcaccacattgcccaggctggtcttgaactcctgacctcgtgattcgcccaccttggcctcccaaagtgctgggattacaggcgtgaaccaccacgcctggcttttttttttttgttctgagacacagtttcactctgttacccaggctggagtagggtggcctgatctcggatcactgcaacctccgcctcctgggctcaagtgatttgcctgcttcagcctcccaagtagccgagattacaggcatgtgccaccacacccaggtaatttttgtatttttggtagagacgaggtttcaccatgttggccaggctggttttgaactcctgacctcaggtgatccacccgcctcagcctcccaaagtgctgagattataggtgtgagccaccacacctggcctcaggaagtatttttatttttaaatttatttatttatttgagatggagtcttgctctgtcgcccaggctagagtgcagcgacgggatctcggctcactgcaagctccgccccccaggttcaagccattctcctgcctcagcctcccgagtagctgggactacaggcgcccgccaccacacccggctaatttttttgtatttttagtagagacgggttttcaccgtgttagccaggagggtcttgatctcctgacctcgtgatctgcctgcctcggcctcccaaagtgctgggattacaggtgtgagccaccacacccggctatttttatttttttgagacagggactcactctgtcacctgggctgcagtgcagtggtacaccatagctcactgcagcctcgaactcctgagctcaagtgatcctcccacctcatcctcacaagtaattgggactacaggtgcaccccaccatgcccacctaatttatttatttatttatttatttattttcatagagatgagggttccctgtgttgtccaggctggtcttgaactcctgagctcacgggatccttttgcctgggcctcccaaagtgctgagattacaggcatgagccaccgtgcccagctaggaatcatttttaaagcccctaggatgtctgtgtgattttaaagctcctggagtgtggccggtataagtatataccggtataagtaaatcccacattttgtgtcagtatttactagaaacttagtcatttatctgaagttgaaatgtaactgggctttatttatttatttatttatttatttatttttaatttttttttttgagacgagtctcactttgtcacccaggctggagtgcagtggcacgatctcggctcactgcaacctctgcctcccggggtcaagcgattctcctgccttagcctcccgagtagctgggactacaggcacgcaccaccatgcctggctaatttttgtatttttagtagacggggtttcaccatgctggccaagctggtctcaaactcctgaccttgtgatctgcccgctttagcctcccagagtgctgggattacaggcatgagccaccatgcgtggtctttttaaaattttttgattttttttttttttgagacagagccttgctctgtcgcccaggctggagtgcagtggcacgatctcagctcactacaagctccgcctcccgggttcacgccattcttctgcctcagcctcctgagtagctgggactacaggtgcccaccaccacgcctggctaattttttttggtatttttattagagacaaggtttcatcatgttggccaggctggtctcaaactcctgacctcaagtgatctgcctgcctcggcctcccaaagcgctgagattacaggtgtgatctactgcgccaggcctgggcgtcatatattcttatttgctaagtctggcagccccacacagaataagtactgggggattccatatccttgtagcaaagccctgggtggagagtcaggagatgttgtagttctgtctctgccacttgcagactttgagtttaagccagtcgtgctcatgctttccttgctaaatagaggttagaccccctatcccatggtttctcaggttgcttttcagcttgaaaattgtattcctttgtagagatcagcgtaaaataattctgtccttatatgtggctttattttaatttgagacagagtgtcactcagtcgcccaggctggagtgtggtggtgcgatcttggctcactgcgacctccacctcccaggttcaagcgattctcgtgcctcaggctcccaagtagctgagattataggtgtgtgccaccaggcccagctaacttttgtatttttagtagagacagggttttgccatgttggctaagctggtctcgaactcctggcctcaagtgatctgcccgccttggcatcccaaagtgctgggattacaggtgtgaaccaccacacctggcctcaatatagtggcttttaagtgctaaggactgagattgtgttttgtcaggaagaggccagttgtgggtgaagcatgctgtgagagagcttgtcacctggttgaggttgtgggagctgcagcgtgggaactggaaagtgggctggggatcatctttttccaggtcaggggtcagccagcttttctgcagcgtgccatagaccatctcttagccctcgtgggtcagagtctctgttgcatattgtcttttgttgtttttcacaaccttttagaaacataaaaagcattcttagcccgtgggctggacaaaaaaaggccatgacgggctgtatggatttggcccagcaggcccttgcttgccaagccctgttttagacaaggagcagcttgtgtgcctggaaccatcatgggcacaggggaggagcagagtggatgtggaggtgtgagctggaaaccaggtcccagagcgctgagaaagacagagggtttttgcccttgcaagtagagcaactgaaatctgacaccatccagttccagaaagccctgaagtgctggtggacgctgcggggtgctccgctctagggttacagggatgaagatgcagtctggtagggggagtccactcacctgttggaagatgtgattaagaaaagtagactttcagggccgggcatggtggctcacgcctgtaatcccagcactttgggaggccgaggcgggtggatcacgaggtcaggagatcgagaccatcctggctaacatggtgaaaccccgtctttactaaaaatacaaaaaattagctgggcgtggtggcgggcgcctgtagtcccagctactcgggaggctgaggcaggagaatggcgtgaacctgggaggtggagcttgctgtgagccgagatcgcgccactgcactccagcctgggcgacagagcgagactccgtctcaaaaaaaaaaaaaaaagtaggctttcatgatgtgtgagctgaaggcgcagtaggcagaagtagaggcctcagtccctgcaggagacccctcggtctctatctcctgatagtcagacccagccacactggaaagaggggagacattacagcctgcgagaaaagtagggagatttaaaaactgcttggcttttattttgaactgttttttttgtttgtttgttttccccaattcagaatacagaatacttttatggatttgtttttattactttaattttgaaacaatataatcttttttttgttgtttttttgagacagggtcttactctgtcacccaggctgagtgcagtggtgtgatcttggctcacctcagcctcgaccccctgggctcaaatgattctcccacctcagcttcccaagtagctgggaccacatagtagagacagggtttcactgtgttagccaggatggtatagatctctgacctcgtgatccacctttcttcagccttccaaagtgctgggattaacaggcatggagccccaccgcactggcctgtagttggtttttatgtgtggtggaaggcgggaatcctcttttcatattcgtttttgtgaggaagaacagaccctctttagaagccctagactgctgcctctgttagttcactggcatcactcaaaatattggttgagtttcttactcactgactcattgcctattgctttgtcctagtcctattacaatcttgtttcttccagccaggaagagagttgtatgtacaacccaacaggcaaggcagctaaatgcagagggtacagagagatccccgaggggaatgagaaagccctgaagagggcagtggcccgagtgggacctgtctctgtggccattgatgcaagcctgacctccttccagttttacagcaaaggtaagaagctgctgatcctatacagcactgtcttttatgatacaaacttgatggtttctcgaaggaccttgggtattttcagtacttagtttttgtattcacatggaggtggccagagagaaattaacaactgctgcagtatggagcagcatctctgtggtaaaccctcctgacacggatggaattcttcaaacagtctcctagactgggagatcccacagggtgacccttggattgcatagagcctcacgctggtagtttgtattctaggtgtgtattatgatgaaagctgcaatagcgataatctgaaccatgcggttttggcagtgggatatggaatccagaagggaaacaagcactggataattaaaaacaggtaatgatgggaacactacttttgttattcagtcacccttttaacactcaacctcacctccagcttcccgatattcctttctctgtcccaaatcaagaaaaaattatctcagagttctcacttctatcttctcagtcagaggctcttaattctcagtctgacacttaatggccagtgtgttagtccattttgcattgccacaaaagaatacccgagactgggtagtttataaagaaacgaggtttgtttggctatacaaagcgtggcactagtatctgctcagcctctgatgaggcctcagagcttttactcatggcagaaggcaaaagagggagcaggcatgtcacatagtgagagagggagcaagagagagagggaggtgccgactctttaaagaaccagctcttgcatgaactaatagagtgagaactcactcatcaccaaggcgatggcaccaagccattccatgaggaatccactctcataacccaaacacctcccactatgccccacctcccacattggggatcacatttcagcatgagactgggaggggacacacatccaaaccatatccgccagacaatagtgctcaattatgtgctgggcagatgctccctgtgtgcaaggtgcttagtgacatacataaaccaacgagcagatgacaccttcagtgagctcagagcccaataagacagacctaactaaccatgagataaagcagtacaaagaaccagcaggagctttggaattacgtatttttactttcttttgtctctaatgtgatcagtttcttagatggtttccattagcaatctgtctttaacagtaggggagcagcgttaaaggtttaatattccttttgaacagtttttttccttcaaaatacacttaagatacacgtatataagaacttgccaaagattgtgaagagaaacattttttagaaataagatataaacaaaaaaagttagtgttactttcctatgttggggaacaaagaaaactccagggtaccttgcttcccatttctctttagcaccttgtgacttttggggaggggcagattgataacaattatagttttcctttcctggctgatcaccattaacctggcagcagcactggctaaatctcctgtccttagtgccctccaaggagcaggagccctagactctgggtcgctgacagactcacgcagtggtgttgttcaaacctgaagcaactttttatatcacagttccaactcaaggtgaacctgagcatcttcccaagtctcccacagcttctgtcctgtgttgtcccttctcttgactcccaggtccaagcacttaccctgttctttcatgatcaggtaccatgtgtggagatagcttccaagagagctgggaggaagaaaggacacacccgggcaggatcaggaacactgggggcccctggagaaggggagagtgggggagggtacaggttttaaataaaatgtgttggtaattagagaattgctggttggggaaagaggtctgaaaacaattcaggaagataaacaagacaatctctcctctctcctctttctcacgtcgtctctcttgtcttctagtctcgctactcatttccttagtaatctcatccactctcatagtttcatccatctctcctatggggtttacccccaaatcaagatcaccagcttcagcctccttcttatgctctaaactcacattttcaagattaatattccccaaatacagctctgatcatatcactctcccactcaaaatccctcactggctcctcacgatgatgggtcacagagtaaaggtgaagctttttaaccttgcagtaaaggtaattcaacctgatctcaatctgcctttccagacatctctcccactacaccctgttaggcacactgcttttcagctacatgatcctaacagtgccccacactttcctgcctctgttgttcatttcacacccttccactggcatccccttcccacaggtcgaaattctacttagccttttggctcagctcaaatgccacctcttacatcaagcctctaagattctcttgatcagaaggaatctttccctcctttgatacctacagtattatgccttctccctatttcttgactttaaactctttaaagttaaaaaacatcatattcatttttgtgtaccatcagtacctcgcacaatactcagtaaatattttaatgaataaataaactgagagtactaagtatttttcttgattggtcttacagctggggagaaaactggggaaacaaaggatatatcctcatggctcgaaataagaacaacgcctgtggcattgccaacctggccagcttccccaagatgtgactc

SEQ ID NO: 157554 - DNA, 465 bp, Homo sapiens
ttttttttttttttttgagacggagtctcgctctgtcgcccaggctggagtgcagtggcgggctctcggctcactgcaagctccgcctcccgggttcacgccattctcctgcctcagcctcccaagtagctgggactacaggtgcccgccactacgcccggctaattttttgtatttttagtagagacggggtttcaccgttttagccgggatggtctcgatctcctgacctcgtgatccgcccgcctcggcctcccaaagtgctgggattacaggcgtgagccaccgcgcccggccgtacgtgtctatttttataacagaagtgtatttatagagtatgtgcaattttgtaaattgcttttcacgtttaaaataaatgtcaggtctcaaaatatattaggttctccgaatattctcaaaagccttttaaaaaatctaaattaattgtatctacccacgccacct

SEQ ID NO: 157555 - DNA, 567 bp, Homo sapiens
tttgtgagacggagtctcgctctgtcacccaggctggagtgcagtggagcgatcttggctcactgcaagctccgcctcccaggttcacgccattctcccgcctcagcctcccaagtagctgggactacaggcgcccaccaccacgcccggctaattttttgtacttttagtagagacggggtttcaccgtgttagccaggatggtctcgatctcctgacctcgtgatacacccgcctcggcctcccaaagtgctaggattacaggcatgagccacctcgcccagccagcaaactttttctataaagggcggcctcccaaagtgctgggattacaggggtgagccaccgcgcctggcctacatgtgaaatctttaacatcatgcctgacgtagagtaaatcctcagcaaatgttaatcagctaccttgtctgtatcattcaaatcactgcagcaagttgtcagcctacaacttgcttgtcatcttacaaatgtgcagacctggttgctcttaaatcaatactgttatactttaaagtctctgataatttttcaatcagaaagtgtttg

SEQ ID NO: 157556 - DNA, 790 bp, Homo sapiens
tttttttttcttacaaatgaaataccaagtgaatgttttcattgaaaacatgcgattctccattttaaaaagttttcttccttttctgtgggcatagtatgcagaatagactcagcattctacgtggttactttaacagaatggaactttgaaaacattttttttttttttttttttttgagacggagtctcgctctgtcgcccaggctggagtgcagtggcgcgatctcggctcactgcaagctccgcctcctgggttcacgtcattctcctgcctcagcctcccgagtagctgggactacaggcacccgccaccgcgcctggctaattttttgtattttctggtagagacggtgtttcaccgtgttagccaggatggagaactttgaaaactttacagagaaaatagtattgaaaatattttagtccagaaatgccttaaggtatacttttcccattgttcaagatcagagattacagtaactggcaacaacctgctctaatgacgtgaaactgtctaaaaagtcctcttcttcgattccaaattttgtgtactgatgaatgtaggcttttgaagcaaacatattccatgccttcccaacaatcatatcaagtggttttactaagaactggctgttgctgaccaacactgcagacttctcatatttgctaaaggccccgctggttttccacacgttgaaagcattaacaggctcaaccaggaagtatacagagctggatctttaaatgcctcacatttgcactttgccatctttccacgaagaatgac

SEQ ID NO: 157557 - DNA, 540 bp, Homo sapiens
tttttttattttttgagacggagtcttgctctgtcgcccaggctggagtgcagtggcacgatcttggctcactgcaagctccacctcccaggttcatgccattctcctgcctcagcctcccaagtagctaggactacaggtacccgccaccacccccggctaatttttttttgtatttttagtagagatggggtttcaccatgttagccaggatggtctcgatcttctgaccttgggatctggccacctcagcctcccaaaatgctgggattacaggtgtgagccaccacacccatcctcgcccagttattaaataccttccctcttcaagtcctaaccttgcaggctaattcctccctggaagaagaggattccaatgctcctgagcataaaaaattcaggtccttgaatgacgtggacccattctccagctctctggtggtagaggcctgaggcctaatttattcagcacctccatccttcagtcagaacagatgaggacaatacaggcagctgtgcctcaggctgccaggagcaaaa

SEQ ID NO: 157558 - DNA, 551 bp, Homo sapiens
tttttttttttttttttgagacggagtctcgctctgtcgcccaggctggagtgcagtggcgggatctcggctcactgcaagctccgcctcccgggttcacgccattctcctgcctcagcctcccaagtagctgggactacaggcgcccgccactacgcccggctaatttttttgtatttttagtagagacggggtttcaccgttttagccgggatggtctcgatctcctgacctcgtgatccgcccgcctcggcctcccaaagtgctgggattacaggcgtgagccaccgcgcccggcctatttttagttttaaacaaaaaagtttaagaagtaaaaaaaaaacatgttttgttgtcgttttctttgagatcagcttgcaatttaaatttttagttagtaaatttaactaattttaaaatatgttagtgtctgtctgcttaactattgcatacttattaaagaaacatgcgtggttatccattggaagagatcgatcctagggcttcctgatacaaacacacccacagaccccagccactctagatttctg

SEQ ID NO: 157559 - DNA, 741 bp, Homo sapiens
tgagatggagtctcgctctgtcgcccaggctacagtgcagtggcgcgatcttggcccactgcaagctccgcctcccaggaggaaattctaaagcgttatgtttgttagcaaaacagaaggcaaagatctctcctaaagaggaaataaagaagtttcaacatgcttttaaaaacaccatagaaaaaaagtaatacccagaagagcctaggaaaggaacagtgtgtgccctgtgaagtgggaaagggactcacccgttgaaaaagatctgggccaatttgaagagctcatggcccatttcaacactggacggcccgtggcgaacctccaccacgcagagactcctctgtagatgggtggctgacttttgccagtctcttaaggcagcacaggcccgggccaggccatccgcgatctctcccaccacggcgtgctctgcccacaggaagctctaggcgtcacgctggcaccccgacagccgctgaacagctcgctaatgtctgttccaataaagctgctgttttcttctgttttctctgtcagtggagaaaggcgctaggggaggcctccccacatttacactgtattttcaacattaacttcccaactcgaccaactctacctttcacgtacggccatgatttctcttgaccctgaaatctaagctaaaggtcaactttcataaagcagggtaaataaaaatcccatgatgtcaagctctaaggcagggtttgaattccaccg

SEQ ID NO: 157560 - DNA, 23891 bp, Homo sapiens
  misc_feature (1)...(23891): n = a,t,c or g
atattctcaggggtgaattttcctggttcctgccggtcctgggaccagttggtaaagtagcaaaccagtttgtaggcagatccctggagtagaatgaagagagccagtgagatctcacggctgttgccttagagtccagaaagtcacaattttctccccaagtacagccattgcatcatttgctcattctgccagagcctctgagggtcattctgcctgggcctttagtgctggctcttgagtacccagaccccagttaagaaatacgctgaggctgggcacagtggcctcanacctgttatcccngcactttgggaggctgangcnngangacttcttgagcccaggagttcaagaccagctgtggcaacatagcaaaaccccatctctacaaaaaatttaanaattagccaggtgtagtggttcatgcctgtantctcagctactaaggaggctgaagttgggggattgtttgagcctgggaggtcaaggctgcantgagccanggtcacaccactgcactacagcctggaccttacagtgagaccctgtctcaaaaaaattaaaaaaaaaatacattgagagacagagataccaccaacatatgaaacacccatggagcactaagattcagtatgtatgtatggatggatgacacagatcagtagagaaacagataatacaaacattgtgtatgtttgtattcacacacacatattgaggccagctatgggggaggggtgagagagagagtggctcaaaaagaactagaacaagggatacacaaaaagatagaataaaaactcagtgtcataaatatgtcagtggcagaaccggagagagtaatcaagagaaaaagcatgtagcagaaaaagaaactgtacatcaaaaatgaaagcacccaagccaggagatccaggcggtagtgacttattgactacttacctccctggagaagcagcaagaccactactcctgcaatagatgggtggaaagagaaatctgttgagccaaacctggttctgctgtcccagataatggcagtgaaaatgtgggtgtgctcacatacaagatagagccacacttcatctgggctccccagccacagctgctgtggtttctttttttttttttttttttgagacggagtctcgctctgtcgcccaggctggagtgcagtggtgtgatctcggctcactgcaagctccgcctcccgggttcacgccattctcctgcctcagcctcccaagtagctgggactacaggcgcccgccactacgcccggctaattttttgtatttttagtagagacggggtttcaccgttttagccgggatggtctcgatctcctgacctcgtgatccgcccgcctcggcctcccaaagtgctgggattacaggcgtgagccaccgcgcccggcctgtggtttctttataggaccttgaggtccccagccctggggtgccttgtgtctctacattcctaggcagaaaaaatgcaaaaaaattagccaggcgtggtagcgggcgcctgtagtcccagctactggggaggctgaggcaggagaatggcgtgaacctgggaggcagaccttgcagtgagccaagatcgcgccattgcactccagcctgggcgagagcgagactccatctcaaaaaaaaaaaaaaaaaaaaaatcccctacaggtgttttaagacataaatgtgggaggaaaacagtagggaaagatttctgaaataagatttttttaaaaagcataaaccatcttctggccacatagtatgtattagcctcagggggcaggaaggcaccagctgctgtgtgggtaggaggccaaggccaaggcttagctagagggaagacctgggccctctgcacctatatcaggggaactggtgtgatccttgtgctctcatcaaagacaaaatataaaagtacataacaagacactaaaatagattaaagaacttagcaatttagcctatgacttccaacactatattttacaggtagttagcaatgtttcattggcaagccacaattatggaatcgaataatagcccatgttaaggtggtgtattcttttcagcaattcattttcctacagactaccccttcagaaccctaaggttgcatccacaagaacttattatctactactcagcaggctgaggcaggaggattgtttgtgcccaggagtttgagcctttagtgtactgtgatcatgctgtgaatagccactctactccagcctgtgcaagatagtgagataccctctaaaaaaatacattatctaacattatctaaatattaacagcaatagcagcatttgatatgccattttaagattacagtggtctactgccttgatatttttcaagatgcctttgtttctgccatgtgctccaaatccctgatgcctcctggtgccaaaaattacacagaattacaagtgaaacagaatatcttggaaattgactcaaaaagatattatgtgatgatactttaaagtcagaaataacctggcattatgctgggaacaaacttataataccatcccctttaaaatgtttttctgggcgccctatcagatctcttccctttttatctttttattttttgaaacagagtctctgttacccaggctggagtgcaatggcatgatcttggctcactgcaacctctgcctcctgagttcgagcaattctcctgcctcagcctgctgggattacaagcgtgcgcaatcacacctggctaatttttgtatttttagtagagatggggtttcaccatgttatcccagctggtctcaaactcctgacctcaagtgatctgcctgcctcagcctcccaaactactgggattataggtgtgagccaccgtacctggccacatctcttcttttttaaattttattttttcttacctttctccattcataaacgaataaaacacattacaaaaattgcaaagggaaaattaatccttttactaattttactatattaaaattaactttttttttttttgaaacgcagtngcatcagccatgatggatactttctcggcaggagcaaggtgggatgacaggagatcctgccccggcacttcgcccaatagcagccagtcccttcccgcttcagtgacaacgtcgagcacagctgcgcaaggaacgcccgtcgtggccagccacgatagccgcgctgcctcgtcctgcagttcattcagggcaccggacaggtcggtcttgacaaaaagaaccgggcgcccctgcgctgacagccggaacacggcggcatcagagcagccgattgtctgttgtgcccagtcatagccgaatagcctctccacccaagcggccggagaacctgcgtgcaatccatcttgttcaatcatgcgaaacgatcctcatcctgtctcttgatcagatcttgatcccctgcgccatcagatccttggcggcaagaaagccatccagtttactttgcagggtttcccaaccttaccagagggcgccccagatggcaattccggttggcatgctgtccataaaaccgcccagtctagctatcgccatgtaagcccactgcaagctacctgctttatctttgcgcttgagttttcccttgtccagatagcccagtagcagacattcatccggggtcagcaccgtttgtgcggactggctttatacgtgttccgcttccattagcagccaccgcgccaggaaggatggtcaagatctcgtgacattgtgatccacccatctcagcttcccaaagtgaggggataataagcgagatccaccggcgccaggctattaaaattaacttttgtagattgaaagacatcataaaaagaatggaaagacagacctcaacttttaaatacatagtattgtatccaaatattctctttaaacttttaagaatcgctaagaaagagaaaaaacaatccaattaaaaatgagtaaggggtggggcatggtggctcacacctgtaatcccagcactttgggaggccgaggcgggcggaccacctgaggtcaggggttcaagaccagcctggccaacatggtgaaaccctgtctgtactaaaaatacaaaaactagccgggcgtggttgcgggtgcctataatcccagctactcaggaggctgaggcaggagaattgcttgaatccaggaggtggaggttgcagtgagccaagatcgcgccactgcactcaagcctaggtgacaaaagcaaaactccatttcaaaaaaaaaaaaaaagggtaggccaggcatggtggcttacatctataaatcccagcactttggggaggtgggaggattgcttgagcccaggagtttgagactagccttggcaacatagcgagacaatgtctctaccaaaaaaaaacggttgttgttttttggggacagggtctcactctgtcacccaggttagagagcagtgacatgatcacagttcacagcagccttgaactcccaggctcaagttgtcctcccaaccagcttccggagtagctagaactatgcacgccatcatacctggctacttttaaaaattttttctgtagagatgaggtcttgctatgttgtatcaggccgacctccaattcctgggctcaagcgatcctcccacctcagcttcccaaagtgctgggctcaagcgatcctcccacctcagcttcccaaagtgctgggattacaggcatgagccaccatgcctagcctctacaaaaaaaaatttcaaaggttttttgaaattggtgggcatgatggcatgcacctatatcctagctatttgggaggctgaggcgagaggattgcttgagcccggaagtggaggctgcagtgagctatgactgttcaccacactccagcttgggcaacagagtaagaccctatttcaaaaaaataaaaagaaaaacaaatgagcaagagataaaaacagttaattcactgaagaagaaatgcaaatggccagataaacatactgataaaaaggtgattgaaggggatttcttacacattgcaggtataaatttttccaaatattttggcaaacaatttgacattgtgtagtaaagtgaagacagacataccctaagacccagacaattcagttccaaggcattatatcctagtaagaaattcttgcacatgtgcatgggagatatacctaggaatgtttgcagaagataaacatccctggtagatacatcttacattgttacatactagtggtatgaattatactgtcttatctccttaagtgtccatttcctcacctatacattcaagataagtctacctaacagagttgttatgagattaaatgaaaaaaagaaaaagaaaaaatgcactaaggacacggcttagaacacagtagccatcatttttattctcaaacttgctgtccctgtttcagaggtttctgttgtgaaggccctacattatattgtctatcagacccagccctatgtgtataaaaaacccctcaggttgcctccctttcagatatgatttccttcctatgactagaggatcatgcaggaggaactgagttaatcccttatctcttatatgaagcaacttgttttttctctcattttatagatgttagcatgtaaacttacataatttgctgaaatgttctgaaaactcacactgagatcatataaaataaagccacacaatttgtgaaaatagcatggtgggtttgtgggtttgttgtgggagtgaggaattgagcagagggttatagaacccagctcggaagtctatggggtaggtagcctagcctctgttttctctccatggcagagatgcaaataggagctatagtagcttaagctccctaaattcccccagattgtggaaatcttcttggccttctgtgggaaattattccatcaagaaagcaggataggataacagaaaacagtatttctggaattgtttccagtacaaaacatcatgctggggaggaggagccaacagagctgtataattgtgtggagcaatctcacctgtcccacatatgggtaggcatcttcagagtcaataccccggttcttctgcacatattggaaggcattggtcatgtagcccctccacagccatcattctcagacacacaatccactaggttctggggactcagatttaagagtttgccagttttcttcttgagttggccctccagggcacccacagagctaaaagcccaacaggaaccacactgaccctgaaagggatacagagaaactatgaatctttggtgtttacatttctatatcttctctctacccggctgaaggaaattccatgtgttcttaaaaatttcagcacaaatgttgtcattgttgtgagtcttcctcttccgcttaatatctgttgcactgttctactgctattgatttttgctaccatttttactattagctacagtaaagcagagcacagtaccagctgtggaggcatttgtcctgggagctaaccctgactttgccacccagtagctatgtgaccccgggtaagttactaaatttgcctgtgtctcagtttctctatgcataaaatattgttataagggattaaatatttaaactcatgtaaagagttaagaagttcctgacaaacaataaaatctcaaaaagtattagctattattgtttgtgcagctagattgtagatttttctttctttcctgttctatttttttagattgagatttcctgaggacacaggttgtgtcttagtcatcttgagtctctgctgcctaacactgcatctggtaggttctgggggtcaaaaagtgtttgttaaatgaacgttaaatcaattgtttatcttgctgatacaatcctgtgttgtttgggttgtgaaaaaactgacattctcatgctagtaagaatgtaagattgcaaaaacttttttgggctgggcatggtggctcatgtctgtaatcctagcactttgggaggccgaagcgggcagattgcttgagcccaggaattatcttgatttgggggtaaaccccataggagagatggatgaaactatgagagtggatgagattactaaggaaatgagtagcgagactagaagacaagagagacgacgtgagaaagaggagagaggagagattgtcttgtttatcttcctgaattgttttcagacctctttccccaaccagcaattctctaattaccaacacattttatttaaaacctgtaccctcccccactctccccttctccaggggcccccagtgttcctgatcctgcccgggtgtgtcctttcttcctcccagctctcttggaagctatctccacacatggtacctgatcatgaaagaacagggtaagtgcttggacctgggagtcaagagaagggacaacacaggacagaagctgtgggagacttgggaagatgctcaggttcaccttgagttggaactgtgatataaaaagttgcttcaggtttgaacaacaccactgcgtgagtctgtcagcgacccagagtctagggctcctgctccttggagggcactaaggacaggagatttagccagtgctgctgccaggttaatggtgatcagccaggaaaggaaaactataattgttatcaatctgcccctccccaaaagtcacaaggtgctaaagagaaatgggaagcaaggtaccctggagttttctttgttccccaacataggaaagtaacactaactttttttgtttatatcttatttctaaaaaatgtttctcttcacaatctttggcaagttcttatatacgtgtatcttaagtgtattttgaaggaaaaaaactgttcaaaaggaatattaaacctttaacgctgctcccctactgttaaagacagattgctaatggaaaccatctaagaaactgatcacattagagacaaaagaaagtaaaaatacgtaattccaaagctcctgctggttctttgtactgctttatctcatggttagttaggtctgtcttattgggctctgagctcactgaaggtgtcatctgctcgttggtttatgtatgtcactaagcaccttgcacacagggagcatctgcccagcacataattgagcactattgtctggcggatatggtttggatgtgtgtcccctcccagtctcatgctgaaatgtgatccccaatgtgggaggtggggcatagtgggaggtgtttgggttatgagagtggattcctcatggaatggcttggtgccatcgccttggtgatgagtgagttctcactctattagttcatgcaagagctggttctttaaagagtcggcacctccctctctctcttgctccctctctcactatgtgacatgcctgctccctcttttgccttctgccatgagtaaaagctctgaggcctcatcagaggctgagcagatactagtgccacgctttgtatagccaaacaaacctcgtttctttataaactacccagtctcgggtattcttttgtggcaatgcaaaatggactaacacactggccattaagtgtcagactgagaattaagagcctctgactgagaagatagaagtgagaactctgagataattttttcttgatttgggacagagaaaggaatatcgggaagctggaggtgaggttgagtgttaaaagggtgactgaataacaaaagtagtgttcccatcattacctgtttttaattatccagtgcttgtttcccttctggattccatatcccactgccaaaaccgcatggttcagattatcgctattgcagctttcatcataatacacacctagaatacaaactaccagcgtgaggctctatgcaatccaagggtcaccctgtgggatctcccagtctaggagactgtttgaagaattccatccgtgtcaggagggtttaccacagagatgctgctccatactgcagcagttgttaatttctctctggccacctccatgtgaatacaaaaactaagtactgaaaatacccaaggtccttcgagaaaccatcaagtttgtatcataaaagacagtgctgtataggatcagcagcttcttacctttgctgtaaaactggaaggaggtcaggcttgcatcaatggccacagagacaggtcccactcgggccactgccctcttcagggctttctcattcccctcggggatctctctgtaccctctgcatttagctgccttgcctgttgggttgtacatacaactctcttcctggctggaagaaacaagattgtaataggactaggacaaagcaataggcaatgagtcagtgagtaagaaactcaaccaatattttgagtgatgccagtgaactaacagaggcagcagtctagggcttctaaagagggtctgttcttcctcacaaaaacgaatatgaaaagaggattcccgccttccaccacacataaaaaccaactacaggccagtgcggtggggctccatgcctgttaatcccagcactttggaaggctgaagaaaggtggatcacgaggtcagagatctataccatcctggctaacacagtgaaaccctgtctctactaaaaatgcaaaaaaattagccaggcgtggtagcgggcgcctgtagtcccagctactggggaggctgaggcaggagaatggcgtgaacctgggaggcagaccttgcagtgagccaagatcgcgccattgcactccagcctgggcgagagcgagactccatctcaaaaaaaaaaaaaaaaaaaaaatcccctacaggtgttttaagacataaatgtgggaggaaaacagtagggaaagatttctgaaataagatttttttaaaaagcataaaccatcttctggccacatagtatgtattagcctcagggggcaggaaggcaccagctgctgtgtgggtaggaggccaaggccaaggcttagctagagggaagacctgggccctctgcacctatatcaggggaactggtgtgatccttgtgctctcatcaaagacaaaatataaaagtacataacaagacactaaaatagattaaagaacttagcaatttagcctatgacttccaacactatattttacaggtagttagcaatgtttcattggcaagccacaattatggaatcgaataatagcccatgttaaggtggtgtattcttttcagcaattcattttcctacagactaccccttcagaaccctaaggttgcatccacaagaacttattatctactactcagcaggctgaggcaggaggattgtttgtgcccaggagtttgagcctttagtgtactgtgatcatgctgtgaatagccactctactccagcctgtgcaagatagtgagataccctctaaaaaaatacattatctaacattatctaaatattaacagcaatagcagcatttgatatgccattttaagattacagtggtctactgccttgatatttttcaagatgcctttgtttctgccatgtgctccaaatccctgatgcctcctggtgccaaaaattacacagaattacaagtgaaacagaatatcttggaaattgactcaaaaagatattatgtgatgatactttaaagtcagaaataacctggcattatgctgggaacaaacttataataccatcccctttaaaatgtttttctgggcgccctatcagatctcttccctttttatctttttattttttgaaacagagtctctgttacccaggctggagtgcaatggcatgatcttggctcactgcaacctctgcctcctgagttcgagcaattctcctgcctcagcctgctgggattacaagcgtgcgcaatcacacctggctaatttttgtatttttagtagagatggggtttcaccatgttatcccagctggtctcaaactcctgacctcaagtgatctgcctgcctcagcctcccaaactactgggattataggtgtgagccaccgtacctggccacatctcttcttttttaaattttattttttcttacctttctccattcataaacgaataaaacacattacaaaaattgcaaagggaaaattaatccttttactaattttactatattaaaattaactttttttttttttgaaacgcagtngcatcagccatgatggatactttctcggcaggagcaaggtgggatgacaggagatcctgccccggcacttcgcccaatagcagccagtcccttcccgcttcagtgacaacgtcgagcacagctgcgcaaggaacgcccgtcgtggccagccacgatagccgcgctgcctcgtcctgcagttcattcagggcaccggacaggtcggtcttgacaaaaagaaccgggcgcccctgcgctgacagccggaacacggcggcatcagagcagccgattgtctgttgtgcccagtcatagccgaatagcctctccacccaagcggccggagaacctgcgtgcaatccatcttgttcaatcatgcgaaacgatcctcatcctgtctcttgatcagatcttgatcccctgcgccatcagatccttggcggcaagaaagccatccagtttactttgcagggtttcccaaccttaccagagggcgccccagatggcaattccggttggcatgctgtccataaaaccgcccagtctagctatcgccatgtaagcccactgcaagctacctgctttatctttgcgcttgagttttcccttgtccagatagcccagtagcagacattcatccggggtcagcaccgtttgtgcggactggctttatacgtgttccgcttccattagcagccaccgcgccaggaaggatggtcaagatctcgtgacattgtgatccacccatctcagcttcccaaagtgaggggataataagcgagatccaccggcgccaggctattaaaattaacttttgtagattgaaagacatcataaaaagaatggaaagacagacctcaacttttaaatacatagtattgtatccaaatattctctttaaacttttaagaatcgctaagaaagagaaaaaacaatccaattaaaaatgagtaaggggtggggcatggtggctcacacctgtaatcccagcactttgggaggccgaggcgggcggaccacctgaggtcaggggttcaagaccagcctggccaacatggtgaaaccctgtctgtactaaaaatacaaaaactagccgggcgtggttgcgggtgcctataatcccagctactcaggaggctgaggcaggagaattgcttgaatccaggaggtggaggttgcagtgagccaagatcgcgccactgcactcaagcctaggtgacaaaagcaaaactccatttcaaaaaaaaaaaaaaagggtaggccaggcatggtggcttacatctataaatcccagcactttggggaggtgggaggattgcttgagcccaggagtttgagactagccttggcaacatagcgagacaatgtctctaccaaaaaaaaacggttgttgttttttggggacagggtctcactctgtcacccaggttagagagcagtgacatgatcacagttcacagcagccttgaactcccaggctcaagttgtcctcccaaccagcttccggagtagctagaactatgcacgccatcatacctggctacttttaaaaattttttctgtagagatgaggtcttgctatgttgtatcaggccgacctccaattcctgggctcaagcgatcctcccacctcagcttcccaaagtgctgggctcaagcgatcctcccacctcagcttcccaaagtgctgggattacaggcatgagccaccatgcctagcctctacaaaaaaaaatttcaaaggttttttgaaattggtgggcatgatggcatgcacctatatcctagctatttgggaggctgaggcgagaggattgcttgagcccggaagtggaggctgcagtgagctatgactgttcaccacactccagcttgggcaacagagtaagaccctatttcaaaaaaataaaaagaaaaacaaatgagcaagagataaaaacagttaattcactgaagaagaaatgcaaatggccagataaacatactgataaaaaggtgattgaaggggatttcttacacattgcaggtataaatttttccaaatattttggcaaacaatttgacattgtgtagtaaagtgaagacagacataccctaagacccagacaattcagttccaaggcattatatcctagtaagaaattcttgcacatgtgcatgggagatatacctaggaatgtttgcagaagataaacatccctggtagatacatcttacattgttacatactagtggtatgaattatactgtcttatctccttaagtgtccatttcctcacctatacattcaagataagtctacctaacagagttgttatgagattaaatgaaaaaaagaaaaagaaaaaatgcactaaggacacggcttagaacacagtagccatcatttttattctcaaacttgctgtccctgtttcagaggtttctgttgtgaaggccctacattatattgtctatcagacccagccctatgtgtataaaaaacccctcaggttgcctccctttcagatatgatttccttcctatgactagaggatcatgcaggaggaactgagttaatcccttatctcttatatgaagcaacttgttttttctctcattttatagatgttagcatgtaaacttacataatttgctgaaatgttctgaaaactcacactgagatcatataaaataaagccacacaatttgtgaaaatagcatggtgggtttgtgggtttgttgtgggagtgaggaattgagcagagggttatagaacccagctcggaagtctatggggtaggtagcctagcctctgttttctctccatggcagagatgcaaataggagctatagtagcttaagctccctaaattcccccagattgtggaaatcttcttggccttctgtgggaaattattccatcaagaaagcaggataggataacagaaaacagtatttctggaattgtttccagtacaaaacatcatgctggggaggaggagccaacagagctgtataattgtgtggagcaatctcacctgtcccacatatgggtaggcatcttcagagtcaataccccggttcttctgcacatattggaaggcattggtcatgtagcccctccacagccatcattctcagacacacaatccactaggttctggggactcagatttaagagtttgccagttttcttcttgagttggccctccagggcacccacagagctaaaagcccaacaggaaccacactgaccctgaaagggatacagagaaactatgaatctttggtgtttacatttctatatcttctctctacccggctgaaggaaattccatgtgttcttaaaaatttcagcacaaatgttgtcattgttgtgagtcttcctcttccgcttaatatctgttgcactgttctactgctattgatttttgctaccatttttactattagctacagtaaagcagagcacagtaccagctgtggaggcatttgtcctgggagctaaccctgactttgccacccagtagctatgtgaccccgggtaagttactaaatttgcctgtgtctcagtttctctatgcataaaatattgttataagggattaaatatttaaactcatgtaaagagttaagaagttcctgacaaacaataaaatctcaaaaagtattagctattattgtttgtgcagctagattgtagatttttctttctttcctgttctatttttttagattgagatttcctgaggacacaggttgtgtcttagtcatcttgagtctctgctgcctaacactgcatctggtaggttctgggggtcaaaaagtgtttgttaaatgaacgttaaatcaattgtttatcttgctgatacaatcctgtgttgtttgggttgtgaaaaaactgacattctcatgctagtaagaatgtaagattgcaaaaacttttttgggctgggcatggtggctcatgtctgtaatcctagcactttgggaggccgaagcgggcagattgcttgagcccaggaatttgagaccagcttgggtagcatggcaaaaccctgtctctaacaaaaaattttttaaaattagctgggtgtggtggcatgtgcttctaattcccagctactagggaggctgaggttggagaatcacttgagcctgagacgttgaggctgcagtgagccatgattgcgccactggactccagcctgggtgacagagacgctgtctcaaaaaaaaaaaaaaaatttggggggggggaaaggattatttgtgacctaacaattccaattttaggacttattttgcataaatatttgtacatgtgcacaaaaacatatgcacaagggtgcttattgcaacactatttgtaataaagaaaaaccaggccgcgatggctcatgactctaatcccagcactttgggaggctgaggcgggcggatcacctgaggtcaggagttcaagacctgcctggccaacttggcgaaaccccgtctctactaaaaatacaaaaaattagccgggcatggtagcgcacgcccgtaatcccagctactcgggaggctaaggcaggagaatcgcttgaacctgggaggcggaggttgcagtgagccgagattgtgccaatgcactccagcctcggcgacagagcgagactccgtcataaaaataaaaaattgaaaaaaaaaaaagaaagaaagcatatacttcagtgttgttctggatttttttcttcaagatgcctagttaatgacaatgaaattctgtactcggatggtatctgtctttccacactgtaatgccatattcttttctcacctttttttctgtcggattcagttgcttccacagctttaatttttttcccctggagaatcaccccagttgtttttctttttggccagaagagagtagctgttttttttcttagtatgtttgctatggtggttatactgcatccccgtaatcactgggaaaagatcagtggtattcttcttgaaaatgaataagtgttatgatattttcagattagagttacaactggctgtctttttggactttgtgtggccatgttttcattgtaatgcagttctggtaacggtgatagtcagttatacagggagactcccctagcagaaaatgagagtgtgagctagggggtcccttggggaacccggggcaataatgcccttctctgcccttaatccttacagtgggccgggcacggtggcttacgcctgtaataccagcactttgggaggccgaggcgggcggatcacgaggtcaggagatcgagaccatcttggctaatacggtgaaaccccgtctccactaaaaatacaaaaaattagccgggcgtggtggtgggcgcctgtagtcccagctactcgggaggctgaggcaggagaatggcgtgaacccaggaggcggagcttgcagtgagccgagattgcaccactgcactccagcctgggcgacagaatgagactccgtctcaaaaaaaaaaaaaaaagaaaaaaatctttacagtggattacataacaattccagtgaaatgaaattacttcaaacagttccttgagaatgttggagggatttgacatgtaattcctttggacatataccatgtaacacttttccaactaattgctaaggaagtccagataaaatagatacattagccacacagatgtggggggagatgtccacagggagagagaaggtgctaagaggtgccatatgggaatgtggcttgggcaaagcactgatgccatcaacttcagacttgacgtcttactcctgaggcagagcagggtgtgcctgtggagggcgtggggaggtggcccgtggggagtggactgccgctttaatcccttcagctgcctttccgctgttgttttgatttttctagagaggaacataaaaagcattcgtccggttgcgctttcctttctgtcaagaagcagtttgaagaattaacccttggtgaatttttgaaactggacagagaaagagccaagaacaaaattgtatgtattgggaataagaactgctcaaaccctgttcaatgtctttagcactaaactacctagtccctcaaagggactctgtgttttcctcaggaagcattttttttttttttctgagatagagtttcactcttgttgcccaggctggagtgcaatggtgcaatcttggctcactgcaacctctgcctctcgggttcaagtgattctcctgcctcagcctcccaagtaactgggattacagggaagtgccaccacacccagctaatttttgtatttttagtagagatggggtttcaccacattgcccaggctggtcttgaactcctgacctcgtgattcgcccaccttggcctcccaaagtgctgggattacaggcgtgaaccaccacgcctggcttttttttttttgttctgagacacagtttcactctgttacccaggctggagtagggtggcctgatctcggatcactgcaacctccgcctcctgggctcaagtgatttgcctgcttcagcctcccaagtagccgagattacaggcatgtgccaccacacccaggtaatttttgtatttttggtagagacgaggtttcaccatgttggccaggctggttttgaactcctgacctcaggtgatccacccgcctcagcctcccaaagtgctgagattataggtgtgagccaccacacctggcctcaggaagtatttttatttttaaatttatttatttatttgagatggagtcttgctctgtcgcccaggctagagtgcagcgacgggatctcggctcactgcaagctccgccccccaggttcaagccattctcctgcctcagcctcccgagtagctgggactacaggcgcccgccaccacacccggctaatttttttgtatttttagtagagacgggttttcaccgtgttagccaggagggtcttgatctcctgacctcgtgatctgcctgcctcggcctcccaaagtgctgggattacaggtgtgagccaccacacccggctatttttatttttttgagacagggactcactctgtcacctgggctgcagtgcagtggtacaccatagctcactgcagcctcgaactcctgagctcaagtgatcctcccacctcatcctcacaagtaattgggactacaggtgcaccccaccatgcccacctaatttatttatttatttatttatttattttcatagagatgagggttccctgtgttgtccaggctggtcttgaactcctgagctcacgggatccttttgcctgggcctcccaaagtgctgagattacaggcatgagccaccgtgcccagctaggaatcatttttaaagcccctaggatgtctgtgtgattttaaagctcctggagtgtggccggtataagtatataccggtataagtaaatcccacattttgtgtcagtatttactagaaacttagtcatttatctgaagttgaaatgtaactgggctttatttatttatttatttatttatttatttttaatttttttttttgagacgagtctcactttgtcacccaggctggagtgcagtggcacgatctcggctcactgcaacctctgcctcccggggtcaagcgattctcctgccttagcctcccgagtagctgggactacaggcacgcaccaccatgcctggctaatttttgtatttttagtagacggggtttcaccatgctggccaagctggtctcaaactcctgaccttgtgatctgcccgctttagcctcccagagtgctgggattacaggcatgagccaccatgcgtggtctttttaaaattttttgattttttttttttttgagacagagccttgctctgtcgcccaggctggagtgcagtggcacgatctcagctcactacaagctccgcctcccgggttcacgccattcttctgcctcagcctcctgagtagctgggactacaggtgcccaccaccacgcctggctaattttttttggtatttttattagagacaaggtttcatcatgttggccaggctggtctcaaactcctgacctcaagtgatctgcctgcctcggcctcccaaagcgctgagattacaggtgtgatctactgcgccaggcctgggcgtcatatattcttatttgctaagtctggcagccccacacagaataagtactgggggattccatatccttgtagcaaagccctgggtggagagtcaggagatgttgtagttctgtctctgccacttgcagactttgagtttaagccagtcgtgctcatgctttccttgctaaatagaggttagaccccctatcccatggtttctcaggttgcttttcagcttgaaaattgtattcctttgtagagatcagcgtaaaataattctgtccttatatgtggctttattttaatttgagacagagtgtcactcagtcgcccaggctggagtgtggtggtgcgatcttggctcactgcgacctccacctcccaggttcaagcgattctcgtgcctcaggctcccaagtagctgagattataggtgtgtgccaccaggcccagctaacttttgtatttttagtagagacagggttttgccatgttggctaagctggtctcgaactcctggcctcaagtgatctgcccgccttggcatcccaaagtgctgggattacaggtgtgaaccaccacacctggcctcaatatagtggcttttaagtgctaaggactgagattgtgttttgtcaggaagaggccagttgtgggtgaagcatgctgtgagagagcttgtcacctggttgaggttgtgggagctgcagcgtgggaactggaaagtgggctggggatcatctttttccaggtcaggggtcagccagcttttctgcagcgtgccatagaccatctcttagccctcgtgggtcagagtctctgttgcatattgtcttttgttgtttttcacaaccttttagaaacataaaaagcattcttagcccgtgggctggacaaaaaaaggccatgacgggctgtatggatttggcccagcaggcccttgcttgccaagccctgttttagacaaggagcagcttgtgtgcctggaaccatcatgggcacaggggaggagcagagtggatgtggaggtgtgagctggaaaccaggtcccagagcgctgagaaagacagagggtttttgcccttgcaagtagagcaactgaaatctgacaccatccagttccagaaagccctgaagtgctggtggacgctgcggggtgctccgctctagggttacagggatgaagatgcagtctggtagggggagtccactcacctgttggaagatgtgattaagaaaagtagactttcagggccgggcatggtggctcacgcctgtaatcccagcactttgggaggccgaggcgggtggatcacgaggtcaggagatcgagaccatcctggctaacatggtgaaaccccgtctttactaaaaatacaaaaaattagctgggcgtggtggcgggcgcctgtagtcccagctactcgggaggctgaggcaggagaatggcgtgaacctgggaggtggagcttgctgtgagccgagatcgcgccactgcactccagcctgggcgacagagcgagactccgtctcaaaaaaaaaaaaaaaagtaggctttcatgatgtgtgagctgaaggcgcagtaggcagaagtagaggcctcagtccctgcaggagacccctcggtctctatctcctgatagtcagacccagccacactggaaagaggggagacattacagcctgcgagaaaagtagggagatttaaaaactgcttggcttttattttgaactgttttttttgtttgtttgttttccccaattcagaatacagaatacttttatggatttgtttttattactttaattttgaaacaatataatcttttttttgttgtttttttgagacagggtcttactctgtcacccaggctgagtgcagtggtgtgatcttggctcacctcagcctcgaccccctgggctcaaatgattctcccacctcagcttcccaagtagctgggaccacaggtgcgtgtgttgcgctatacaaatcctgaagacaaggatgctgttgctggtgatgctggggattcccaagatcccagatttgatggcaggatgcccctgtctgctgccttgccagggtgccaggagggcgctgctgtggaagctgaggcccggccatccagggcgatgcattgggcgctgattcttgttcctgctgctgcctcggtgcttagcttttgaaacaatgaaataaattagaaccagtgtgaaaatcgatcagggaataaatttaatgtggaaataaactgaacaacttagttcttcataagagtttacttggtaaatacttgtgatgaggacaaaacgaagcactagaaggagaggcgagttgtagacctgggtggcaggagtgttttgtttgttttctttggcagggtcttgctctgttgctcaggctggagtacagtggcacaatcacagctcactatagcctcgacctcctggactcaagcaatcctcctgcctcagcctcccagtagctgggactacaggcgcatgccaccatgcctggctaattttaaatttttttttttctcttttttgagatggaatctcactctgtcgcccaggctggagtgcagtggcgtgatctcggctgacggcaagctccgcctcccaggttcactccattcgcctgcctcagcctcccaagtagctgggactacaggcgctgggattacaaacccaaacccaaagtgctgggattacaggcgtgagccactgcacccggcctgttttgtctttcaatagcaagagttgtgtttgcttcgcccctacctttagtggaaaaatgtataaaatggagatattgacctccacattggggtggttaaattatagcatgtatgcaaaggagcttcgctaatttaaggcttttttgaaagagaagaaactgaataatccatgtgtgtatatatattttaaaagccatggtcatctttccatatcagtaaagctgaggctccctgggactgcagagttgtccatcacagtccattataagtgcgctgctgggccaggtgcagtggcttgtgcctgaatcccagcactttgggaggccaaggcaggaggattcattgagcccaggagttttgaggcgagcctgggcaatgtggccagacctcatctcttcaaaaaatacacaaaaaattagccaggcatggtggcacgtgcctgtagtctcagctactcaggaggctgaggtgggaggatcactttgagccttgcaggtcaaagctgcagtaagccatgatcttgccactgcattccagcctggatgacagagcgagaccctgtctctaaaaaaaaaaaaaaccaaacggtgcactgttttcttttttcttatcaatttattatttttaaattaaattttcttttaataatttataaattataaatttatattaaaaaatgacaaatttttattacttatacatgaggtaaaacttaggatatataaagtacatattgaaaagtaattttttggctggcacagtggctcacacctgtaatcccagcactttgggaggccgtggcgggcagatcacatgagatcatgagttcgagaccaacctgaccaacatggagagaccccatctctactaaaaatacaaaattagccggggtggtggcgcatgcctgtaatcccagctactcgggaggctgaggcaggagaatctcttgaacccgggaggcagaggttgcggtgagccaagatcgtgcctttgcacaccagcctaggcaacaagagcgaaagtccgtctcaaaaaaaaagtaattttttttaagttaacctctgtcagcaaacaaatttaacccaataaaggtctttgttttttaatgtagtagaggagttagggtttataaaaaatatggtagggaagggggtccctggatttgctaatgtgattgtcatttgccccttaggagagagctctgttagcagaatgaaaaaattggaagccagattcagggagggactggaagcaaaagaatttctgttcgaggaagagcctgatgtttgccagggtctgtttaactggacatgaagaggaaggctctggactttcctccaggagtttcaggagaaaggtagggcagtggttaagagcagagctctgcctagactagctggggtgcctagactagctggggtgcccagactagctggggtgcctagactagctgggtactttgagtggctccttcagcctggacctcggtttcctcacctgtatagtagagatatgggagcacccagcgcaggatcactgtgaacataaatcagttaatggaggaagcaggtagagtggtgctgggtgcataccaagcactccgtcagtgtttcctgttattcgatgattaggaggcagcttaaactagagggagttgagctgaatcaggatgtttgtcccaggtagctgggaatctgcctagcccagtgcccagtttatttaggtgctctctcagtgttccctgattgttttttcctttgtcatcttatctacaggatgtgactgggaagctctggtttcagtgtcatgtgtctattctttatttccaggcaaaggaaaccaacaataagaagaaagaatttgaggaaactgcgaagaaagtgcgccgtgccatcgagcagctggctgccatggattga

SEQ ID NO: 157561 - DNA, 12277 bp, Homo sapiens
atggcaaagaaggtagctgtgattggagctggggtcagtggcctaatttctctgaagtgctgtgtggatgagggacttgagcccacttgctttgagagaactgaagatattggaggagtgtggaggttcaaagtaagtgagattttcttgggtcttgaacaggttgtgttgttatttcagggtgaatcacagttactgatgggtcatattgagaaatttattaaacaactctgatcagattttatttctatttattgatgtggccataatggaactgaagtcataggctggcatctctcccccagtcaatactaacccaacccaggtagctgacccaggcatgtaaaagatctcttcttttggattcagcaattgtcttacagcccatacttctgtcattctttaatacgctaatattagagaacattttacaaaaatagaagtaacagggattcttctcaagatatcacttctgtttcaattattaaaccaaatgcttctttagagaccatgctcttatcattactatttttctctgacaaatgaagcatgtttgtttactgagctttatcaatgacattctagtataactgctgtgaaactctttgttaaatatgttttattaaatttattctattaatcaaaccaaaatattgataatgctatttgtctgtattagtccattctcatgctgctatgaagaaatactgagactgggtgatttataaaggaaagaggtttaattgactcccagttccacaatgctggggaggactcaggaaatttacaatcatggcagtgggaaagagaggtgctgagcaaagggggaaaagccccttataaaaccatcagatctcattagaacgcactcactatcatgagaacagcatgagggtagctgcccccttgattcaattacctacccccaccaggtccttcccaagacatgtggggattgtgggaactacaattcaatatgagatttggatggggacacaaagctaaaccatgtcactgtccttaaaaatttgtataaaacttagaaagttgcatagatagctataaggagttacaattattccttcccacaacctctcaataggtagtagcttaccaccttctagctgtgagatcttgagcaagttatttacatcctgtgtttcaatttactcagttataaatggatataataacaggaaagtgtgattatctcatagtgctattttgaagattaagggagataattcatataaagaacttagataagttccggactcatagagttcaataaatgttagctactaataataactatatattttatagatgagcaaactgaaagtgagggaggttaagtgagatggccagggccacacaactggaggaactggccttcaaaccacggcctacgtgacttctaaacagataagccctgacttacaaccatgccctaacttgcattcttgctcaaaaagattaaacaaaagtttaagttcagaacccaaaagcaatgactttagaattatgtaatcaggtatccctgagatattaaaacacataagaatattccaaatgggagcaaaaggtttgaatacatgaaaatcaaactcatatcagcagagaccatataaagggctctcactgcaggctgactagttaggaggatggcaaggtgatccaggacctgcgcatgctttgtcagttcaaattgaatctcatgccaacagcgatcttttttaacatgtaacattaggtgtctcaggtacacatgaccataaaccacacctggagggtttcttttattttctttttaatatttttctgagacagggtcctactctgtcacccaggctaccatgcccagccatggagagtttcttaaagatactgattcctttggttaaacctgccaccaaaaaaaaaaaaaaaaaaaaaaaaaaatactgatttgtgggcactccatcccaaatctatggaatcaaaatcttctgggggtttttaataaacatctcaaatgaatcctatgataagacaaatttggtaattgttacacaaacacctaatttaaaaatctgatcattctactatctaaacacactcagagttaatgagggagaagggagaaattgattcttctgtaagacaggtagctttgcaaaaaggaaaacagcttaaatcacattcatttcttattaaaagctgatgattaatatcattttagtttttcctgggatggtgatataatatggtggtcattcctgtcttaaccaaagatatttttgtccactctaggttcacatgtagatttcagctggaatttttttttttttttttttttgctcccaggtagattcttaacctaaacaagaaatgtagaaattacagttggtccttggtatatgcaggagattggctccacaacctccctcccccagtataccaaaatccttgcatactcacatcccacagatttattgtcagcaaaagagatgagagttagtttgaacagtctgccaacaatatgatttgatgaattctaggaaggtattttctgcagtaaaatatttctccaactatccttttgccagtatctaaaatttcagattagagataacttcctattcactagaaaaactggattaaaacctgattaattaggctttattgaatattaagggttaagtatataactgtggaacttgtaacagtatcacatttcaaatttctcttaaaactatatccaatagaggaatgtaaactattgtctccactcaacgaagtcaaagagtccaaagagtctccctgcagagtgaaacataaaataagcaaaatttcataggctgcctgcactacggctatgtgagggttttggttaccaggtgactgggagtttccaagaaggatgctgggagccccatgctcttccctgggaaactttgccttttcactactctaccatccagaagcaattttttaaatgggttatttattaattttcgtatttacacaactcctactgagattacttaacatatttggtggtgacaagttaacaataaataagtaaatttaagaatccttgtcctatacccaacccagacaatagagttcttccagactctccagcaccccctagtggcacatatggaccatgggacgggtaggtaattagcatatatttttcgttctgtttccagcaacgggaagcacttggcaagcatcaccttcttttcttcgcaatactgctaggaagtatgtattatgattatctttatttacatattaagaagaaacagttttcagataaagaatttgctcaggggaacataggtggcgggagaaaaaaaacgagggtttacaatttcggagctctcacacttaataaccttgctgaagtattgatagaggaaaacatgatcttctttcagccgctaaccttctctgtttcctttattgttcctaataccttgtattcacgtgggagttaccatgtacattttttttcctgtgggttttcttttaatatttggatttggatctcctccttttccagatgtatatgtttagttattttaattttcatgtaatactctctagacatatctcaatcttggttttcttcctctaagttcaatctgaaatatcactttctctcttaaatttggctcccccaagatccaacattccaaacatattgccaatgagtgtataccttttagcttgaaagcagcagaaaaaaagtggtaaatacctgagccagggaacttaattagggggttctatcagtgatcaaggccagtgatcaagggagacaccagcctaatgaaagatgacagaagatagcaatactctaatagagatgtggttcacaaagttcattgtgcagaagcagctagggagagcttctaaaatacagaaatctgagcccgtcttttttcttttcttttttttttttttttttttgagatggagtctcgctctgttgcccaggctggagggcagtagcgcaatctcagctcactgcaacctccatcccccgggttcaagcgatttagctgggattacagccttgtgccaccacacatctggacccatcttctaatgcaactggtccactgactggcatttgggaattgcaattttgcctctaattgtaggacaaggaagtaagaagagttttaatcatattcaattcaagtaatggagcagatagatgtaaggtccatccgaaagagtgaaatgatagaatcacagaatattcttaaagaaaggcaattttattctttctaactgcttatggtaactacccatgaaagcaaaaatattgattggtaagggtcaatataatgatgtttcacgaagaaaaagtttaatttgtaagtttttgtaattcacatttataataaataaatctgtttctgctttataaatttcctcacttgagtagattaaatattacccttataatcttctttaaacttactgtttacaacctttttattgtcatgaagtcaaacataaacttcaattcagctcgtgatcaaaagatcataaattctaaataagtgctatctgaattaacttggtttgctagagttttctgacattctgaaaattctatattagaagaattctttattatatgataatttatgttaaacaaattatagcaaattctacacataaggaaattcagactatatttatgcttaattatccaggcagtagtagtacttaagtaaatatgtgagttaaatttatctgttttgaaaactgtgcctctgtcctcctcttgattgacaataaaccctctgtctccactttcacatctccaaagttcaagtgcattttaatacaatataacaataagcaccataaagatataaactatgtttgtactgttagcatcttatccctaaatccaagctcaggccctggtcagttcaagcatttgatacatacttgtctattaaatcaacattaatcatctcttcataactaggaaaactaggccaattttacccagatttgtctaaatacacagatgcctacttcagcaaactaaatgtagaaggaagcacatatgaagacaagggggtcttttttagctgctatttaccaattaacccaacaataaaagtttatcacttggctgggcgcggtggctcacgcctgtaatcccagcactttgggaggctgaggcaggtggatcacctgaggtcgggagttcgagaccagcctgaccaaaatggagaaaccccaactctactaaaaatacaaaattagccgggcatggtggcgcatacctgtaatcccagctactcaggaggctgaggcaggagaatcacttgaacccaagacggggaggttgcagtgagccgagatcatgacattgcactccagcctgggcaacaagagcaaaattctgtctcaaaaaaaaaaaagggattatcacttgatcttcagaaaaatagtgaggtcattattgtttgctgacagactacacaagtaaaatctcccaaaggccagttttgccctggccctaagattactgtagggcctcagacatcaaatcagttcttctcatcactcaaaattcccttaaaattgacctgacagagaagccaaccacatttttaagccaaattgttgggtcttttaaaaactagcattttggctgtagtataacagtcttagtttaactgattcaaaactatggctggcttagtaaatttaacgctagtggccaataataacagaaaagagataaatattcttaagtatgtattttgagccagggattctgctaagtactttattcactctcattaaagccttgaaacaattgttgcatgtttaagttattaatgagccccattttacagaggaaaatgaggaaactgacctatgtaacttgctcatggtcacaagccattaaaggtggcagaattaggatatcaatccagtcggtgtgactccagaaccctcctatttactctatactactcataaaattatttggtcttggggctgggcgcagtggctcatacctgtaatcccagcactttagggggttgaggtgggtggattgcttgagctcaggagttttagacctgcctgggcaacatggtaagacctcatctctacaaaaaaaaaaaaaaaaaaaatacaaaaaattagccggtgtagtggcacgcgcctgtagtcccagctacttgggaggttgaggtgggaagatcacctgagcccaggaggttgatgctgccgtgagccataatcatgtcactgcattccagcttgggccacagagtgagaccctgtctcaaaaataataataataatctggtcttgagaaaaaatagtatttttttcttcataaaatattttccattttgagaacttgattaagaaactcattgtcttgccaatgacattacattcaatcatgctgaaacatccagaaatagtttacacatcagtttgacatcagtattatgcaatttgaagccactgtttgaaaataaaaacactgtaccgtgatttgtttatccagagttcagattattatatccttgtatatgagacagaaacccccttgtattctagtgcaaactctctttggatcttaatatgtatagttaacaataataccatactacattctaactacctagaaagctagcataccttaacctgattaacttttaccaagttacttgaaattatagcaaagttaccatttaaatcttgattctggccaggtgcagtggatgaaccaagcatggtggtgcctgtaatcccagcactttgggaggctgaggcgggtggatcacgaggtcaggagattgagaccattctggttaacacagtgaggccccatctctactaaaaaatacacacaaaaaaaattagccgggcgtggtggcaggcacctgtagtcccagctactcaggaggctgaggcaggagaatgccgtggacctgggaggcggagcttgcagtgagccgagatcacaccactgcaccccagcctgggcgacagagcgagactccatctcaaaaaaaaaaaaaagatttgattctatcagtctactcacctttatagcttgacaatgattgatttgtgtaaaaggattcaaatcaaaatttgcaaactcccttcctccaaaggtactcattttataatactgaaattctctattatgttctctgcccagtgtcccagggtttattggtttctaaagaggtagtgggtatatacagcctccccaaggggaatttaggaagtaagctggttgtcacaaagactggcattaaataggtagagacctaggatgctaatatcttgcaatgtgccaaaataattgtccctgtccccaacctcaccattgccaatattacccctacccctcacagtgagcgtcacaggcaggcaacaaactggtgtcgtcacagaatgattgatggaacacatagactgcattcattacctaaacattgtcgtcacactgcagcaaccaaagacaatcgcattacccaggggttagatgtaggaagagtaaaaaacaaaaaatttttgaatgcgtaattatcactaattattttatttgatccttcaggagaatgtggaagatggccgagcaagtatctatcaatctgtcgttaccaacaccagcaaagaaatgtcctgtttcagtgactttccaatgcctgaagattttccaaacttcctgcataattctaaacttctggaatatttcaggatttttgctaaaaaatttgatctgctaaaatatattcagttccaggtattgtatttttggggaaatgggtttctctgcattagttcagctcatatttagatagaaaagttactctgataatgaaagcaattatgaatgaagtatcccattctaagtatttgttgaaatataacagcctcatataaaacccaaaaagtagtgtcattacccttggtattatagattatatacattaattgaagaggaaaatcatctgttaaaattaaaggtttgaataataatatattgatgtcaaaacttttttttttttttttctccctgagacagagtctcactctgttgctcaggctggagtgcagtggcatgatctcagctcactgcaacctctgccttccaggctcaagtgattctcctgcctcggcctccagagtagctgggattacaggcacacatcaccatgcctggttcatttttgtatttttggtagggacgaggtttcaccatttgggccaggctggtctcgaactcctgacctcaagtgatccacccgcctcggccccccaaagtgctgggattacaggtgtgaaccaccacacccagcctcaaaaattcatttaaactaatatctgttatcattgaatacacctagcttcatttgccttgaaagggcgtataccaaaattaaattgctgttttgttttcttagcttcttcatagaaatgggatttcttagatgtgtattaaataaattcattggtctctgttcatactagaaggctgtgggaagtatttgcttatcatttttttctgaatgcaatctcttacaacctaaagatggccagatcattttgaaaaacacttggaattaccttttcctgtgcttcctcaaaatcaacaaaaagcaatattttaattaagcatgctgaatttttatcaatggtctatactttgagaaatagctactatgcttagaaaataaaatataaatcacatttcttggccaggtatggtgattcatgtttgtaatcccagcactttgggaggctgaggcaggaagatcacttgaacccaagagtctgagaccaacctgggcaatacagtgaaaatctgtctctacaaaaaatttttaaaagattatccaggcatgttgatacccacctgtggtcccagctactcgggaggctgaggcaggagaatagcgtgaacctgggaggcggagcttgcagtgagccgagattgtgccactgcactccagcctgggcgacagagcgagagtccgtctcaaagtaaataactaacatttctggataaataactgttagtgaggcttatttttaatacatgtcattttcttagtaattctaatactaggcttatataatatcaacttacaatagtaaattttggtgaaaatttgtatttataaattccattaaaatgtccagttctacctaatgtagtttttcaccaattcctggtagatctaacttgtgaataacagattatgtataccagaaggttttgtaactttgtgcacttaactatcaatctacttaacaaatatattgcctttttatgatatataacttctattccattcttttaaagatcatgttagagtcgcaaggaagtcatttctcttggttattgtgttactgctacttttgtttcttggagagtgaagaggggttgggaagaaaggtttctgtttattggtctctgagttggtgtaagtcataggtgttagagctcaactcgagaagcaggcaaactgtaacaagccctgttgcttatgattgtcaatgtaatctacatcagtgcttctcaaactttaatgtggacatgaatcacctggatatcttgttaaaaatgtaggttctaatttaataggtatggggtaagttctgaaattctgcatttctgacaagcttccaagtgatactgaagatcctgatcctcaaatcacattttgaatagcaaggatctacagcacttagttaatatactactttgaactaccatctgaaatcttttctttcatctgaaaactgcccagatatttaaagcccttttacaagatttctactaatattccatatacatttttaaattgagacagcttaaaaattaccaacccagcagttggaaaaatatctgaaaatttgagatatataaaagactaaaatacttgcaaatgagaagcatgccattcctctagcattataaactttgcttccacttgacatcgtttcttaatccagcagatatgaaacatttatgtacaattttaaaaattaacagacctccagtgagctacatttaaaaaaatcaatgaaccaataaatcattttattcaaataagatcatgaactgtcttgctcacatgatgtactctgttttaaaaatagcaaatgttaaaaactatcattcagtggaatgctgaccatgtgtcaggcactctgcaaagtgttttgcgtgaaatatcttctctaatacaaagtccacaaagaggcggctacataaaacgttcctgacatatgccaattgcatgatcacttgaattattggtttgtttccttgttcagattatcaaataacaaacagagagaagttctttaaaagaaaagatatatatttggtgatagagcattgtaatgagaatgtacatgccatggtaaactatttgtgtattcagggagttaaaggaagacaaaggtttttaaatggggaaaaaatacaattacataattgttttgaaataattatataaagagcaataacaagggtgatgccagtctgagattggacagttactgagcagatgttcttgtagaagtcatttttgtgtaagattatgatggtctttgtgtaaggtggtggtttttgtagtttttgttatcaggcacacatcatgagaacccgctctttctggcctttcccaattctatttgtcgggtttcttaacattagtgactccatctagattctgacagttttcatgagaacttgcttttcttttctctctcaagtccttattcagtattcagcacccttaacagattagtcccactgctgagtcaggcctcttgcatgaagcagcaatgagaaagacacacttggccaatgttatcctggagtaattctcaatgatgccttctctgtgtttcttcaagacaactgtccttagtgtgagaaaatgtccagatttctcatcctctggccaatggaaggttgtcactcagagcaacggcaaggagcagagtgctgtctttgacgcagttatggtttgcagtggccaccacattctacctcatatcccactgaagtcatttccaggtgagacccgctgggattcccagctttttggagtaggtttccaggtactttatatgtagtttggattgacaagcaggattcattgctgcaactgggcagaacttggctcaataagattgagacagagctagaaagatgaaagacaccaaacatcatctttgtttctattggcctctgagtcttcatcacacatagatctcagagccaacttccttggaagtcactaagtccttggcataattttagagaattcacatcaaactggttctctgttggagaggcccttttagccatgtgcctgcgttggcctttttctaccctgccaaacaccgagcctttttcacagggccatactcacacacaaggggagagctcctagaaagaaatgctttgcaagttagtgatggggagagaagtgcaggaatagaaccctgcatccagctgttctggtccacccaagtctttcctcagagaacacacttctttcccaaggcccttaggaaaatatgtaatatagtggttcatagtccaggcctcatattagaatcacctggggagcttctaaagccctgatggcctggagacctacccccaaagattcaaacactatggagtagggttagagcaatgaaagtttgctcaggtgattttaatatacagtcaggattaaggcctgctcatctaaagcaattgttctcaaatagagtcacctggagggcttttgaaagcacaaattgctaggccccaccctccatatttctgattcaataggtgctatggcttgaatgtcctgtccaaaactcatattgagattaatccccaatggggcagtatgaagaggtggggcctttaagaggtgattgagtagtaagagctctgccctcaagaatggattaagccatttgtggataaataggttaatggattattgggttacacaggagtggaactggtggctttataagaagaggaagagagacctgagctagcatgttagcatgcttggctccctcaccatacaatgccctatgctgccttgggactcttcagagtccaaaccagcaagaaggctttcagcagacgcagcccttcaaccttgacttctcagcctccacaattgtgtgccagaagaaataacttccttcccctataaaatattcggtttcagatattttgtta

SEQ ID NO: 157562 - DNA, 380 bp, Homo sapiens
agcacgagcgctttcgtgtatgtgccattcgccagggccaagactctctgggacaccaggacctcggatgtccctacagcaccacagggctctttatctctcagaggactgaaccaccaaccaccaccaacagatacactgtggaaagcacaaggacccgacgggcactgagtgacaagcaaagtgctgccgtcatccttgagctaggggctttcttttacattatgaacgcctttataattcagtactttgcgttcaagagaaaatataactccattttgtaactctatgacactttatcctgtcatgtgctaaaactatttctgtattgctgttataaaaaacagagggatttatccctgacattgagactataccac

SEQ ID NO: 157563 - DNA, 365 bp, Homo sapiens
aagacaaaattcactgcgtgggtcgttccatagtgcacatgtattgaaaatggatgattttggtgccgtgccatgtacagaccttgtggtgcaaagcatctctccccatcagtccaaacagtcccagccagtcgaattagacccatttggtgctgcgccatttctttataggcagtaaatacttttgagggcttctcggcattatctcctgtttcaaaaaagtgtgaacagttttatgactttgaaagaaaatgtggtagctcttcatagcattctttttttaagatcagtcagattaggtgatttataaataccccttatcgaagaattaagtgtctaaacagggtattgaagatcaaggagaa

SEQ ID NO: 157564 - DNA, 1559 bp, Homo sapiens
aaagatccagaaagcttttttaaggtattaatgcatcttaaagacttaggactcaatttccacgtgtctgtacttggagaaaccttcacagatgtcccagatattttttcagaggccaaaaaggcattgggatcttctgtcttacactggggctacttacccagcaaagatgactatttccaagtactgtgcatggctgatgttgtcatctcaacagctaagcatgaattctttggagtggcaatgttggaagctgtgtactgtgggtgttacccactttgtcctaaagatttggtttatcccgaaatatttccagctgaatatctgtattctacacctgaacagctttcaaaaaggctccagaatttctgcaagagaccagatattataagaaaacatctctataagggtgaaatcgctccgttttcttgggcagccctacatggtaaattcaggtctctgcttacaacagaacctagggaagatttgtgacagatggggctaagtcacaaacttgcagcgctaaggcagaatctgaagaactttccagagtgcgcccatatttacctgatcagagagaaaagaaaatctgctgaggaagctgagcccggctgcttgacatacctgacacagaggcatctgtcacaaacctgtggaggattgagatctccaatccctgccaccaccccaactcaaattaaatacagattcctagagacgttatgatggttacacatgtcctcggcatcacatgtaggagactgttcaaaaaaaatatgtggcctgttgtataaccgcactcatgtatcccatatgtggtgcccacattgaatttcccggttggaatccgtttttatcctttgtactggatgacatggtgcctgaattctttcttttcgccgacacgatgggcagccaaactgcagcttcaaacgctcacacttggctgggtttctacctaggttgcccaggttatcatcggagccttcttgtgtcctcaaaaggccacgaggcctgaaaggaggatcagaatgctttgggattaattgggcagccatcgcagaattgtttgtgggcaaagggctgctttagcacttttcttttagcaaattagacgactctcaggcaccagggggttttaagtgaaggtattaataagagggtctggcaggtattcccatggattcacagagttacatttggcatttgaattaatgcttaaagttgcaagataaacagctgttaatttcggacaaacatggacaaacacagtgaaaggccaactatcccattaaaaatgaacactggacatacttgttttaatttttttcccagcgtaaaaatagaaaaatcaaaatactcctaacaaaaccgagtgattttgataggaaatatttctccaatatacttggcatccacctacaaatattaaccttttcaagataaatcgcttatgatttcaatagtcaaactgctgtgtttgttgatgtaaagatgttttgaatggctagatggtaaaataaattcttaataaagtacccactgcaatttttaaaaaa

SEQ ID NO: 157565 - DNA, 700 bp, Homo sapiens
  misc_feature (1)...(700): n = a,t,c or g
gcctacagtatcagaaagtggacaagttattcttgcacccaaagtttgatgactggctcctggacaacgacatagctttgctcttgctcaaatccccattaaacttgagtgtcaacaggatacctatctgcacttcagaaatctctgacatacaggcatggaggaactgctgggtgacaggatggggcattactaatactagtgaaaaaggagtccaacccacaattctgcaggcagtcaaagtggatctgtacagatgggattggtgtggctatattttgtctctattaaccaagaatatgctgtgtgctgggactcaagatcctgggaaggatgcctgccagggcgacagtggaggagctctcgtttgcaacaaaaagagaaacacagccatttggtaccaggtgggcattgtcagctggggcatgggctgtggcaagaagaatctgccaggagtatacaccaaggtgtcacactatgtgaggtggatcagcaagcagacagcgaaggcggggaggccttatatgtatgagcagaactctgcgtgccctttggtgctctcttgccgggctatcttggtcctatattttggaatgtttcttctaacctgatgattaaacgtgagaactgccaaatgccnnnnnnnnnnnnnnnngggccgcccgtttctaaaggatcccctgggggggcccaaaattta

SEQ ID NO: 157566 - DNA, 352 bp, Homo sapiens
gtccgccctggggggggcgccccccgtgccctccaggccgggggcttcccctgaccctttgggccctccccctcaggtgccctcgggccccaaccgcgccccgcccggggtccccagaatcactatcagtgacccctgaggagcgtcagccatgccgatcgggtcaggcaagtccatcccgtcctgagagccccaggccccccttcgacctctaaacagatccctcctcttctgagataccttcctttccaagcctgcctggacggctgttctgtgacttgacagtggctcccccagccccaaagccagcccacttcatctgtgacttaatctgtggaagaggtgaactgat

SEQ ID NO: 157567 - DNA, 2631 bp, Homo sapiens
atgggcaaccgcggcatggaagatctcatcccgctggtcaaccggctgcaagacgccttctctgccatcggccagaacgcggacctcgacctgccgcagatcgctgtggtgggcggccagagcgccggcaagagctcggtgctcgagaatttcgtaggcagggacttcttgcctcgaggatctggcattgtcacccgacgtcccctggtcttgcagctggtcaatgcaaccacagaatatgccgagttcctgcactgcaagggaaagaaattcaccgacttcgaggaggtgcgccttgagatcgaggccgagaccgacagggtcaccggcaccaacaagggcatctcgccggtgcctatcaacctccgcgtctactcgccgcacgtgctgaacctgaccctggtggacctgcccggaatgaccaaggtcccggtgggggaccaacctcccgacatcgagttccagatccgagacatgcttatgcagtttgtcaccaaggagaactgcctcatcctggccgtgtcccccgccaactctgacctggccaattctgacgccctcaaggtcgccaaggaggtggacccccagggccagcgcaccatcggggtcatcaccaagctggacctgatggacgagggcacagatgcccgtgatgtgctggagaacaagctgctccccctgcgcagaggctacattggagtggtgaaccggagccagaaggacattgatggcaagaaggacattaccgccgccttggctgctgaacgaaagttcttcctctcccatccatcttatcgccacttggctgaccgtatgggcacgccctacctgcagaaggtcctcaatcagcaactgacgaaccacatccgggacacactgccggggctgcggaacaagctgcagagccagctactgtccattgagaaggaggtggaggaatacaagaacttccgccctgatgacccagctcgcaagaccaaggccctgctgcagatggtccagcagtttgccgtagactttgagaagcgcattgagggctcaggagatcagatcgacacctacgaactgtcagggggagcccgcattaaccgaatcttccacgagcgcttccctttcgagctggtcaagatggagtttgatgagaaggaactccgaagggagatcagctatgctatcaagaatatccatggcattagaacggggctgtttaccccagacatggcctttgagaccattgtgaaaaagcaggtgaagaagatccgagaaccgtgtctcaagtgtgtggacatggttatctcggagctaatcagcaccgttagacagtgcaccaagaagctccagcagtacccgcggctacgggaggagatggagcgcatcgtgaccacccacatccgggagcgcgagggccgcactaaggagcaggtcatgcttctcatcgatatcgagctggcttacatgaacaccaaccatgaggacttcataggctttgccaatgctcagcagaggagcaaccagatgaacaagaagaagacttcagggaaccaggatgagattctggtcatccgcaagggctggctgactatcaataatattggcatcatgaaagggggctccaaggagtactggtttgtgctgactgctgagaatctgtcctggtacaaggatgatgaggagaaagagaagaaatacatgctgtctgtggacaacctcaagctgcgggacgtggagaagggctttatgtcgagcaagcatatctttgccctctttaacacggagcagaggaatgtctacaaggattatcggcagctggagctagcctgtgagacacaggaggaggtggacagctggaaggcctccttcctgagggctggcgtgtaccctgagcgtgttggggacaaagagaaagccagcgagaccgaggagaatggctccgacagcttcatgcattccatggacccacagctggaacggcaagtggagaccatccggaatcttgtggactcatacatggccattgtcaacaagaccgtgagggacctcatgcccaagaccatcatgcacctcatgattaacaataccaaggagttcatcttctcggagctgctggccaacctgtactcgtgtggggaccagaacacgctgatggaggagtcggcggagcaggcacagcggcgcgacgagatgctgcgcatgtaccacgcactgaaggaggcgctcagcatcatcggcaacatcaacacgaccaccgtcagcacgcccatgcccccgcccgtggacgactcctggctgcaggtgcagagcgtaccggccggacgcaggtcgcccacgtccagccccacgccgcagcgccgagcccccgccgtgcccccagcccggcccgggtcgcggggccctgctcctgggcctccgcctgctgggtccgccctggggggggcgccccccgtgccctccaggccgggggcttcccctgaccctttcggccctccccctcaggtgccctcgcgccccaaccgcgccccgcccggggtccccagatgcagccgtaggagcactttgctaactgccaacgtgagttcagattcttcagggtatttggcacccaggtctatggtgcggtgtgagatctgtgat

SEQ ID NO: 157568 - DNA, 711 bp, Homo sapiens
agacatcaaagcccacacccagccggttacaaaagctccagggccaggggaaacaaagattccagtcactttgtccagggttcaaaatgtccagcctctactggcaacctgaaacctttcccaccccagttcttcttgtctgatttatgcccgtggttaaaaagagcaggccagttttcgagataaagaagatttggcgttgactgccctagggctgtgttcagctgtgggcaatataatgggtggactcacacttgctcagttcaggcagctctgctggaagggcggtgccattgcctaagcctgtgcacatgcatccagctgcttaagatgggtgcttccttgtacccggccaccagaaaacccctgggaactcctctttcatagatcgtgactttgtgttattttccgtgttgtttgaaagtgccgaacagtttagaccagctcaccaatgggctaaatgtgggtccattttattttcttaatattgggttatctaaatgttttctgcgtgggtgctgtctttccattcctgtcttcactatgtgtaaaggattttgtcatatgtgttccataggaaacagggaattctctgatttggaggccgaacatgaggttttagactatatcctggacatgaggttcctgacattggatacaaagttatcaggcattcacaaatctttttggtttctccattttttttccctt

SEQ ID NO: 157569 - DNA, 491 bp, Homo sapiens
gtttgctcccagtgggtagagaacccggcattgtgggtaccttattagaactgaagcaggatgtaagcgtataatttgtcagacgggcaatatggtctagtggatccagaatttgaatattatttctggctctgctgctggcttcctttatgactaggagggaaatgtctctgggtgttgccagtttcggtatctggtgatagaaatgataatgaccaggctgagcgcaatggctcacacctgtaatcccagcaccttgggagactgaggcaggtagatcgcttgagctcaggagtttgagaccagcctgggctcaagcgatcctcccacctcagcctcccaaagtgctgggaccacaggtgaaagacactgcacctggactatctttctgttattgctgtggtggggagcacaccaaaatagtgcctgtcatcctcatccttcgcaggcatctttacccagcactgctgctgtgattagtcctcgtgccg

SEQ ID NO: 157570 - DNA, 2254 bp, Homo sapiens
tatattggcagttattgagggtaaagcaatatattgtaacagaatgtataaatatttttgataaaacagtctatattttattaaaaaatgaattataacccattttcagttttgcctgcatcataagagtgagcactccattgctttctttcctggccacactgctacaatccagcactaactatccatgtccagggtaaggatcgagatcgagaagcccacactgccagtgaaaaagctacgtctttactgcataaattagaggaagcaatttcggaacaacggaaccttcaaactataaatactgaattatcgaacacttgccaggcacttcagcagaagacaaggaaactgaagaagctttttagatgaggaatttcctcactatgattccctgtcctgcgcagatgcaattcaacaacctcttcaagaaaaattgaagcagtgttgccacaaactatatggtggtcaagaagcaagaatacatcagacacccctgaccttgaaacatacgtgctggtacacacctctgctggatgccttatctctggatagttttacagcagttccaaccctggaatcaacacctttctcaggtgtagccaaccaaatccacactctgtgtgaaaggcccacatatggagaagtaaaggatggtgctttggatgtaaaaagacaacacaagtgcccaggccccacaagtggccccagcccaggaacgaatctctcaggctgcatcaggatgaatgatgacccaagtatggaagagaatggtgttgaacgcgtgtgtcctgagagcctgctgcagtccaggggatattcctcactaccattacccagacacacttcatcgacagacggtactataacttcaagtgatcctggattagaaattctgaatatggcttcttgtgaccttgacagaaactcgctctgtaagaaagaggaggatacaagatcagcttctcccacgatagaggcccaaggcacaagtccagctcatgataatattgcattccaagactctacgagtaaggataaaaccatattaaatctggaagccaaagaggaaccagaaacaatagaagaacataaaaaagaacatgcttcaggagactctgtggtttcccctcttcctgtaaccactgtgaaatcggttaacgttagacaaagtgagaacacttctgctaatgagaaggaggtggaggcagaatttctcagattatctttgggatttaagtgtgactggtttaccttggagaagagagtgaagcttgaagagaggtcccgtgactgggcagaagaaaatttgaagaaagaaatcactaactctttaaaactattagagtctttaacacctctgtgtgaagatgacaaccaggcacaggaaatcattaagaagctggagaagagtataaagtttcttagccagtgtgcagcacgagtggccagtagggctgagatgttgggagccatcaatcaggaaagccgggttagtaaagcagttgaagtgatgattcagcacgtagaaaacttgaagaggatgtatgccaaagagcacgctgaattagaagaactgaaacaggttcttctgcagaatgaaaggtctttcaatcctcttgaagatgatgatgactgccaaattaaaaaacgttcagcttctctaaactccaagccatcttctctacgaagagtgactatggcgcttctttttttacccagaaaattatttgggaaatgcagggaatggtggctgggatggaaaataatgatcgattcacgtagaaggtcaagcagttggcgtattttggggtcaaagcagagtgaacaccgtccctcattacctcgatttattagcacctattcctgggcagatgctgaagaagaaaaatgtgaactaaaaactaaagatgactcagagccatctggagaagaaacagtagaaaggacaaggaagccaagtctttctgaaaagaaaaataatccatcaaagtgggatgtctcttcagtttatgacacaatagcttcctgggcaacaaatctcaagtcctccatcagaaaggctaataaggccctctggctctctattgcattcattgtactgtttgcagctttgatgagcttcctcacaggccaattattccagaagtctgtggatgccgctcccacacagcaagaggactcatggacgtctctagaacatatcttgtggccatttaccagactccgacacaatgggccaccaccagtgtga

SEQ ID NO: 157571 - DNA, 1864 bp, Homo sapiens
atgagataccacttcacacccacgaggatggctatggtgaaagaagaaaggaaactttcaaccatttcttctgttcacatacccaccatcaaccttactgaggaaagccgggttagtaaagcagttgaagtgatgattcagcacgtagaaaacttgaagaggatgtatgccaaagagcacgctgaattagaagaactgaaacaggttcttctgcagaatgaaaggtctttcaatcctcttgaagatgatgtgaagatgagcacagatataacagattctacattggggagcttcgaggctttgggaggagaaacatctaaaggagtcttagaggtgtctgatttgattgcctacgtagcagaccttcatttcaacaaaagaaaacttgaggaagaaaataataagtttaagttggctttagaaaccctggaagaaactaacagccagttatcagaggactgtaccgaattgcgccttcaggtaaaaagtgcccaccaggctattatgagaacaaatctgttaaaagaagaactggaggaactgaaacttagtatgaatgcttcagaagagcagaagagcatgattgtagcccagagcaaacaattagagacagaaaaccgggctctgattcttaagattcggattctacaggaagagaatttcaagaacatcatggatatagacagactggaaaagaagattgaagacttgtctaaaactgagacagagcaccaagtaagcacttcccaaatactgatgcagttacacacatatgagaacactttgcttaataaagatacaagtttgcagaagaaatgggatccagttgaatgttaatggagagtgtaacagtatcatctctgaaggagaaaagtctttacattacgaactcactcttgctcagtctgcagagaacactgaaacagaaaggcagcacaatgtaatcaacttgtcatctctggacgccatgatggatcaggaaatgctgctattactaagagagcccgcacagaaggcagtggaattcacagccacgcttcagaagctgcacgaagaaatttctaaaattgcaaccctcattgaaaactctcgacggtgggtaactaatccagaaattactgtgaaagaaaagtgggaggagcagcttactgaattcaacaatatcatggaagagaagctagatctttgcatattaatgctgaacatcttgggaaaccacaaagagtctcttgataaagaatttgccaaattaatagagattttgaagagattcaggcaggaatatttttatttcagaaaagaatttcttgccagaaccagagaatttaggcacaggttggacatgaggctaaaagagaccccagaactggaaactcatgctcccaaatcctgtcccctcctgtcactgaatgatgatgtgataccgaaactggcaacacccagagacatttccctcctagtcataaaggaagccagcagcagagccagaaataatattcaaattctggatccactagaccatattgcccgtctgacaaattatacgcttacatcctgcttcagttctaataaggtacccacaatgccgggttctctacccactgggagcaaacaagggaacgtgcagacgctggacagcatacgatggatgcctgcaactcctgtacctgcccccgaatgccaccagaaatatgccatctctactgaaacagcttttccaaccctgagcacgtttatgaacacggaaaagagtgtaaaggggtcaaatgcagactttacaaaaagaaacccaagatggagattcctgttggggatatactgcagggagggtaatggcttcctagagccagatgccagcacctga

SEQ ID NO: 157572 - DNA, 3738 bp, Homo sapiens
atgatgtgtagaggaacagtgttccaggcaggtggaacagcaggtgcaaaggccctgagtccctatccggacgaggacggcggggacggcgggctgggcacaggggcggccccgggcccgcggctgcgccactccaaatccatcgacgagggcatgttctccgccgagccctacctccgactggagtctgcgggcagcggcgcgggctacggcggctacggggccggtagccgagcctacgggggtggcgggggcagcagcgccttcaccagcttcctgcccccgcgacccctggccctggatcccgcctccccgctggggctggccctggccgcccgcgagcgagcgctgaaggagtcctcggagggcggcggggccccccagccgcctcccaggcccccatcgccccgctacgaggccccgccgcccaccccgcaccaccactcgccccacgcccaccacgagccagtgctgcgtctctggggggcctccccgccggaccctgcgcgccgggagctggggtacagggccgggctgggcagccaggagaagtcccttcccgccagcccgcccgccgcccggcgttccctgctacaccgcctgccgcccaccgctcccggggtggggcccctcctgctgcagctggggacggagcccccggccccgcaccccggagtaagcaagccctggaggtccgcagcccccgaagaacccgagcggctgccgctgcacgtgcggttccttgaaaactgccagccccgggcccctgtgacgagcggaaggggtcccccctcggaggacgggccgggggtcccgccgcccagcccacgccgcgaagagaacgggctgcccctgctggtcctgccgcctcccgccccctcggtggatgtggaagatggcgaattccttttcgtggaaccgctgcctccgcctctggaattctccaacagcttcgaaaagccagagtcgcccctcacgcctgggcctccccacccgctgcccgacacacctgcccctgccaccccgttaccccctgtgccacccccggctgtggccgcagcccctcccaccctggactccaccgcatccagcctgacatcctatgacagcgaggtggccaccctgacccagggggcctccgccgctcctggggacccccatccaccaggcccgcctgccccagcagcaccggctcccgctgccccacagcctggcccggaccctccgcctggcacggattctggcatcgaggaggtggacagtcggagcagcagtgaccacccactggagaccatcagcagcgcctccacgctgagcagcctatctgccgaaggtggtggcagcgcagggggtgggggcggggctggggccggtgtggccagtgggccggagcttctggacacctatgtggcctacctggacggccaggcctttgggggcagcagtactcccggcccgccataccctcctcagctcatgactccctctaagctccggggccgggcgctaggagccagcggaggcctgcggcctggccccagcgggggactccgagaccctgttacccccaccagccccaccgtctcggtgacaggggctggaaccgatgggctgctggccctgcgtgcttgttcaggaccccccacggcaggcgtggcggggggtccggtggctgtagagccagaagtcccaccggtgcccttgccgacggcctcctctctgccccggaagctgctgccctgggaggagggcccgggcccaccgccaccacctctgcccgggcccttggcccagcctcaggcctcagccttggccacagtaaaagccagcatcatcagtgaactcagctccaagcttcagcagtttgggggctcctcggcagctggcggcgctctgccctgggcccgaggaggcagtgggggaggcggagacagccaccacgggggagccagctatgtccccgagaggacctcctccctgcagcggcagagactctccgacgactcccagtcctcactcctctccaagcctgtcagcagcctgtttcagaactggcccaaaccacctctgccgccactccccaccggaacaggggtctcccctacagccgctgcggccccaggggccacctcaccctcagcctcctcctcctccacgtccacccgccacctccagggcgtggagttcgagatgcggccccctctgctccgccgggcccccagcccctcgctgctgcccgcctcggagcacaaggtcagccctgcgcccaggccctcgtccctgcccatcctgccttccggacccctctacccaggcctctttgacatccgtggctccccaactggaggggcaggaggctcggctgaccccttcgccccagtctttgtgccgccacacccggggatatccggggggctcgggggagccttgtcaggggcctcgcgctccctctcaccgacccgcctgctctcgctgcccccggacaagccgtttggcgctaaacctctggggttctggaccaagttcgacgtggctgattggctggagtggctgggtttggcggagcaccgagcccagttcctggaccacgagatcgatggctcccacctgcccgccttgaccaaggaggactacgtcgatctaggtgtgaccagggtgggccaccgcatgaacatcgaccgggctctcaaattcttcctggagaggtacccagccctgccccgacccctcacccagcagactctgacctcccagccggaccccagcagtgaggagcggccacctgccctgcccttacccctgcctggaggcgaggaaaaagccaaactcattgggcagattaagccagagctgtaccaggggactggccctggtggccggcggagcggtgggggcccaggctctggagaggcaggcacaggggcaccctgtggccgtatcagcttcgccctgcggtacctctatggctcggaccagctggtggtgaggatcctgcaggccctggacctccctgccaaggactccaacggcttctcagacccctacgtcaagatctacctgctgcctgaccgcaagaaaaagtttcagaccaagctggcccaacgcaaactgcacttcagcgtctatgactttgaccgcttctcgcggcacgacctcatcggccaggtggtgctggacaacctcctggagctggccgagcagccccctgaccgcccgctctggagggacatcgtggagggcggctcggaaaaagcagatcttggggagctcaacttctcactctgctacctccccacggccgggcgcctcaccgtgaccatcatcaaagcctctaacctcaaagcgatggacctcactggcttctcagacccctacgtgaaggcctccctgatcagcgaggggcggcgtctgaagaagcggaaaacctccatcaagaagaacacgctgaaccccacctataatgaggcgctggtgttcgacgtggcccccgagagcgtggagaacgtggggctcagcatcgccgtggtagactacgactgcatcgggcacaacgaggtgatcggcgtgtgccgtgtgggccccgacgctgccgacccgcacggccgcgagcactgggcagagatgctggccaatccccgcaagcccgtggagcactggcatcagctagtggaggaaaagactgtgaccagcttcacaaaaggcagcaaaggactatcagagaaagagaactccgagtga

SEQ ID NO: 157573 - DNA, 2087 bp, Homo sapiens
tgagtgtgtccgcttgaaaccaactgacatacagcccgacatcttcagctatctcttacacttgatgtacactgggaagatggcgcctcagctcatcgacccggttcgattagaacagggcatcaagtttctgcacgcctacccgctcattcaggaagccagcctcgccagccagggagccttttctcaccctgaccaagttttcccactggcttcttcattgtatggcattcagattgcagatcatcagttgagacaagccaccaagattgcttcagcacctgaaaaactcgggcgagatccacggccacagacctccaggataagccaggagcaggtccctgaggcctcacagctctcccagctgacttcaaatctggcccaggtgaatcggacaaatatgactccctcagaccccctgcagacctcgctgtctccagaacttgtttccactcctgttcctccccctcctcccggggaggagaccaatctggaagcatcttcctcctatgagcagcctgcgtccctcacaatagcccacgtcaagccaagcatcatgaagaggaatgggagctttccaaagtactatgcctgccacctgtgtggacggcgcttcactctccggagcagcttacgtgaacacctccagatccacacaggagtacctttcacatctagccaacagggagaaagtcgcgtccccctgactctctgtagcaatgcagctgacctcgggaaagatgccatggaagtgcctgaagccgggatgataagtgacagtgagctgcagcacatctctgattctcccatcatcgatgggcagcagcagtcggaaaccccacccccctcagacattgctgacattgacaacctggagcaggccgaccaggagagggaggtgaagaggcggaagtacgagtgcacaatatgtggacgcaaatttatccagaaaagccactggagggaacacatgtacatacacaccgggaagcctttcaagtgcagcacttgtgacaaaagcttttgcagggccaaccaggctgcccgccacgtgtgcctcaaccagagcatcgacacttacaccatggtggacaaacagactctggaactctgcacatttgaagaagggagtcagatggacaacactgcagcggcccactgacctatagtatgaacgcaacttgcgtgacaaaacattctccactcccaatgaggttgttaaacattcatgccaaaaccagaactcggatgtttttgccctagacgaagggcgatccattctcctgggcagtggggactcggaaataacggagcctgaccacccagtgttagcttccatcaaaaaggaacaagaaaccgtcttactagactgaatgtcacttatctttttaaaaaactctcatttttacaaagactatcttccctcccttccctgaattcagaactgtagttctccatggcatgatacaaacaggttcttgttctcttctcctcttccacttttccacatcccagccccacctctgtaaaggctttgtgcattataaacctggaatgtatcgactttctttcaggggatattggaaagataatggtcattatacttataaactcaaattttgagagggtttagattattcagaagcatacttggaactaatgaagggtatataataaaacaactggaatccaatttggtaagctaaaattatgactttccctgggtaaaaagtcttctcagaaaaacaatgtcagaaaataacagcgtgctgcttagaaatacggctgggctctgtactatgcaaaatctagaaagtgtggggaaactttaaacccaagaaaacgttcttagtattcatcctccaggtgtcttacttcagaatgcatcctttgagattatgtccacttaagagaaatcatcagttaagaaatctactttaacaaaacaaaaaggaggaaaaagtaataatgtgatgggcaatcttaatttttggggtacaacattacaagctgtgagtttgtgtgttttgtaaggggaaaatgtgtggggtacttggctaattaaacagggtggatttaatgcacat

SEQ ID NO: 157574 - DNA, 582 bp, Homo sapiens
tgcgtcgacgacttccgtgtggactcgcgaatgttaggcctgtgggtgccatttcgaccgggaggttgggctggccagattcagctgccgggaccggaccaggtgcttaggagaacatgcagtagaacttttcatcaaacaaatggaacacgtcacagaattttgctaacatggacaactctgcacagaaaaatgaacgcactggcaaacatcccagacgtgccagtgaagtacagaaagaatgatatcccaggacctgggttctacaatgttattcaccagtcaccggtgtccaacagtgtctcattgtccaagaaaggaacttgcatgtttccctcaatgtgcgcccgattggacaccatcgtttctaaataccctgcagcgaacgcatacactatcccatcggattttatttccaagagagactttagtaattcgtgttccagcatgttccagttgccaagctttatgaaagctctcaagtttgaaactccctggcaccaaactattacaatgcctctgtctcttgctgcaagagaagaaacaacgtctgtactcgagccgggttttaatggttccaaa

SEQ ID NO: 157575 - DNA, 3007 bp, Homo sapiens
atggacaactctgcacagaaaaatgaacgcactggcaaacatcccagacgtgccagtgaagtacagaaagcccttcgcatctgcatccacaacacgagggttctcctgggctctcggcctggggtgctggagtacctggctccacagtgcctcctgctgcctgcctcactctccatggcagtcagttcctcttccgtccaccggggatcattctcacctaaagcaggaatcagcacccctgtcgtcacctcccatggggcaaggaatgatatcccaggacctgggttctacaatgttattcaccagtcaccggtgtccaacagtgtctcattgtccaagaaaggaacttgcatgtttccctcaatgtgcgcccgattggacaccatcatttctaaataccctgcagcgaatgcatacactatcccatcggattttatttccaagagagactttagtaattcgtgttccagcatgttccagttgccaagctttatgaaagctctcaagtttgaaactcctgcaccaaactattacaatgcctctgtctcttgctgcaagcagagaaacaacgtctgtactcgagccgggtttatgtcaaaaacccaaagaggatctttcgcttttgctgataaaggacctcccccagaggtgacttcatcatccagtcataaaacagaggaggcagctctgtttccggagcacccactccacgggcattatgatatcaacgaatcccttgtgaagcagtcgccaaatacattaatgtcttgttttaaatcaaaaaccaaccgtggattaaaactgacgtcaacaggcccgggacctggttattacaaccccagtgattgcacaaaagttccaaaaaagactcttttcccgaaaaaccccatcctgaacttctctgctcagccttcgcctctgcctccgaagccacctttcccaggtcctggtcagtatgagatcgtggactacttaggcccccgcaagcatttcatctctagtgcatcattcgtgtccaataccagccggtggacagcggcgccgcctcagccaggcctgcctggcccagactggtggcatccagagagtgttcagcccaggtcgatggaagaggagtttgaatggctgccttggcttggggccatgggtcccaaggagaagcggatattgtcctccagcactgggggcaggaatgaccaaggaaagaggccccagcaagctggaggccggctctgtggacagctacctgttacccaccactgatatgtatgataatggctccctcaactccttgtttgagagcattcatggggtgccgcccacacagcgctggcagccagacagcaccttcaaagatgacccacaggagccatccacatcaagtcaggcgagtcacccatggtctacctcaaacaaaggccagttctaccccgtcaccctgcggaccccagcaggtggcaaaggccttgccttgtcctccaacaaagtcaagagtgtggtgatggttgtcttcgacaatgagaaggtcccagtagagcagctgcgcttctggaagcactggcattcccggcaacccactgccaagcagcgggtcattgacgtggctgactgcaaagaaaacttcaacactgtggagcacattgaggaggtggcctataatgcactgtcctttgtgtggaacgtgaatgaagaggccaaggtgttcatcggcgtaaactgtctgagcacagacttttcctcacaaaagggggtgaagggtgtccccctgaacctgcagattgacacctatgactgtggcttgggcactgagcgcctggtacaccgtgctgtctgccagatcaagatcttctgtgacaagggagctgagaggaagatgcgcgatgacgagcggaagcagttccggaggaaggtcaagtgccctgactccagcaacagtgggcattatgatatcaacgaatcccttgtgaagcagtcgccaaatacattaatgtcttgttttaaatcaaaaaccaaccgtggattaaaactgacgtcaacaggcccgggacctggttattacaaccccagtgattgcacaaaagttccaaaaaagactcttttcccggctgtggggggtgtggtgtgctggtcatgttcacttcctgttttgctggtgcagcaatgtgcaacactgagacctgggccctgcatggcagaaagcactgtgctagcccggtgtggtgggagcacagcatatgctccaaaagatggatggagagaggaaaggccagcttcatggcagccagtaagctttgccctctttgaggacctgcatcccccagggacccggtcaaggcagggtggggtcaatcgtcatccagtgagagcctctctggcctggaatgggccccttcccccaagtggtcagtggatgtatggctgtggggcctctgtttatgtcttcccaggccaccctccatgggcacagtgtggtcgcagagccgtggcttccctggcagtcagtggtgaaaaagtctacaaaacctggagcccacagaagggttgctatgtaaagaaattgtccctggagccctacagtcagagactccatctgcccttggcctctccatgggtaactggagcacagaaggccacgtctttcttcttcgaagcattttttgttgctgcaatgttgcttgtatcgtgctacgcaattgatatctacttccctgactgggttgcagaggttcaagacaggtcaaatcctgtcagcgtgattcagtttgaatcaacaccatttaaatccacccaccatttaccaagcactcttcagtgccaggcacgtagggagaccctggggatgcagagatggcccaatccccaccctccatgggctttcggcatagttggagagccagctaccaataagctctatccacaccagtggtgctcaatcctgcagaaggttgtgagattgatacctaggcccactcagaacatggaactggaatctgtgccccctccatga

SEQ ID NO: 157576 - DNA, 442 bp, Homo sapiens
aacaagtctttgagcacctgttgtgtgggacatctcagcctgatgcctggtctggtgggagggtgaggaaggggacagagcaccatttaaaagcccaggcttataaaaaaaggataagatcatgtttcttgcaggaacatggatggatctgaaggccattattcttagcaaactaatgcaggaacagaaaaccaaatactgcatgttctcacttataagtgggagctgagtgatgagaacacatggacacaaagaggggaacaacaaacactggggactgtttgaaggtgcagggtggtaggagggagaagaggtgaaaatataactattgggtactacgcttaatacctgggtgacaaaataatttgtacaacaaacctcgtgacacgagtttacctatataacaaacctgcacatgtaccctgcacttaaaataaagctt

SEQ ID NO: 157577 - DNA, 1287 bp, Homo sapiens
atggaggagggagtgcagcagggagtagagacagtggagtatggagtggaggagagagtggaggagggagtggaggatggagtggaggagggagtggaggagacagtggaggagggagtggaggagggagtggaggagacagtggaggagggagtggaggatggggtggaggatggaatggaggatggagtggaggagggagtggaggagggagtggaggatggagtggaggagggagtggaggatggagtggaggagagagtggaggatggagtggaggagacagtggaggatggagtggaggatggagtggaggagggagtggaggatgggcacgtcagcaacacgtcctgtcagtcactgttcccatggaaaacgggaatagcagatctgaactcaccccttgagaaacagggatggcaatggaaagggcagaagcaagacctggcaaaaacaccggtcatgctgggctgcattctccttggtccccagtgctactcccaggagtttccacttatcgattgtggcaaaagaagaggtatgggagacctcacctacaacatcaaaaatcaccttttgtatttgtttttctgttcgctggtgaaaaaaggtcaaggtgaactgaagaaaataagtctttccccaaaggaggtagaagatggggaagatgagatgtcagaagctaaggacaatggcagtagagatgaggttcttgtccctcataagaattgcaggaagaataccactgtcccgggaaagaaaggggaggaaaagtctctggctcctgtgtttgctgagaagttaatatcaccaagcaggaggggagccaagctcaaggaccgtgagagccaccaggagaatgaagacaggaacagtgagttggaccaggatgaggaagataaagaatccttctgtagggggggtgggggaaaagataaagctgggatgaaagttagagaagaccttcccatgagggctgaagatgatgaacaggatgacgacagtggcagtggcaaaggcagtgaggaagaggaggagggggaagaacctatcaaagaaacacctgataaacaaaagaaggaaatggccaatcagaaagagtcccctggagccaaaaagcagaaattagaagcaactgaaccacgtgtagcattccaactgtttgttggaaacctgaatttcagcaaaactgctgctgaactaaaagttggcctcagtgaattttttgctaaaaatgatcttgaagttgttggtgtcaaagttggcttgtccaggcccacttcttag

SEQ ID NO: 157578 - DNA, 1149 bp, Homo sapiens
atggaggagggagtgcagcagggagtagagacagtggagtatggagtggaggagagagtggaggagggagtggaggatggagtggaggagggagtggaggagacagtggaggagggagtggaggagggagtggaggagacagtggaggagggagtggaggatggggtggaggatggaatggaggatggagtggaggagggagtggaggagggagtggaggatggagtggaggagggagtggaggatggagtggaggagagagtggaggatggagtggaggagacagtggaggatggagtggaggatggagtggaggagggagtggaggatgggggaatgtgcatcagccttcacctgcaagccccgggccccctgcactccagagatgctggactggaacccacccaaggcaaaggcgtcagttctggcccctctgttctcttcgtgtggcccccagcaggccagccgccccggctccacagcgtcctccacaaggggcctgccgagcagccagtctcacaggaagtaaggatgtccccgggtgtccccatcacgttgccggaggaccagccagcttcccgctctcagctggcagcagctgccggtgatggatgtgaagggacagttgtccacaagactctgggagctgaggggaggccggctctccaggcagcaccagagcaaggccatcgcagccccgccagccgggcttgttcacatggtggcctcggggctcccatggcagttagagaaatcaagcccaagtctcatatcacgttcactattctcccattgtccaaagcagaccacatggccaaggcccaagtctgtgtgaaaggatgtggatacagggaccccgaatgaaccagaggcaatactgctgcaagctaccacatagatgctgttcagagctttgcaggaccaaatcttttagggctgtttttccattgtggtataccctctccatttagattcaattgaacaaatatattctttggggctgcagtgtgtcagatgtggagacatggtcccactggctttcaagttgccatccatcttctagggagaatttctggccttttcggatggcatggtccaggccggagcaccagccccaggttgaaacatcaggcaggtttctaggaaatg

SEQ ID NO: 157579 - DNA, 1630 bp, Homo sapiens
  misc_feature (1)...(1630): n = a,t,c or g
tgatacgccagcttgcacgaggctctttgacgctgcctacttcgggcagaaggactctgtgtgtggggtgtctgagtgcatcatcatgggaatcccaatgaacattggaaccgggctcttcaagctgcttcacaaggctgacagggacccgaaccctcccaagaggcccctgatcttcgacacaaatgaattccacatcccccttgtcacatagtccaaagaaagaggggaccatgcctgaccttgactccttgtcctgtctccagctgatgtataaagagttttgtgctccctgggaacggggtcctgaggtccccacctatgccagcaatcagagaagccctcttggcatccccaggagcagcttctcctctgatagggtgcagctcacaccagtgaccctgactgtgcccangctgctcgggagagctgagggttttattgtttgcttgcttgaaacctaatctatagacggccccacagctcctggcacacactgcttccctggacttaaagcccagcccaggtgtcatggtccatcccagctcactgcatacatccatcggctccccatggtgtcttcacaccctgacgatgagccaggcctgagcccccacacagggccagggcacattcttggattttccattccttggtcaagctggaaacctctcaaatgtgaacaaacttatgtaaaatattgttactattatttaattgttcccatttgagggatttggaatttttgttattttagttttatttttgaaaccaagcatctatagaaaccaagaaagtcagcatgtaagcgtcactggaaaaactggtttaagcaaatagagccgtctgggatttgtaactgaggtgcaactgtcatgaggcccaggcagctctgtaacatcttctatagatgcccctggctaccctgttgttttcatctacctcagacccctatcatggggctctaccctgtgacaagagccaaacccattctccatggcctatggaagcctcactggagtttggggcctgctgcaatggggatgagatggttttttgtagaattatacttacgttccttggatgatctctagttgattttttaagttctgagttgatgctgttaaggtacccggggtagccattggttcttggatctgtgctagaatgagtgctttcccttcctactgatgtgattgtggattacgaattcgtgaccgagtgatttttggccagtggttgggtttaaaattctattaaaatttgtagtttgggctgggtgctgtggctcatacctataatcccagcactttgggaggccgaggggggcagatcacttgagcccaggagttcgagagcagcctgggcaacatgacgaaaccccgtctctacagagaatacaaaaattagccacggcatggtggcccatgcctgtagtacctgctattggtaaggctgaggtggaaggttcacttgagcctgggaggtggaggttgtagtgagccaagatcgtgccactacactccagcctgggcaacaaagcaagatcgtgccactacactccagcctgggcaacaaagcaagactttgtctcaaaaaaaaaaaagaaaaaaattaagcgtaaaaaaaa

SEQ ID NO: 157580 - DNA, 1832 bp, Homo sapiens
atcactgcggcggaactctggagctctccgacgatgacacagatagtaagaccagtgatgtcaacgagacgcagccaccccagtcagagtaaagttgcaggaagccagaggaggcagtacagcgggacagttaagaatgcacccggggcctccatgcagatttcggaaattggcaagctacgggattccttcctgaaagatcaactgtgtcttaaggctctccagcctatgcatactgtatccatgcttcagacttaggtacaattgctcccctttttatatacagacacacacaggacacatatattaaacagattgggttcatcattgcgatctattttccatatagtcatcaagagaccattttataaaacatggtaagaccctttttaaaacaaactccaggcccttggttgcgggtcgctggggttattggggcagcgccgtgcgtcgtcactcagtcgctctgcatgctctctgtcatacagacaggtaacctagttctgtgttcacgtgggcccccgacgactcagccacatcaagtctcctaggaccactgtgggactcttaaactggcacttgtcttctctcattttcctttcaaattaattgatcaatggctatttttcagttgaggcaaactgtggaaagggggctttgggaaagagtagggagggggttgggcttgggatcgggaaagcaacacccatttgggggtttaccatgttcccatccccccaagggggcgcctgccctgcggagtcgatgggtgttcccgcattctacttcattgtggaacttggcctttgcgaggggctgggtctgttgcattagaagggatagtgggccacactgcagcttgaggccccagggttggcagccatggattcatgttaggactttccagatgggtttcccgaaccgcctgggttctgcccgcgcccttccttcacgttcaggagcaagcagccgtggacccccctaagccggagctgggtggaaaggcccctcccccgtcgccagccgggccctcatgctgaccttgcaaatttaagccgctgctttgagcccaaaatggggaatattgggttttggtgtccgaggctttgttccaagtttgtcaatgaggtttatggagcctccagaacagatggccatctttcctgaaatgttgacatgccaagtgggtgtgactccttcaattttttccttctcccttccctttgggacagtgttacagtgaaacacttaggcatcctgtttttggttggtagtttaaggcaaactgacatttacgggaaagtgcccctagaacaccaacagtaccctaagaacaatgttgaaataataatccattccggcccctcctataaccaatttaaatggtattccaagttttggacctggtggcctccatatccatggacccctctcctagtcaaaagtgggtattaccagacattccagtgaacaatgaatccagtgttaattcctaaatcccttgatccctctgcaatgtgccttgaaaacacaaaccctttttggggttaaaaagctttaacatccaattaagggaagaatttgtccctgtgggtttgggaatccttggattttccccctttatgaactgtacctggctgttgacccaccagacacctgaccgcaaatatcttttcttgtattcccatatttctagacaatggatttttgtaagacaataaatttattcattatagatatttgcgcctgctctgtttacttgaagaaaaaaagcacccgtggagaataaagagacctcaataaacaagaataatcatgtgaacgtgaaaaaa

SEQ ID NO: 157581 - DNA, 361 bp, Homo sapiens
cccacgcgtccgggtggctccatcctggcctcactgtccaccttccagcagatgtggattagcaggcaggagtacgacgagtcgggcccctccatcgtccaccgcaaatgcttctaaacggactcagcagatgcgtagcatttgctgcatgggttaattgagaatagaaatttgcccctggcaaatgcacacacctcatgctagcctcacgaaactggaataagccttcgaaaagaaattgtccttgaagcttgtatctgatatcagcactggattgtagaacttgttgctgattttgaccttgtattgaagttaactgttccccttggtatttgtttaataccctgtacatatctttgag

SEQ ID NO: 157582 - DNA, 1651 bp, Homo sapiens
atgggggacaccccacgccagttcggaggcgcgaggccgcgctcgggaggcgcgctccgggggtgccgctctcggggcgggggcaaccggcggggtctttgtctgagccgggctcttgccaatggggatcgcaggctcaccatggatgatgatatcgccgcgctcgtcgtcgacaacggctccggcatgtgcaaggccggcttcgcgggcgacgatgccccccgggccgtcttcccctccatcgtggggcgccccaggcaccagggcgtgatggtgggcatgggtcagaaggattcctatgtgggcgacgaggcccagagcaagagaggcatcctcaccctgaagtaccccatcgagcacggcatcgtcaccaactgggacgacatggagaaaatctggcaccacaccttctacaatgagctgcgtgtggctcccgaggagcaccccgtgctgctgaccgaggcccccctgaaccccaaggccaaccgcgagaagatgacccagatcatgtttgagaccttcaacaccccagccatgtacgttgctatccaggctgtgctatccctgtacgcctctggccgtaccactggcatcgtgatggactccggtgacggggtcacccacactgtgcccatctacgaggggtatgccctcccccatgccatcctgcgtctggacctggctggccgggacctgactgactacctcatgaagatcctcaccgagcgcggctacagcttcaccaccacggccgagcgggaaatcgtgcgtgacattaaggagaagctgtgctacgtcgccctggacttcgagcaagagatggccacggctgcttccagctcctccctggagaagagctacgagctgcctgacggccagggtcatcaccattggcaatgagccggttccgctgccctgaggcactcttccagccttcattcctgggcatggagtcctgtggacatccacgaaactaccttcagactccatcatgaaagtgtgacgtggacatccgcaaagacctgtacgaccaacacagtgctgtctggacggacaccaccatgtaccctgggcattgccgacaggatgcagaaggagatcactgccctggcacccagcacaatgaagatcaagatcattgctcctcctgagcgcaagtactccgtgtggatcggcggctccatcctggcctcgctgtccacctttccagcagatgtggatcagcaagcaggagtatgacgaggtccggcccctctcatcgtacaccgcaaatgcttctagggcggactattgactttagttgcggttacacccgtttctttgacaaaaccttaatttgcggcagaaaacaagatggaggattgggcatggctttatttgttttttttgttttgttttggttttttttttttttttggcttgactcaggattaaaaaccgggaccggggaaggggaccccattgggtgggggggaccatcccccaaggtacaaaggggggccggggactttgatggcccatgggggtttttttaaaagccttcccaaaaatgaaaggcttggttacgggaagcccttggccttcttaaaacccaccccatttctttttagggaaaagggcccagccctttccaagtcccaaccgggggggg

SEQ ID NO: 157583 - DNA, 1488 bp, Homo sapiens
  misc_feature (1)...(1488): n = a,t,c or g
agacttctggtctcaagcaattctcccacctcagcctctcgaaatgctgagattacagacataagccaccacactcagttatttaatattttattatctatctcttttacataactacttgccaaaaaaaactaatatgacaaagcccaatgtattatatggttataaacagaaacatatctgtaaacattagtattataagcagtgtaatattaaaggtggttatctatttgaaaactcagaaggcagtgacttctacaattaaatttcaaaaaatcaaaacataaaacattattagacttcagttactataaaataaaggcatccggaatcttaattttaggnggctaatgggtaacttttaaataattccctaaatttcatggtaatctgttaaggatatattttgttaacatttagaaaagacaagagaataagagaatcaaaaccaacgaattaaaggagctttataatttagcaaaactttcaactttacatgtctctccaaacatttactgggcaaacacaatggactgcttatgagaaaatctgcatatgtcattctacaaacagtaatgtcattaatattctatttttagtttccaagggaagatcctaaacataacaaatccttccgttagcatttcttcgtgtatgcatgttcctacttcctgttcaaacatatgctgtaactattcaagtacgtcttttcaaaataaaactggattaaccacccaaaaattcaaaaacccaccaacatccaaggtggatattaggggcacatatcacttgaacttgacattttaatgatgaaaagcaaatttaagaagcaaaaaaattaacatatttaaattataatttgcacatcagattactttttcagatgtgtcagagctcacagataaaagtaatgaaaagaaacgtggtaaaatacattttaattttaccctccattataaattaaaatgaggccgtaagaaaaacattgagacccataatatataccatatgggaaaactgggcccactgaaagatggcaaataattccatacaatatagccgtaagcctttccatatataaattatatgtcatttccatcaactgttagtatcatcagtcctaaattttacaatatatattaaaatattaaaatgcctaaaaaaatcattgcaatatagaatacactgtggcaaaatacgtatttgtggctttatagacaatctaaatccattctatacaatagttttctaaaatataaatggcagtttacatgcaaaagaacacaccagctggatgacctcatataatatatcagaaattaggagaaaacacccttttaacaagacagttacatagcagaggtggaatgtagaatcagattttgccttaatacaatcttggataaaattaattatgaaaaaggacagtctctattactttcagttagcattttaaaaaataaaatctactgtgattttatattttct

SEQ ID NO: 157584 - DNA, 459 bp, Homo sapiens; identical to SEQ ID NO: 130862
  misc_feature (1)...(459): n = a,t,c or g

SEQ ID NO: 157585 - DNA, 437 bp, Homo sapiens
ttcatgagacctctcctcgtctgtgcacggacgagtggccgactctggatgcccaggctgttgcttcccagactggtggtgaatcctccatagtctgggacaaatatggccctgaaggctccatgagcagacgagaaggctggacttcgcaactgggtcaccttagatccggaactagagaatgacaccgttgtttccgggaggaaaaagaaaaagcgcttgacccggaagctgcgtgtcccatccccgcgcctgcttctctgactggggtgaggccgcagcggactgccctctcccaagatggcgtcgaagataggaagcccgacatcccagtgccttacctgtatttcgacatgggggcagccgtgctgtgcgctagtttcatgtcctttggcgtgaagcggcgctggttcgcgctgggggccgcactccaattg

SEQ ID NO: 157586 - DNA, 1290 bp, Homo sapiens
tttctttccccagtaatctagatgcttacaaacaccactggttacaaatgtgctggtctccctggtggaggtaccctatcacagtattctcccctgccaccagtacattcctccttcaccaacacattaaaatatttaccttacatgtagaaaaagctcttaatgatagtagcactgaacttgtgttggtatcagatgaatttgctcacctgcgtactattgtgttgcaaaaccaaatggcattaaaaatgcttaccgcaccccaaggaggggcttgcacgctactgcaaactgaatgttgtgtgtatatctctggtaattctcacaatatgactctccttggaaagccatgctgagtgtggtttttattaattgtgcttttaattctcctgtgcttaccctgtatctgtaatctatatcaattgtggcttccctgtgtatccgtaagagtattttcctacagttgagtatcagattgaggccaaatgtggaggaaaagttaaatattaaatttgaactcaattgaacatggacacaaacaatggtcaccaagtcccggaacaggttgtgtgagccccttgaggcattcatccagcgctgtttcagataaatctctatttcaatctattcctatatgttagttattgaaaaacaacagacaatcgcaaaaacaagttgacctttttgtgttccttgagcctggtcatgaagggccctcgtgcctggagctcatgccaaacaactcattacaaaaagagctagggtcccagaccgcaccaaagacccatgagacctctcctcgtctgtgcacggacgagtggcccgactctggagcccaggctgttgtttcctagtctggtggtgaatccgccatagtctggtgagtgcagtgtccgactctcgagcccaggctgttgctgttgcttcccagtctggtggtgaatcctccatagtctggtgagtataaatacatatatctcttttcctttctccccttcccattgcaacttgcttactatatcatttgcttattatatctgcattgccatttatgtgggataaagcttgtttacccttaaaggtattgtatgtgtgccttttcttctcccctcactcgtctctcgcacagaacactaggcaggggtaggaggaactgggagtggggggaccacagggacaaatggctgtgttcatttttcaggggccaggccacccacccatccccctctgcccccccaattgtgaataaaaattgtttgctttgtaaaaaaaaaaaaaaaaaaaaaaaaa

SEQ ID NO: 157587 - DNA, 1162 bp, Homo sapiens
gagacggagcatcgctctttctcccaggctggagtgcaatggtgctatctcggctcactgcaacctccacctcccgggttcaagctattctcatgtctcagccttccaagtagctgggactacaggtgcctgccaccatgctcagctaatttttgtatttttagtaaagatggggtttcaccatgttggtcaggttggcctcgaactcctgatctcaggtgatccacctgcctcggcttctcaaagtgctgggattccaggcatgagccaccatgcctggccgcatgtgtcattttcttgggtgttatactgatcgtatatttgcaggtttgcttttgtgacagacttcttctgggggaaaaaaagtatccttcctatctttttacttttgtccagttccaggtatccctgtttttttcttcactcttccttccttgttcatgggagtttttcttgaggacttcaagcccagcttcggagaatcctgggtgaggcatctcatctcctttctgctctcttctctacctagcctttccaccctcacacctcccggggtctgaaaatggaaagataagggtgtttccctgaaagttgctcttctgtgtggggatgacaggttctaaagactcttttctggtccctgccctcattgccatgattaatcacctaagtggcccgaggttttgtaacagcacagtcttaaaatgcttctcccaagtttaatttctctccatttgaccttttaaggatgtgaattggctttaagcagtagactccctttagtacggcgctgtgagcctctcagtgaatctgctacatccattccacccacgggtctggaaacttgtctgtttacctttccctaaaaacctaagatatatttttaagaagtgccttgtaacttttcatatagcctttcccctactttgggtagactgtttcttacaggaatttggtagatctttccaaagagaattctgtatctgtatttttaaagcataaatcctgtcaattttggaggagaactgatttggcttgagttttctcagacatgggaacttttgacctaagtttgtattttacattgttgaaagggaactccgggatcccagaaaacatatgggactgcaattgggtaaagtttctgtttcagtaacttatt

SEQ ID NO: 157588 - DNA, 479 bp, Homo sapiens
  misc_feature (1)...(479): n = a,t,c or g
attgatagctctcgccaggcggggaanncgnggntgaaggagnnnnnnncccctgccagcccctgaaggccaagaccagcctcccattctggtctgctgccatggatgccggcctggaagccatgcagaagtatggcaaggctgctccaggggacaggactatgctggattctctgtgggcagcggggcaggagctccaagcctggaagagcccaggagctgatctgttacaagtcctgaccaaagcagtcaagagtgccgaagctgcagccgaggccaccaagaatatggaagctggagccggaagagccagttatatcagctcagcacggctggagcagccagaccccggggcggnggcagctgctgccatcctccgggccatcttggaggtcttgcagagctagggtgtgtgactgcctcccttggcctcagctcctcgcctttgtcacttccttctgccttccaaccctcacctt

SEQ ID NO: 157589 - DNA, 3007 bp, Homo sapiens
cgccgggctgaaggcatcccggtggagatggtggtgattggggacgacagcgccttcactgtcctgaagaaggcaggccggcgggggctgtgcggcaccgtgcttatacacaaggtggcaggtgctctggctgaggctggtgtggggctggaggagatcgcaaagcaggtgaacgtggtcaccaaggccatgggctccgaggaggatgaggcccacgagggttgcagccgagagaacctgggccggatccagttcagtgtcggctacaacttccaggagtccacgctcaccgtgaagatcatgaaggcccaggagctgccggccaaggacttcagcggcaccagcgaccccttcgtcaagatctacctgctgcccgacaagaagcacaagctggagaccaaggaggttgaccaggccagcctggaagacgaaggtgttgaagaacatgaggaaaatgatgatgatgttgaagaggactgcaatatcctggatgctgtagacataaaaaaaagtacaaccaatgaaggcctgtgtgaggacccaagagcagtggggacgctccttatcgtgaagaactacactggggatcggctcaacttcggcctggcccgggagcaggcccgggctgaaggcatcccggtggagatggtggtgattggggacgacagcgccttcactgtcctgaagaaggcaggccggcgggggctgtgcggcacggtgcttatacacaaggcgccagtggaaaaagcagacaaaatgtatgaacagatgagaaattctagcagagttggaaactccaaaagtcaaatggaaatgctaaaaacaaatacagtagcagatatgcagaatggtttcaacaggcccatcatgagatttgacatcatcaaggaaagaattagtggaagacagtggaccacagaccagcagctgatccaggttattcgctctataggagtctatgatgtggtggagttgaaatttgcagagaatcgagcaaatggccagtccaaagggtatgctgaggtggtggtagcctctgaaaactctgtccacaaattgttggaactcctaccagggaaagttcttaatggagaaaaagtggacgtgaggccggccacccggcagaacctgtcacagtttgaggcacaggctcggaaactccttcccgttcccaaaggaggaacagcccgagggtcctggagcaacggaaggaggactggatgcggggaagggcaaagggcgcggaacggggtggggagtctgcgggcgagctcggaggacactggcgcacctcccccgccggctcacggccgcatccgccacatccgaaggcgccgcgacttcccggagaccccgaagcgtgcgctctcatccgggtcctgcgggcgctggcggaaagaggcgaggcggtgctccgggggcggggcctccttcggttggcggcctcgggcttcgggagtcctccaagaggccagtgtcgcgctcgagtaccgacgggccgctccaagcctcgacatgtcgtacaactacgtggtaacggcccagaagcccaccgccgtgaacggctgcgtgaccggacactttacttcggccgtagacgtatacctgttgattgtcactaacacgagattagagatctatgtggtcacgccgagcggcttccgccgtcaaagagtttgtctcccttcacgtgcacacgtggcatgcctgggtctccccagtgcatctcctctcgggatccctgcgtgccatcgctgtatgtgtgtcgtcactgctgctgtggttggcctgactgtggcctctgccatcctctccctgcccctctggatgtctgtggggctcatgtgcatgttgcctgcaggagggaaggcggtgaacacagcccccgtgccaggccagacaccccacgatgagtccgaccgccggaccgagccacgttcctccgtctcagacctcgtcaactccctcaccagcgagatgctcatgcccactcaatgtgaagacaacaaagatgaagacttttatgatgatccacttccacttaatgaatactctggtgtctctgagggggacctgggaggactctcagctttcaacagatcaggcaggtactttgagaacatccccaagggtctagaccaggaaggctggactcgaggtggcatccagccccagatgccaggaggctacgccctcagccagccggtcagctgccatggaggccacccccaaccccatggagagcctgcggcacctgcatccccacgtgggaaggggaacacccctgcccagctactttcctaatgaaataaagagcattgaagcagagaagtgtgacatcactatcagggtggctggaaaaaggaggggtgagctggggcggtgtggaaacttctggatgcctgctcttagtgccgaagctgcagccgaggccaccaagaatatggaagctggagccggaagagccagttatatcagctcagcacggctggagcagccagaccccggggcggtggcagctgctgccatcctccgggccatcttggaggtcttgcagagctagggtgttgtgactgcctcccttggcctcagctcctctcactgctgtgctgaaggtggcctttgtcacttccttctgcccttccaaccctcacctttcccacggcctggccccattggcccaccctctaagttgagcaggaaatcctccaccaagcttccagaactacagacagcacccagagtgagctgggagtggggtccccattgcctctccagcaatgccctttccctttgcaggagggtggagtccctgggtcatgccctcccctgccagctctgggcttcagagataaggcattttccttgtgcagcctttacctggcaatcctaatttggttttaagactccctgtgaaatgctttccgcaccttaaccccagtgagcgtgaaaaagaaagttaataaactataatatcatggaagcaagaaaaaaaaaaaaaaaaaaa

SEQ ID NO: 157590 - DNA, 706 bp, Homo sapiens
  misc_feature (1)...(706): n = a,t,c or g
gtgtgtgtgtgtgtgtgtgtgtgtgtgtgtgtgtgtgtgtgttctgtacccactaggatttgtttaggtgcccattgcatctttttgtgctatggagttgtttacattaagcatgaccgaacgagagacaatactatttcccacaggagtccattgggttcagctttgaaagaggaatagaatcgaggctcctttgaccatcaaaatgatgaactttacttatgtggtacccaatgccagaatgtaagagttgcaagtgattttgtgctgctattcattaaaacttgtattccagtcttgccagcttaaggagatcaagatattaagaggtatccttgatttattttccagtattcagtagtaaaattttcctgtccactgtgaatcaaagcctgagtcactctatttaaccttgggacacactaataaggttttattttgattgtgttcctttccccccccccaatagtaaaaattttctcctcctttaactcctcctaccccccaagggtaaggaaacaaaaaacaaacaaacaaacaaaaataggaaggacaaaaggaaaggacatatggaaagggattgtaattgggcttaacaggaaacagtctggtaaaaacctaacagtgggtgncattctgttgtcngtgttgtgttatgtgggggtttttntcccaggtcnggcgggtatgacatttaccgttaata

SEQ ID NO: 157591 - DNA, 474 bp, Homo sapiens
accggactggcctgggggggacgtgggcgcggggcggcgtgcggcacgtgcagggctgaagcggcggcgcggtggggactgcacgtagcccggcgctcggcatggctctcctggtgctcggtctggtgagctgtaccttctttctggcagtgaatggtctgtattcctctagtgatgatgtgatcgaattaactccatcaaatttcaaccgagaagttattcagagtgagagccacaacagaggcttcagaccattttcttttcttgggagccagtggatttttccagcagtgaagggacattctctacactcagatgactctaccagtggcccttttaaccaagaagtagtacttgattggtcatttgaaaacactgcaacagtgaacttttgcatctcaagaaaacattgaaaaattctatgaattgttgtagccggtgaattgagtcgtattctgtcacataatattttga

SEQ ID NO: 157592 - DNA, 1890 bp, Homo sapiens
gaattcgggcgtgggcgcgggggcgcggcgtgcggcacgctgcagggctgaagcggcggcggcggtggggactgcacgtagcccggcgctcggcatggctctcctggtgctcggtctggtgagctgtaccttctttctggcagtgaatggtctgtattcctctagtgatgatgtgatcgaattaactccatcaaatttcaaccgagaagttattcagagtgatagtttgtggcttgtagaattctatgctccatggtgtggtcactgtcaaagattaacaccagaatggaagaaagcagcaactgcattaaaagatgttgtcaaagttggtgcagttgatgcagataagcatcattccctaggaggtcagtatggtgttcagggatttcctaccattaagatttttggatccaacaaaaacagaccagaagattaccaaggtggcagaactggtgaagccattgtagatgctgcgctgagtgctctgcgccagctcgtgaaggatcgcctcgggggacggagcggaggatacagttctggaaaacaaggcagaagtgatagttcaagtaagaaggatgtgattgagctgacagacgacagctttgataagaatgttctggacagtgaagatgtttggatggttgagttctatgctccttggtgtggacactgcaaaaacctagagccagagtgggctgccgcagcttcagaagtaaaagagcagacgaaaggaaaagtgaaactggcagctgtggatgctacagtcaatcaggttctggcctcccgatacgggattagaggatttcctacaatcaagatatttcagaaaggcgagtctcctgtggattatgacggtgggcggacaagatccgacatcgtgtcccgggcccttgatttgttttctgataacgccccacctcctgagctgcttgagattatcaacgaggacattgccaagaggacgtgtgaggagcaccagctctgtgttgtggctgtgctgccccatatccttgatactggagctgcaggcagaaattcttatctggaagttcttctgaagttggcagacaaatacaaaaagaaaatgtgggggtggctgtggacagaagctggagcccagtctgaacttgagaccgcgttggggattggagggtttgggtaccccgccatggccgccatcaatgcacgcaagatgaaatttgctctgctaaaaggctccttcagtgagcaaggcatcaacgagtttctcagggagctctcttttgggcgtggctccacggcacctgtaggaggcgggggttttccctaccatcgttgagagagagccttgggacggcagggatggcgagcttcccgtggaggatgacattgacctcagtgatgtgggagcttgatgacttaggggaaagatgagttgtgagagccacaacagaggctttcagaccattttcttttcttggggagccagtgggattttttccagcagtggaagggacattctctactttcttttcttgggagccagtggatttttccagcagtgaagggacattctctacactcagatgactctaccagtggccttttaaccaagaagtagtacttgattggtcatttgaaaacactgcaacagtgaacttttgcatctcaagaaaacattgaaaaattctatgaattgttgtagccggtgaattgagtcgtattctgtcacataatattttgaagaaaacttggctgtcgaaacatttttctctctgactgctgcttgaatgttcttggaggctgtttcttatgtatgggttttttttaatgtgatcccttcatttgaatattaatggctttttccattaaagaataaattggaaaaaagaaaaaaaaaaaaaggaattc

SEQ ID NO: 157593 - DNA, 1544 bp, Homo sapiens
gaagtttgtggactgcttaagtttgtgattgtcatagagtagtatttattaaatcatgaagtcagaatgtgaatatatctcctgtgatttttttttctaataatagggttgcttattctaacccattggtgccatagaatgggtagctagctttattattctatgagttgtttggtgaactctaaatatttgtgcccacagtatttctggctctggtttcccaacagccagattacaccaggtctggtatgtttcaagtactgatgtttatgcacatacgcaccccgctctctgccagcgcactggaaccagtcgcctcacttctgatatgctccctctgtacaggttcacagcagtcttagaaagctcgcaggcagcccatgttctagatcaactttgataattatttatgtatttaatttgtatttcagcaaatgctctgctatttttaaaagcttactgatagcaactgactttatctgatgcagggggcttagttgggaatgttgaatctggttgtaatgttgtccgtgattaaaaagataatgtcctcaaggtgtttctgaggaatgtagtgcagcaagagagaagaaatgcctctgcataaacaaagtaggcagactgttatttttaaagttgtttattcttctgcaccagcagtccattgtaaatgtgtgtgtgtgttttggtcatttttccctaagggagctctcttttgggcgtggctccacggcacctgtaggaggcggggctttccctaccatcgttgagagagagccttgggacggcagggatggcgaggtgagtgcccgggaggacagctgtgcggggcagcagatcctggtttactctcttgagcctgtgcatctctgcacctgggagtcaagtccttcccatcagacctcagccctgggtgcacccgtgggcctttttaagaggttcttctctgaagacccttcatcttccttatcacaagtttaaggtgctgcatggcatttgatactctttgacagccaagatacatttcagtagtaaggttgctttcccgaattattaccttaaagtgaacatttaacctggaattcatttactttaatcttagaaaaatagaaaatgatagctttgaaattagcacttatttctgtactgttgtgtcccaccctcctcaaaaggacacgttcaagtggcttccagtgttaaaatggtgagtgatgtgatgttgaaatgtttcacctgagttctgagcttttccatccgtataatcataggtacgaaggtcagggtaggagtcagactgaggagaacctggattgtagcaggagtagctccagagagtcgctcttccataaaatgagatgttgaccttccagggtgtccccttctgcagatctaacagtggctttctgtcgtctcccagcttcccgtggaggatgacattgacctcagtgatgtggagcttgatgacttagggaaagatgagttgtgagagccacaacagaggcttcagaccattttattttcttgggagccagtggatttttcca

SEQ ID NO: 157594 - DNA, 2063 bp, Homo sapiens
gtctgtattcctctagtgatgatgtgatcgaattaactccatcaaatttcaaccgagaagttattcagagtgatagtttgtggcttgtagaattctatgctccatggtgtggtcactgtcaaagattaacaccagaatggaagaaagcagcaactgcattaaaagatgttgtcaaagttggtgcagttgatgcagataagcatcattccctaggaggtcagtatggtgttcagggatttcctaccattaagatttttggatccaacaaaaacagaccagaagattaccaaggtggcagaactggtgaagccattgtagatgctgcgctgagtgctctgcgccagctcgtgaaggatcgcctcgggggacgaagcggaggatacagttctggaaaacaaggcagaagtgatagttcaagtaagaaggatgtgattgagctgacagacgacagctttgataagaatgttctggacagtgaagatgtttggatggttgagttctatgctccttggtgtggacactgcaaaaacctagagccagagtgggctgccgcagcttcagaagtaaaagagcagacgaaaggaagagtgaaactcggcagctgtggatgctacagtcaatcaggttctggcctcccgatacgggatgtagaggatttcctacaatcaagatatttcagaaaggcgagtctcctgtggattatgacggtgggcggacaagatccgacatcgtgtcccgggcccttgatttgttttctgataacgccccacctcctgagctgcttgagattatcaacgaggacattgccaagaggacgtgtgaggagcaccagctctgtgttgtggctgtgctgccccatatccttgatactggagctgcaggcagaaattcttatctgggaagttcttctgaagttggcagacaaatacaaaaagaaaatgtgggggtggctgtggacagaagctggagccccagtctgaacttgagaccgcgttgggggattggagggtttggggtaccccgccatggcccgccatcaatgcacgcaagatgaaatttgctctgctaaaaaggctccttcagtgagcaaggcatcaacgagtttctcagggagcttctcttttgggggtggctccaacggcaccctgtagggaggcgggggcttttccctacccatcgttgagagagagcccttgggacggccagggatgccgaggcttcccgtggggggatgaccattgaccctcagtagatgcggagccttgatgacttagggaaagatgagttgtgagagcccacaaccagaggcttcagaccattttcttttcttgggagcccagtggatttttcccagcagtgagagggacattctctacactcagatgactctaccagtgggccttttaaccaagaagtagtacttgattggtcattttgaaaacacttgcaacagtggaactttttgcatctcaaggaaaacattggaaaaattctatggaatttgtttgtagcccggttgaatttgagtccgtattctgttcacataattatttttgaaggaaaactttggctgttccgaaacatttttcctctctggactgctgccttgaatggttccttgggagggctgtttccttatgtatggggtttttttttaatgtgatcccctccatttgaataattaatggcttttttccgttaaagaataaaatattttggacaatgccgataaatgtaatgaagttagtatcacatcataaatcagagtgatgtgtacagtagatcatattttgagtgatcacagatgtcttcgtcgcacgagctttttaacaaaaccagactcttcttagatgggcactatgcacacacaagatttcatgaaccgggcagtggactgatctgccaaattgcttggcggactagtgccatataagactactggtacagctgggtccagtgtatgaccaatcggtagcagacagcgcggtccacgaagggtcgataggacatcgatattgttggaatagctggtttcttagaccagctaaaagctatcggtcttg

SEQ ID NO: 157595 - DNA, 695 bp, Homo sapiens
tttgccattagttacgtttaattttaaatataccatctttggcagcaaaaatcaagctgggctttccttctcctttataaattgcatatatttttaacatatattaacactttaaaaccgtggggtggaaagtttaaaatgccataaaataagaatcatatatgcattctttacactgtaaagcattttaccagacattagaatctgcattcagaattctttctcagaacgtaagtgttcttgaagacatatattttgtcttactaatctgtttcttccaagcactactgtactaggcatacggtaaagatatacattcaagttttaaaagtaaatactttttcctggtagtggccagggcctgcgttcctcagaccaaaaagccgcaaaactggcattgctgtgatttcagaagagaagtgaaatgtataaaacgaagtaattctggggaaggaaaatgtcacaatttttcttcagtgttgtcaggcacactaacccgggaagccgtctctgggcctgaactatccaaattagtgtccgaggaagtgtgacaaatgcaggcccttccaagtttgaccctgattctcaaagttggccaaaagccgtctctagaaacggcggtggcagcggcgtgattctgggaggtccattcaacttttaacaggtccttgggcagtgaccgggttgctgggcag

SEQ ID NO: 157596 - DNA, 874 bp, Homo sapiens
gagacagagtcttttctccatcatccaggctggaatgcattggcaccaacttgtttcactgcaacttctgcctcccaggttcaagcgattctcttgcctcagcctcccgagtagctgggattgcaggtgtgttccaccatgcccggctaattttggtatttttagtagagatggggtttctgccatgttggccaggctggtcttgaactcctgggcctcatgtgatctgcccaccttggcctctcaaagtgctggaatgacaggtgtgagccactgcacccaatcagaattcttttttattttgatagctttgactgctttgatagttctccatcaagggaaaccttacaccaacagtgtgaggcatcgcctagggaatttttgttaggaggatggcaaatcctcagatcccaatgcagacttacttgataagaaactctggggatagggcccaggaatttgagattttacataagctccccccggtgaatgcctgaaaaatcattgtaagaggattgttgaatagcaggcccatgtgccaaaggattttttccctggtaagtgcccagggcctgcgttcctcagaccaaaaggcgcaaactggcattgctgtgatttcagaagagaagtgaaatgtataaaacgaagtaattctggggaaggaaaatgtcacaatttttcttcagtgttgtcaggcacactaacccgggaagccgtctctgggcctgaactatccaaattagtgtccgaggaagtgtgacaaatgcagacccttccaagtttgaccctgattctcaaaggtggccaaaagccgtctctagaaacggcggtggcagcggcgtgattctgggaggtccattcaacttctcgtgcc

SEQ ID NO: 157597 - DNA, 828 bp, Homo sapiens
ctagcttgtgcacgaggattgagcatgtgagggaagaaaaagaccgtaatataaatagagggataaataatatcactaaggcatttgggagccttgagactgctgattaattcctatttctcatgtttattttttgttaggaagacaattgtcacttttattattggccacggaaacatgtattactctatatccccaagtcctagagcatgacctgcatgttggagatgttgtacagcaatgtatttatccagacatacatatatgatatttagagacacagtgattcttttgataacaccacacatagaacattataattacacacaaatttatggtaaaagaattaatatgctgtctggtgctgctgttattgactacagtgttgtacagaatttatcatggattattgactgccgagaaagggacagtggaatttagccataccaaggactatactggaaacagacttctgctgctgaatgtgccctgatgtgaccaggttgcacttggaagagatcctccgcgtcttcatgaggcacttaaagcttataaaagaactgcggctggaactcatctggtgctccccatgagagtgctctgcttgtagactggccagtgtccatgaaacaactgtaaataccaacatgtgtgcatgggtcaacagtcttggccatttctcatcaaaagaagccaaattcatgatcaacatctctgaagtttcaagtaaggcccacacttctttgaattactcttcatgggcccacattaggttgtgctgtgaattacttaaggcagtgatactgatgtagtatagttttgtcttaa

SEQ ID NO: 157598 - DNA, 2358 bp, Homo sapiens; identical to SEQ ID NO: 150777

SEQ ID NO: 157599 - DNA, 957 bp, Homo sapiens
cgcgtcgacttttttttttttttttttttgagatggagtttcgctcttgattgcccaggctggatggagtgcaatggtgcgatctcggctcattgcaacctctgcctcccaggttcaagcaattctcctgcctcagcctcccgagtagctgggattacaggcatgcgccaccacgcccggctaattttgtatttttagtagagatggggtttctccatgttggtcaggctggtctcgaactcctgacctcaggtgatcctcctgcctcggcctcccaaagtgctgggattaccagcgtgagccaccgcgcccggccattactacatattcttaaccaaccgagataagaaataataaaagttgtacataagggaggcagacaatttgttttggggtattctgatgagtggtatagctatgtcacagcagattggggtgacatttgaggatcatgcagaagccttgaaccacccagcgtctctgcagttctcctttcccaagtatattatctgcccgctgcttgctggtttccatcttcgtttattcagttgagcccacaaataattgtatgcctattacataccaggtttctgtattatgtacaggaaatgaagaagataaagaagagacagccctcttcccatatttaatggcatatactgccctcattttagtttccttcctcctgttcataatttcattgtttgtttttgcatcagttcaaactgttgcttgcttatgtgaggtgacctcaaagtgactttttgaaagtcctgaccctttgcctttcaacatcatttaagaacagcaatagcatctggatcttctcagtaaaatgccttttcaacagctcaaagcaaggattgtttttgttttaatttgggaatgtttcaagtgaaacttagttccatcatttcctcgtgccaagcttggcgtaagcgtctaaagatgtcattg

SEQ ID NO: 157600 - DNA, 492 bp, Homo sapiens
gcggccgcagaccccgggcggggaggaaaggccggcgggacccaggcccgggaggcccccgcctagagaggggcaccagggagggtgagggaggccaggcgcgtggcccctggagagttcctctgcagacggtttggagtgaggacggggcccagggagatggcatggaccgtgcctttcatttcaggagacgtggttgtaccagttgcaaactgtggggtccaggaatacaactcgaaccccaaagagcatgtgactctcagagactacatcacctactggaaagagtacatacaggcgggctactcctctcccaggggctgtctctacctcaaagactggcacttgtgcaggtaatggggctagggaaggcagcgctgcgtgaacccagaggcctttctgatgaaggtggcccctgggtgcacaacggagctatttttccccgtgaggcactttaatcagtttaaaagaaactggattgtcttccgcatg

SEQ ID NO: 157601 - DNA, 549 bp, Homo sapiens; identical to SEQ ID NO: 148925

SEQ ID NO: 157602 - DNA, 1216 bp, Homo sapiens
tcagtcccctgtggccctgggcaaggctggtccttctctgctcagccgggtgctgtcagggagggtgagcttgtcaggatcatttgggggttgataggctggcgggggtggcatcttggaggtggcatctctcctgcctgcctgccccatcaggagctggcactgcagctgcactctccctgcctgtttcctgacatcctcgtaaatgacggctgcaccagacgtaggggagctgcgtgtgctgcagacaagcctgccagccctttctgaggcagatacccaggaactaacccaggtaagatgtccccagtgccatgccagccagcgctgtgtcccagtcttcccgcaggctgctcctcttgcctttctgatcacaaacaagctctgggtcatccatccgtattggcctcgcaccaaggaggagctgctggcctccactcggcagctgttaattgcaatggtggccatgtagttggagaggccctcaagtgtccacacatcagactctcctgtcacgtgtggcgtgttcttcacctcaaagcccgggagcgttggggaggtggtcaggtgactgcacaagtgccagtctttgaggtagagacagcccctgggagaggagtagcccgcctgtatgtacttctttccagtaggtgatgtagtctctgagagtcatgtgctcctttggggttcgagttgtattcctggaccccacagtttgcaactggtacaaccacgtctccgtaggtccgtagcaggtggtcgaagtcgggcctccccgcgggcgtcacccaagcgccgccggctgccccagccctgcgtgaaggcgctggaaaacacgcagggcaggttgggcagcaagaagccccgcacaaagtcggcgtaggagaaggcgcccggctccgagacgaaggctacccggcccggagcctggccgacgccggggacatcgacccccaggcctcggaagtggctgtcggcgagggcgcgcgtctcgcggtccatccagctcagcacgggtcgaaggaccctcctcctcacttccgccggagcggaaacggtgaggaccagcctcggaaccagaagacgcagggcgccgcgtttctgccccaccagcgcctggggctccgggcctgcacgcatgcgcgcggctcgccgcggtcttcactgcgcaggcgccgagcggccgaggcagcgcggtcggctctgggactcgtct

SEQ ID NO: 157603 - DNA, 1778 bp, Homo sapiens; identical to SEQ ID NO: 123095

SEQ ID NO: 157604 - DNA, 1137 bp, Homo sapiens
  misc_feature (1)...(1137): n = a,t,c or g
ggcacgagtgatcactgggctgaccgctttgaggacctgcccctctatttcatgactttccatggacagcaaagcatcaggactgtaatagatacaatgcaacatgcaggtctacggtctatgacatttgtcatgtgatcatcgacaacctgcagttcatgatgggtcacgagcagctgtccacagacaggatcgcagctcaagactacatcatcggggtctttcggaagtttgcaacagacaataactgccatgtgacactggtcattcacccccggaaagaggatgatgacaaggaactgcagacagcgtccatttttgggctcagccaaaggcaagccagggnaggcagacaatgttcttgatcctgcagggacagggaagctgggtaaccggggccaggggaaacggtattttgcaggtgttcccaaggaaccgttttgatgggagatgtagggtgtcttcccgcttgagttcaacaagaactccctcaccttctccattccaccaaagaacaaggcccggctcaagaagatcaaggatgacactggaccagtggccaaaaagccctcttctggcaaaaagggggctacgacacagaactctgagatttgctcaggccaggcccccactcccgaccagccagacacctccaagcgttcaaagtgaaggccgtgcagagctggtctctgaaatgagcttgataggataggctggagcataaacctctgcaagggctcctctatcctgtggtcctgagctgtgtgcccttctcagtatgaggggcctaacctagagcaggtttccatagtgagaaaattcaatgtagcagactactgagaaactactgtgttgctcaggctttgtttgaggtcctgtatatacagccctgaaaagagagataaagtccctgcatgcatgcattctggcggaagagacaagcaagcaatgaacaaattagcagaaaacctagttttagtgaaaaatgctgtaaagaaaatagaaatgcgatagagtgctggcaggctagtgtagataagtggtctgaaaaggtgtctctgagccgagggcatgtgagctggggcctaaacaactagaaggagagagccacgtgaacatccggcgaaggggacccag

SEQ ID NO: 157605 - DNA, 450 bp, Homo sapiens; identical to SEQ ID NO: 149401
  misc_feature (1)...(450): n = a,t,c or g

SEQ ID NO: 157606 - DNA, 336 bp, Homo sapiens; identical to SEQ ID NO: 147991

SEQ ID NO: 157607 - DNA, 671 bp, Homo sapiens; identical to SEQ ID NO: 149403

SEQ ID NO: 157608 - DNA, 412 bp, Homo sapiens; identical to SEQ ID NO: 129735

SEQ ID NO: 157609 - DNA, 596 bp, Homo sapiens; identical to SEQ ID NO: 149529

SEQ ID NO: 157610 - DNA, 1065 bp, Homo sapiens
atggctcccagcgtgccagcggcagaacccgagtatcctaaaggcatccaggccgtgctgctggggcctcccggggacggtaaaggcacccaggcacccatattggctgaaaacttctgtgtctgccattcggctactggggacaggctgagggccatggtggcttctggctcagagctagaaaaaaagctgaacgcaactatggatgctgggaaactggcagaaatgctcgatgacctcatggagaagaggaaaaagaagcttgattctgtgattgaattcagcatcccagactctctgctgatgattttagagtcaactgtgagacagagcctgccatgtgcacgcagtagagaacgacatccatgggctctgcgagctgcagctggagacagagatccaggctttcaaggaggagctgctcttatgaagaagaaccatgaagaggaagtaaaaggcctacaagcccagattgccagctctgggttgactgtggtggtagatgcccccatatctcaggacttcgccaagatcatggcagacatctgggcccaatatgacgaggtggctcagaagaacagagaggagctggacaataacaggtctcagcagattgaggagagcaccacagtggtcaccacacagtccaccgaggttggagctgctaaggcgatgctcacagagctgacacgtacagtccagttcttggagatcaacctagactccatgagaaatctgaaggccagtttggagaacagcctgagggaggtagtggcccgctatgccctgcagatggagcagctcaatgggatcctgctacacctggagtcagagctggcacaaacctgggcagagggacagtgccaggcccaggagtaccaggccctgctgaacatcaaggtcaagctggaggctgcgatcgccacctaccgccgcctgctggaagatggcaaggacttcaatcttggtgataccctggactgcagcaactccatgcaaaccatccaaaagaccaccacccgccagatagacccgccagatagtggatggcaaagtggtgtctga

SEQ ID NO: 157611 - DNA, 846 bp, Homo sapiens
gcagaaatgctcgatgacctcatggagaagaggaaaaagaagcttgattctgtgattgaattcagcatcccagactctctgctgatgattttagagtcaactgtgagacagagcctgccatgtgcacgcagtagagaacgacatccatgggctctgcgagctgcagctggagacagagatccaggctttcaaggaggagctgctcttatgaagaagaaccatgaagaggaagtaaaaggcctacaagcccagattgccagctctgggttgactgtggtggtagatgcccccatatctcaggacttcgccaagatcatggcagacatctgggcccaatatgacgaggtggctcagaagaacagagaggagctggacaataacaggtctcagcagattgaggagagcaccacagtggtcaccacacagtccaccgaggttggagctgctaaggcgatgctcacagagctgacacgtacagtccagttcttggagatcaacctagactccatgagaaatctgaaggccagtttggagaacagcctgagggaggtagtggcccgctatgccctgcagatggagcagctcaatgggatcctgctacacctggagtcagagctggcacaaacctgggcagagggacagtgccaggcccaggagtaccaggccctgctgaacatcaaggtcaagctggaggctgcgatcgccacctaccgccgcctgctggaagatggcaaggacttcaatcttggtgataccctggactgcagcaactccatgcaaaccatccaaaagaccaccacccgccagatagacccgccagatagtggatggcaaagtggtgtctga

SEQ ID NO: 157612 - DNA, 928 bp, Homo sapiens
ggcgtgcgaactggtggcagtgagagacttcggcggacatggctcccagcgtgccagcggcagaacccgagtatcctaaaggcatccgggccgtgctgctggggcctcccggggccggtaaagggacccaggcacccagattggctgaaaacttctgtgtctgccatttagctactggggacatgctgagggccatggtggcttctggctcagagctaggaaaaaagctgaaggcaaactatgaatgctgggaaactggtgagtgatgaaatggtagtggagctcattgagaagaatttggagaccccccttgtggcaaaaatggttttcttctggatggcttccctcgggactgtggaggcaggcagaaatgcttcgatggacctcatggagaagaggaaagagaagcttgattctgtgattgaattcagcatcccagaactctctgctggatccgaaggaatcacaggaaggctgattcaccccaagagtggccgttcctaccacgaggagttcaaccctccaaaagagcccatgaaagatgacatcaccggggaacccttgatccgtcggattagatgataatgaaaaggccttgaatatccgcctgcaagcctaccacactcaaaccaccccactcatagaagtactacaggaaacgggggatccactccgccatcgatgcatcccagacccccgatgtcgtgttcgcaagcatcctagcagccttctcctaagccacatgtaaagacttggttatgtttatctaatgttgggtccaagaaggaatttctttccatccctgtgaggcaatgggtgggaatgataggacaggcaaagagaagcttccttcaggctagcaaaaatatcatttgatgtatatggattaaaaaagcacttacttgatgtataaaaaaaaaaaaaaaaa

SEQ ID NO: 157613 - DNA, 1460 bp, Homo sapiens
tcgtccgcaaagcctgagtcctgtcctttctctctccccggacagcatgagcttcaccactcgctccaccttctccaccaactaccggtccctgggctctgtccaggcgcccagctacggcgcccggccggtcagcagcgcggccagcgtctatgcaggcgctgggggctctggttcccggatctccgtgtcccgctccaccagcttcaggggcggcatggggtccgggggcctggccaccgggatagccgggggtctggcaggaatgggaggcatccagaacgagaaggagaccatgcaaagcctgaacgaccgcctggcctcttacctggacagagtgaggagcctggagaccgagaaccggaggctggagagcaaaatccgggagcacttggagaagaagggaccccaggtcagagactggagccattacttcaagatcatcgaggacctgagggctcagatcttcgcaaatactgtggacaatgcccgcatcgttctgcagattgacaatgcccgtcttgctgctgatgactttagagtcaagtatgagacagagctggccatgcgccagtctgtggagaacgacatccatgggctccgcaaggtcattgatgacaccaatatcacacgactgcagctggagacagagatcgaggctctcaaggaggagctgctcttcatgaagaagaaccacgaagaggaagtaaaaggcctacaagcccagattgccagctctgggttgaccgtggaggtagatgcccccaaatctcaggacctcgccaagatcatggcagacatccgggcccaatatgacgagctggctcggaagaaccgagaggagctagacaagtactggtctcagcagattgaggagagcaccacagtggtcaccacacagtctgctgaggttggagctgctgagacgacgctcacagagctgagacgtacagtccaggtctttggagattcgacctggacttccatgagaaatctgaaggccaagcttggagaacagccttgagggaggtggaggcccccgtacgcccttacagatggagcagcttcaacgggaatcctgctgcaccttgagtcagagctggcacagaccccgggcagagggacagcgccaggcccaggagtatgaggccctgcatgaacatcaaggtcaagcctggaggctgagatcgccacctaccgccgcctgctggaagatggcgaggactttaatttttggtgatgccttggacagcagcaactccatgcaaaccatccaaaagaccaccaccccgcccggataagttggattgggcaaagtggtgtcttgagaccaattgacacccaaagttcttgaaggcatttaagcccagcaagaagcaagggtacccttttggggaagcaaggaaggccaataaaaagtttcagagttcaaaaaaaaaaaaaagaaaaagaaagttttg

SEQ ID NO: 157614 - DNA, 399 bp, Homo sapiens; identical to SEQ ID NO: 122527

SEQ ID NO: 157615 - DNA, 388 bp, Homo sapiens; identical to SEQ ID NO: 149552

SEQ ID NO: 157616 - DNA, 1870 bp, Homo sapiens; identical to SEQ ID NO: 149553

SEQ ID NO: 157617 - DNA, 410 bp, Homo sapiens; identical to SEQ ID NO: 149578
  misc_feature (1)...(410): n = a,t,c or g

SEQ ID NO: 157618 - DNA, 451 bp, Homo sapiens; identical to SEQ ID NO: 149579

SEQ ID NO: 157619 - DNA, 1449 bp, Homo sapiens; identical to SEQ ID NO: 149580
  misc_feature (1)...(1449): n = a,t,c or g

SEQ ID NO: 157620 - DNA, 1856 bp, Homo sapiens
ccctccaggctcagagccagactgcgcctggaccttcttgttctgactccacgtgcctgcccggcctccagggtgcgggggcgcctttcttgcaggcggaccctgcccaggatggggccagcctcgtgctcagctttggccacaaatgcagcccctggcccaccccaccctgccggccctgccttctccagtatttcccacatggccacgactcctcagtcactagagcctcctgctgggaacagtgtcccccagagcctcatgtctatcctagaccctgcaagcagctgggtccccaagagtgcatctccccctagagttgcctgcccatgcccacctgctttgtaaccttcccaggagattcatgcttgctctgcacagcagggcttcgagggccagggcatgacacggaactgcctcaggtttgggtcagacctgcatcctggggcatctgctgaaatgtgagcacacaaaccacctcctttggcccagaagccccccaggcctagcatctcagtgccccaaccctctgcccagctgtggtatccagcaggtccttgggtccccacttgagcaggcacttggctgggatatggagcaatttaaagcccacaggggttgttcagtttctatgaaatggagcatggggtgcctgctagcctcaatcccccgaagtgggagcctcatgatagagtatagcttgggggtgggaggtgaggaaaatctgaggtacccaggggaacccccagcttaactggtctcttcagaggagtcccccagggcccgccagctatcacagggactcagaaacacccatttcctaatgacatggtgagtttcttgatttcttttttttgtttgttttgttttggttttcaacttggctgaccccgggtctatgatctattcacatcgaacccctgactggtctgcctgggtgccaggggtgagcgtgaccgtgagtgttgctttcgacagctggctcagcacacgctgtgtgatagggatctgagcttgttcatctccagtcgtgacttcatttcccttccttctgtcctcctcctgttcttgccttggacctgcaggtgtgcagacccgctctctctgccttccttgcatgtgggccaccagccatccctggatcttggtccccagagggcccagtcagcctgtggatgggtgtgaggggggttgtcccactgtgtgggttatccctttacccagcactttaaaacttggccaggagagggccagggcaacccttcacagggaagatggggagggcaccccaactccccacaagccatgcaaccaccaagttaggaaattgggggtcttgccccaaggtggggtgaagaccaaaattgaagttggattttgggggccaacaaggctaaggcaggagagacaaggggttaggttgggagggtcccccaatccctggcttgaccccagtgtgtttccccggagatgcttccttagctgagtgggaccccgggcaggagttggggacagtgctgtcccccacccctgcacacagccaggccctcaggctctgcggtcactcgcctccctgctggtcactggtcattggtctggagttatattttgatgccatgaagacactgtttatatctaatgtttatatattttaaagatttgtgccaagagagtatatttaataaaaacttaaatgacttcttctcctgctcctggctcttctttggctctgaccgcccccccatcttcccccatgaacccccaaacagggttgaagtgcttttgacacatttgtgataaaagttctgaataaaagtcttgaataaagaagtttttaaatgcaaaaaaaaaaaaaa

SEQ ID NO: 157621 - DNA, 496 bp, Homo sapiens
tgaaacagacgcacagagaggctgggaaggtggtgcccatgcacaggggcctggccagctcctgtgaaccttgcaaagctggcaccgtccctgactcagagcaagtggggagcgggtgtgttccccttgcccagtccatggccccacctggtcctgcgtggagggcggggcatcacatgaagaagatctgagaatccacgtccagggccattttttggttcttttttcaaacggtttggaacaaaccggggctggtccagaagggatgatgacccaggtggcccggggtctggatcccgatggcctcctgctcctcgacgtggtggtcaatggcgttgtccccgagagcctggctgacgcagatcttcaagtgcaggtcgggggtcaagcccgtgcgcgctgcggcaccgcgccaccaaagcgtcttcgtcttgctcatcgccgtgtccccctacccctactaaacgggagagggcattggcggccgcctcgtgcc

SEQ ID NO: 157622 - DNA, 514 bp, Homo sapiens
cgtcggtccccaagcgggaagaactgcagggacatcaccgagtgcgaggaggagagcatcgagtgtggacccgccaagatgtgcttcaacaccggttgccagctaccagtgtgtggacacaccctgtcctgccacctacggcaagggccccagccctgggacgtgcttccggcgctgctcgcaggactgcggcacgggcggcccctctacgctgcagtaccggctgctgccgctgcccctgggcgtgcgcgccccaccacgacgtggcccgcctcaccgccttctccgaggtcggcgtccccgccaaccgcaccgagctcagcatgctggagcccgacccccgcagccccttcgcgctgcgtccgctgcgcgcgggccttggcgcggtctacacccgttcgcgcgctcacccgcgccggcctctaccggctcacctgtgcgtgctgcggcaccgcgccaccaaagcgtcttcgtcttgctcatcgccgtgtccccctacccctactaaacggga

SEQ ID NO: 157623 - DNA, 324 bp, Homo sapiens
cggcggggggttcaggccgttattcccgcccctttggaggcccaagccagttggtccccctagggttgaaatttttggcccggcttgcccaccttgggaaaaccccttttcacttaaaattccaaatttacccggggttgttgggccatcggattattcccggttcttcggagggtttggccagaaaattgcctttaacccggaagggaaggttccgttaacccaaattcccgcccttgccttccttcttgggcaaaaaaagggaaatccgtttcccaaaaaaaaccaaaaaaaagatctttattaattcttccagctcgtgcc

SEQ ID NO: 157624 - DNA, 344 bp, Homo sapiens
aggaaaggcagaaacttcattacaaatattctaagcagtttctgactttgtttcaagattggaacacgaacagtgaaggctgaggaaccagaggaacaaaaactagctacaatgtttcgagagcaacaaaagagttgtctataagctagaatggttcagagacagagacactgaaacaaattaaactgaaatcagcaattcctacggagtttggaggacctagaagagaatcagagttcatcttactgatgaacaaagtgaccttagaaaagaaatggccaggttgcaaacaaaacttatgaaggaaactctgcagcaagacttggcacttattcactcgtgcc

SEQ ID NO: 157625 - DNA, 319 bp, Homo sapiens
tatatatatatatatttatgtatttataacatagaaaattggatagaaattattccaggcatatgggatgtggttcccctgggcatgcacacttggagggcaggggctttcaggagtcacaccagatcacgcttgggacctttttagagcctggctgagccacctttccagagttccagtgagcagggggcccctcagtgcatcttccccacctcccctgcttccagggacgctgggctgcagacttcgcagctgctgccacatggggttggagcctccaacagcatcatccctgagtagacctggtccactgagcccc

SEQ ID NO: 157626 - DNA, 945 bp, Homo sapiens
tttttttttttttttataggcatatatatatatatatatatttatgtatttataacatagaaaattggatagaaattattccaggcatatgggatgtggttcccctgggccagaaccacgtagggcagaggagccctgccctccaagtgtgcatgcccaccaaagagacaggggctttcaggagtcacaccagatcacgcttgggacctttttagagcctggctgagccaccctttccagagttccagtgagcagggggcccctcagtgcatcttccccacctcccctgtcttccagggacgctgggctgcagacttcgcagctgctgccacatggggttggagcctccaacagcatcatccctgagttagacctgggtccactgagtcccacaggtcggctctctgcagcctttccctgcaggtcaccaccctctacaggcaatggcaaggacgcgacatcacaggtagacagcccacatcctctcatccttccggtctcctggactggagttgtcccggtgccctggagacccagtcactgccacctctccacatgaatggactcagcaggggaaggactggaggccctgctcctgccctttggttatgcaagcacccccgaccagccatatatttcttcctcccccttcaagatcatccctgagaagacctcgagccccgagtgggtgcccttggggctgtcttgggagcctccagcaggcccctgggccactccactggcaggactaccgtcctggagtgagggtgaggcttcccgggtagggcgtgcttccaccagcctctcgagggtccggttgagggcctccacgccatcggccagacgctggctctgaacggccagccgctgcagcagcaggttttgctgggccatgagtgtgctcgaattcctccgcacttcctagcgtctacgagggtcttctat

SEQ ID NO: 157627 - DNA, 360 bp, Homo sapiens
  misc_feature (1)...(360): n = a,t,c or g
gccaaacctccctcggtcgccgtgttctccgcaagcctcctgcagcgcccgcctgccaatgtgaggctggcaccaggctgnagctccccaatcccagcccactttgctgtgtctctggcgggctgtcctccttggtgggagctgtcctgcacactgtaggatgcttaaaggtatcccttgcctccacccacccctagccagcagctcccagtcagacaacagccagaaatgtctccagactctgcccagcctccccaggtagccaccctcgagacacgacctcagagtctctgtgtctcctagaagcctgacagagacccccagggcagtnggttggtggcgggntagagacccttgcct

SEQ ID NO: 157628 - DNA, 1007 bp, Homo sapiens
tttttttttttctttttgaatagtttaatagttattaatttaaattaaggcttttggcgtgcttttcccacattttttaggtttttttctctatgtgtacacctttgcaagatgtatcattaacttcatgaaacccccaagctcctcaggccacgaaaaaggagggtagaaagaacgccagaaagggtgggtctgtgtgttctggggtgccgtggggcccgcccccgaggaaggtgccaaccgttccctggagagcagaatcaccagggcctggggaaagccatgcggggttcgagagcctgcgccatggccatgctggggcagggccaaaggggatgcccaggcgtctgcccactgagaacactgttagtgcggagggatccacaggaggggagagcggcgccagggtcccggacacaggcaagggtctctagcccgccacccacccactgccctgggggtctctgtcaggcttctaggagacacagagactctgaggtcatgtctcgagggtggctacctggggaggctgggcagagtctggagacatttctggctgttgtctgactgggagctgctggctagggatgggtggaggccagggatacctttaagcatcctacagtgtgcaggacagctcccaccaaggaggacagcccgccagagacacagcaaagtggtgctgggattggggaggctgcagtctggtgccagcctcacattggcaggcgggcgctgcaggaggcttgcggagaacacggcgaccgagggaggtttggcgggaaccacgcggaacagatcgtggtgggaatgaggctgcgcctactaacaataaccccacccaccctgacggccacaccagcctgtgaggaggacagggccgagcccgctggcaggtggggaaactgaggcccagagagcagcgagcctggtctggacccaggcccaccccaccctcccaccagctggtgtggactcttcttaaggagcttcaggctccacagtgg

SEQ ID NO: 157629 - DNA, 348 bp, Homo sapiens
ctcgtttgggcccgcttgttgggttccgttggtaattcccgcccctttggagtcttaaaccgggctgtccccgggttcagagattggagcccttcctggtaacctggtttaagccccttttttctttaaccccaaaaatttacccggggctgttgggcccgcccggtgtcccccctttttgggggggttaagccaggggattggggggaccccggagttcggaatttccgttagtgggccttgggcccctggccttccgccttggcaccaagttaggccctgttttcaaaaaaaaccaagaaagcaaaaaaaagacttcagtgtagataaaatggcttaactcgtgcc

SEQ ID NO: 157630 - DNA, 396 bp, Homo sapiens
  misc_feature (1)...(396): n = a,t,c or g
aaacactaaggaaaaaattctttcagccaggaaaaacaaccaggttttccccccacacacccnnnnnnnnnnttttttccccaaaaaaaggaaaaactttagggagggaatccccccaaatttcccccccccaaaaaaaagccccccccaaaaaaaccacccaccccnnnnnnnnnnnccccccaaagnnnnnnnnnnnncaatcgcacgcccccccaaaaaaagggccccccccggagcctttaaaaaaaaaccccccccnnnnnnnnnnnnatcgtctttgtgcatttcgtatagttttatatattttttttctctaataaatttannnnnnnnnnnnnnnnnnnnccatgattcaactgtttactaatcagaaagggcggccgtcggtctaga

SEQ ID NO: 157631 - DNA, 1192 bp, Homo sapiens
aggtaccggtccggaatcccgggtcgacgcacgcgtgcgggtgaaaccccgtctctactaaaaatacaacagccaggtgtgatggtgcacgctcgtgatcccggctactcaggaggctgaggcaagaaaatcgcttgaacccggaaggcagaggttgcagtgagctgagattgtgccactgcacgccagcctgggcaagagagtaagactctctctcaaaaaaaaaaaaaaaagaatttaaaatcccaatttattttctaactcttttatgggatgtatttagaacacagtatacctatagtatacctatgtgtttattatgtggggaaatggtaactgacatttaattattagaagtacttacccctgccttcctccatttttattcatggctacttgagaaagcaaaaggaaaaaataatagttatcagtagtgtcactggaaagaagagaggagggacaaaactgagcagcagaattcgtatagacatttacgtttaaattctaaaagcccaattgagatgttcagggagggtttgttttgccctttggcctcatgaatgggtttcatgaatgggcttcagtggcttataaactctgtaaaattctattctaaattttgtacatttattttgttccggttaattccagaagacatttcaaacatttttcttacaccatataataaaaatacttaactaaattgacagttataaaaataaatcagtgaaatgtaccttatactttaataaaaaatgttttcagaaatagataagtgaaagctgagtgtttctttgataggttcccctgtactataggagtgataattgcagctattgcaatagtagtaattgttaaatggatactaatgaatagcatagcatagtgggtaagagtttatatagcacaggctctaggaatcagattaaggtaggttcaaataccagttctgccagtaactggttttagaaccttgggcaagttaaaggaatgtctcccagcctcagtttccctatttgtaaaatggaaataatggtagctacctcaaacctcattacgaattcaatgagttaaacttgaaaagacttattacagtagctggcccactaatgacttgatagtagtttatatggatgctatctcatattagcatatatggaattaatagtgtatcactatactttttttttct

SEQ ID NO: 157632 - DNA, 441 bp, Homo sapiens
  misc_feature (1)...(441): n = a,t,c or g
caagttcaggatcgagatcagaatgcaggtttttgccacttctattcaatgtagtactagaaattctagctggagcaattaggcaaaaaaagaaaaaaaggcattcacattggaaaggtcaaagtatcaataaaattgacagaggtaatcaacaagttcatcaaagtagcatgatacaaaatcaacacaaaaatcagttgtgtgtttatacactaacaatgaacaattggaaaagaaatttaaaattnnnnnnnnnnnnnnnnnnnnnnnnnnnnnnnnnnnnnnnnntaatcactgaggcaaagacttgtataatgaaaacctcaaaacattgctgaaagagatgaaagaaaacaaatggatcaatatcccatgttcatggattagaagacttaataatgttaacatttcgatactatccaaagtgacctacaaattcag

SEQ ID NO: 157633 - DNA, 318 bp, Homo sapiens
  misc_feature (1)...(318): n = a,t,c or g
ncactatcaattgcgtggatataactgacatctatagactacttcatccatcaacagcagactgcacattctgtccaagctcgaatggaatatttaccaacataggccacattctgggtaataacacacattaacaaatttataagtatagagttcatataatgtctactatcagaccacagaattaaactagaaataaataacaaaacataggaaaattccaaagtacttatgaataaacacattaatcaaagagaaatgtgaagagcaattttaaaatactgtaaattaaaatccaaatacaatttaacacttctg

SEQ ID NO: 157634 - DNA, 88 bp, Homo sapiens
ccgccatcttcttcctgcctgatgaggggaaactacagcacctggaaaatgaactcacccacgatatcatcaccaagttcctgggaaa

SEQ ID NO: 157635 - DNA, 1064 bp, Homo sapiens
gacaatgccgtcttctgtctcgtggggcatcctcctgctggcaggcctgtgctgcctggtccctgtctccctggctgaggatccccagggagatgctgcccagaagacagatacatcccaccatgatcaggatcacccaaccttcaacaagatcacccccaacctggctgagttcgccttcagcctataccgccagctggcacaccagtccaacagcaccaatatcttcttctccccagtgagcatcgctacagcctttgcaatgctctccctggggaccaaggctgacactcacgatgaaatcctggagggcctgaatttcaacctcacggagattccggaggctcagatccatgaaggcttccaggaactcctccgtaccctcaaccagccagacagccagctccagctgaccaccggcaatggcctgttcctcagcgagggcctgaagctagtggataagtttttggaggatgttaaaaagttgtaccactcagaagccttcactgtcaacttcggggacaccgaagaggccaagaaacagatcaactgattacttggagaagggtactcaagggaaaattgtggatttggtcaaggagctttgacagagacacagtttttgctctggtgaattacatcttctttaaaggcaaatgggagagaccctttgaagttaaggacaccggaggaagaggacttccacgtggaccagggcgaccaccgtggaaggtgccctatgaattgaagcgttttaggcatgtttaaccatccagcacctggaagaagctgttccagctggggtgctgcttgatgaaaataccttgtgcaatgccacccgccatcttctttcctgccttgatggagggggaaacttacagcacctggggaaaattgaacttcaccccacgattattcattcaccaagtttcctgggggaaattgaaggacaggaaggtcttgcccagctttacattttacccaaattgttcctttattgggaacctatggattcttgaagagcgtcctggggttcaactggggcattcattaaggtctttcag

SEQ ID NO: 157636 - DNA, 374 bp, Homo sapiens
cagagacccacccggaccgggccccgcgatcacagcaagagagcgaaaatgtgccaagcatgccttcattacatcagacaatagtgacacacctgaagctctgagtcgtactggctcaactaacgctagaggagcctacacattgccatgctaaccctgacctgatctttgaagatatggaagccatgacagacttggaactacatgaactttgtcaacaggaccgacacattaataactttcagttagacatggacttgattttagattctggaaaatttcaagttgtaggatgcatcttgtctgaattgaaacagaaggattcatctaattgatgagtttaataccgatatggatatctttgtgccactgct

SEQ ID NO: 157637 - DNA, 418 bp, Homo sapiens
ttgaggcggagttttgctctgtcgcccaggctggagtgcagtggtgggatctcagctcactgcaacctctgcctcccgggcccatgccatttccccgcctcagcctcccgagtagctgtgaccacaggcgcccgcgaccactcccggccaattttttgtatttctagtagagacggggcttcaccgtgttagccaggatggtctcgatctcctgaccttgtgatccgcccgcctcggcctcccaaagtgctgggatcacaggcgtgagacaccgcacccagcccccaagatacgtttttatgtgaaaaaaaaaacaagctgaacaactcatagtgattctgcttacgtaaacaatgtctatgtatctgtacacatgtcctatgtcaatgcttaggaaaagatctggaagaatgtctgc

SEQ ID NO: 157638 - DNA, 331 bp, Homo sapiens
  misc_feature (1)...(331): n = a,t,c or g
tgagactataggcgtgagccaccacactcggcttattttattttannnnnnnnnngcnnnnnnnnnnnnnnnnnnnnnnnnnnnnnnnnnnnnnnnnnnnnnnnnnnnnnnnnnnnnnnnnnnnnnnnnnnnnnnnnnnnnnnnnnnnnnnnnnncagcccttaatattaagatgtctaccacccagatccatctacagattcaattcaatccctatcaaaatccaagtgacctttttctggagaaaaagaaaaatctctcctgaaattcatacagaatctcaagggaccctgaataaccaaaactatcctgagaaagaagaaagttgacg

SEQ ID NO: 157639 - DNA, 269 bp, Homo sapiens
  misc_feature (1)...(269): n = a,t,c or g
gnnnnnnnnnnnnnnnnnnnnnnnnnnnnnnnnnnnnnnnnnnnnnntattcagaaatataaagcatcaaagggattataatgaacaataatatggcaaaaactagataatccagaagatatgaacaaattctaagaaacacgctatacctagcaaatctgcatcaagaagaaataggaatgctgaacagaccagtaacaaataaggtgctttaattagtgattaaaattcccctaacaaagaaaagcccagaaccagatggctttgtg

SEQ ID NO: 157640 - DNA, 1046 bp, Homo sapiens
tttttttttttttttttgtacattcgtttttattgtcctgcagtgggatgaataagtttctaatatacaaatttccccctcctcatacatggaaaagaaactgacagaggtcccaaatcagtttcctggcagccccagaattcccaaggtaactgaccaaagtctcctgccttctgtcctcatcgctgatctgtttgtatgagcaacgtggggcaacccctcgcttggttgcttgggacagccgcccacagacctcagctccagggaaggcactagggggtcactgagggctggacagcaacttaggaagtggcccctaagtgactctacccatggggttcaggccatcggtgtggcctgaacatattgggtcctggggtggaggaacactgcagagccacagaaatgccacgaaaacagccagctactgccccccacaatccccgcgactagttaaaatgcagattcctgaccccaccctgagtaaggattcagggtgagtgtgggatctgcaaacttaaatttcccagtgattctgatgtgggatagtcctagaagaatagttccagaggcaatcatttagatcctaaaactgtggggagtggggacagggtgaacgaaggtgcccccccaggttccacccacccctcactctagagcctaaggccctcccaggagggagtgcctgaggaggcaatgacccaggccctgaagcccagggttcggtcccctgtcctttcccaccagcgttgagttgatgggagtcaagactgttctctcccagggtgcaagcagggaaaggggttcttggggatagaagggttccccattgaatggaaggcagttctgggcccagggaggtgcccaagttgggtggcctggggaggaggaggtgggtggcgggggagcaacggaaaaggttaacagcctggagagcaagggtcgtccctccagccactgattccaccacccaggacgtggcgcatgggtcctcaggggtgatatctgggctggttccgggtctgggtcccaggtccccaccagtg

SEQ ID NO: 157641 - DNA, 315 bp, Homo sapiens
  misc_feature (1)...(315): n = a,t,c or g
nnnnnnnnnnnnnnnnnnnnnnnnnnnnnnnnnnnnnnnnnnnnnnnnnnnnnnnnnnnnnnnnnnnnnnnnnnnnnggaaagggattttctttttgtcccccgggttggattccaggggcccaatttgggttaattgaaatttccgcttccgggtttaccccttttttctggcttaaccctcccaaaaactggggattaaggggcccctttacaaccccgggttaatttttggattttttaaaaaaaagggggtttaatattgtggcccaggttggtttgaaattctggacctcaggggatcccccccctttgc

SEQ ID NO: 157642 - DNA, 827 bp, Homo sapiens
  misc_feature (1)...(827): n = a,t,c or g
gtaacccaaaccgggccggaangcccatcccccncgganccaaggcctanaaaaaggaaccctaccggggccataaaaataaggaaaccatatttaattccacccccttttgtccagttttcccggggaccccccaatagcatttccagtgttatagagagtgaccagtgaccttaatgcatgtatatgccacatagtcaattcagagcgtaataacctaaaaattcagaatgacttgttttttgaaagtacttggaaattgtgctgctacttaaatattgaaggaattcagaaagttgtgtatttatcttaaaatgttccttctcacttattctactggaattgaccatgaaaaagaaaatattatgccttatttatatctaattattgactgtgcaaactgtgactcagtggatatttgtatgccccccaaaaacattttaaagctgagcaatttttaataaagatgtataaataattttgattattctcattgtagttaagttactgttagtttgggtgcaatacattctttccttcctcatccttttaaaattaaatatataagatgtatgttttgttttattacattaagtgctatttttaaaaaattcattgtgtgtatatgagctaatacttgatttgtttctgtatagcatgattaaagataattgaaaattttgcacttattttaggcccttggaaatttgtattctaatactttttaagaatgtccatttattttgtacataataaattagctttgtatatgaaaatgggtttgaatcaaataaaaaaagtgatgttactttcttcaaaaaaaaaaa

SEQ ID NO: 157643 - DNA, 313 bp, Homo sapiens
  misc_feature (1)...(313): n = a,t,c or g
ctgaatagggaaaaactaaaagcctttcctctaacatctggaacatgacaggaatgccactttcaccactgttattcaatgtagtaagggaagtcctagctacagcaatcaggcaagaaaaagaaataaggggcatccaaattggaaaggaagaagtcacattatccttgtttgtagatgatatgatcttatatttgaaaaaacctaaagactgcaccaaaaaaccattagaactgatacattcagtaaagttgcatgatacataattaacatacaaatatcagtagcatttctcaatgccaagagtaaacan

SEQ ID NO: 157644 - DNA, 375 bp, Homo sapiens
cctaagagtctctgcgctcaccatcacgaagtttctcatagccgtcgcccgcctatcgaggacacggatgcagtcgcccagcgtctacacacaacggggatccttgtagagcagaggccctcagtgatacgccagtcccccagtcatcagggtctggtgatcataatgaaaagggtccatctcggtctccttttcagctgcactgaccaggtccatgggggccagcaggctgcagaggaagaccagcaccaactccatggcgtctgcacagccggtcccctccgagactcccaggaggacccgccgagtcccgaggagcctgggagtggcggggccgcggggcagggcggtgggtgaggcttgagctgctttccc

SEQ ID NO: 157645 - DNA, 251 bp, Homo sapiens
aagaatgacatcgggtaagtataatggtgagcccttataattaatacattggtgaagaaaaatatactagtcatattaaggtaagtttcatatttctaaaacactgtaataaaatataaatattttgcttttcagctgtcagtggtagctataggaattaacatatacagaacatcaaatgtggaggtgctactacagtttctggaagatcaaaatactttccccaactttgagcatctggcatatcggca

SEQ ID NO: 157646 - DNA, 333 bp, Homo sapiens
  misc_feature (1)...(333): n = a,t,c or g
nactaaggaaatgcaagcaatatactgttttacttattttatggcagggcttaacactttccatttgagtgagtgacttttaagaatgacatcgggtaagtataatggtgagcccttataattaatacattggtgaagaaaaatatactagtcatattaaggtaagtttcatatttctaaaacactgtaataaaatataaatattttgcttttcagctgtcagtggtagctatagatattaacatatacagaacatcaaatgtggaggtgctactacagtttctggaagatcaaaattactttccccaactttgagcatctggcatattggca

SEQ ID NO: 157647 - DNA, 299 bp, Homo sapiens
cccctcccttccgtacacatcaagctcggagatttgcccctacccaggactggcaaattggctttactcagcatgccccgagtcagaaaacaaaaatacctcttagtctaagtagacactttcactggataagtaaaggcctttcctacaaggtctgacaaggccactgctgtcattacttcccttctgtcagacataattcctcggataggacttcccacctgtatacagtccagtagcacactggcccttattagtcaaatcagtcacccatcatgtcaggctgctactatacagcg

SEQ ID NO: 157648 - DNA, 1110 bp, Homo sapiens
tttgagacagggcctcgctctagcacccaggctcatgcctgcaattctggcactttgggaggctgagacaggaggactgcttgagcccaggaattcaagaccatcctgggcaacatgaagagaacctgtctccacaaaaattttttaaaaattagctgggcgcagtgatgtgtgcctgtagtcccagctactcaggaggctggggtgggggggatggcttgagcccaggaggttgaggctgcagtgagatgtgactgtgccaccatactccagcctggggtgacagggagtgaggccctgtctcttaaaacagtaattaattaaaatacttttagccaaccaaaataccccaagggaaaggaaaaaaggcacagcttgggggcaagcatggtcaagtgtgggtaacactgaatttgaggtgaatgcgggttcccttaacaatccctgctttgtatattttgaaaaacttccctaaataaaaaaactaaaacaaattatctcctagaaaagtgaggttcccattaaacacaaaccaaaaacagcaagatctattttaataggaggcctaagtagaagatgcccaagaacaaaatttatttagaatctcgcacatgagcgagtgatgagatacctctgctggggtaggggcatgatcccactccttaggaaggaacattccagcttccacagcattagcttcaccagggagcggccacccctgccccacagcagtgctagctcaaaaccacccaaacctaacctgctgtccagacgccagggtgggttcccttaaaaacaaaaagacaactttgttagttcacagcatcagcaaggaccgtcgtcaggcaacagtaatgaaggggagaggaaccatcactcgctcatgtgcgagattctaaataaattttgttcttgggcatcttctactaggcctcctataaaatagatcttgctgtttttggtttgtgttaatggaacctcactttctagagataattctttagttttttatttaggaagttttcaaaatatacaaagcaggaatgtaaggaacccgcatcacctcaaattcagtgttacccacacttgaccatgcttgccccagctgtg

SEQ ID NO: 157649 - DNA, 337 bp, Homo sapiens
  misc_feature (1)...(337): n = a,t,c or g
ggctgcggaagtttttgttctattatgtgctgagttttttactgttttttaatcaggaagggannnnnnnnnnnnnnnnnnnnnnnnnnnnnnnnnnnnnntacgatatggtttactttttcagtctgttactatgatgaattacatggattgacttcaggatattaaaccagctttggattcactgattttctgtattggttttctgtattggtttcctgttttctgttccactgattttcactctgatactcactgtgtttcatttattttgcttaccttaggtttaattcttctttgtccagtgtttaatttggaagctgatgttattaattcg

SEQ ID NO: 157650 - DNA, 334 bp, Homo sapiens
  misc_feature (1)...(334): n = a,t,c or g
ctatgatgaggagtggcgtcggtctacggtccacccagatgaggtggggaatcttaagtaggaggaccggtgagccctgcaaaaccgactgagggtcttcctgtcccttatggacactggctggttagataaccttctcctggacatagacaaagctgatgtcattgtcaagatgctggatgcattccgtgattaagatggaaggaggcacggataatgatcttaacatcctggatcaggacgtggaggacgagcatgcatgaaagcctggtgagcccagcaagaatgaagaaggacgggctgtatcaggcctaggggacggggagcgcaaaan

SEQ ID NO: 157651 - DNA, 323 bp, Homo sapiens
gttgtttcttatcttttagtatttgaatctagcagtaagtaaaaaaagataatatatcaggactgcattggatttgtgcaagattgtcttaacattaattgaccccattgacagcttaaggggaaaaaatgtgatcatctcattggatacagaaaaagtagtaggtaaaatccaatagccatttatgacaaaaatttttagcaaactgggaatagaagggaactttcttaaatggctgaaatatcagcagagttctacagtaagtttacttaatgtttaaatactaaaagcattcctttcaagaacagaataaggatgcatgc

SEQ ID NO: 157652 - DNA, 690 bp, Homo sapiens
ggcaacatacattgtggactttggctttcagtacaacattcagagaggggcagatgctgacagctttttgtggcatgtacccctacgtggccccagaacgctccctgggccaggcatgccagtgacccgccagggacatacaaagcctcagtgtcatactgtatttcaggaatacagtaggtagaagggccaggactttgcccttttactcagggaagcctccaaacttcaagaaaaaattctcacaggaagataccatgccccaccactttttgcccttcaacttgactcattaaaaaattactaatgctgaacgccaggaagggtccttcactgtaactgatgaaaaatccatgggtgaaaaggatccagaagatgccactgataccatacgaagagccactcctggaccaccccaaacaatccagctcatggtggccatgggatttcaggccaagaacatctctgtggcaatcatagaaagaaaattcaactatcccatggccacctacctcattttatagcacacaaaacaagagaggaagtgctccaccatcagagaactgtcccttcctcccggggttgccacctctccttccccatccactgaactttccaccttccctctctcactgatgcgggctcatagggagccagcttttaacgttcagcctcccgaagaaagccagg

SEQ ID NO: 157653 - DNA, 338 bp, Homo sapiens
  misc_feature (1)...(338): n = a,t,c or g
nagtagctcatatacaccagaatactggcagtgaaggagccgaagtcattctccaatgtctaaccagagaagacacactggcagaagggcaaatccagatcccaacacttgccttagagtgtttggccttagtttgtacacaacagacagagatcttcgcgaagtatgttcttgatatggacctttgaatggtgccaatgtggtttacaaccagcaaactgggcgatctcaaggatttgcttttgtgcatttttagggaatagatgactcaaaggaggctatggtaagggcaaacagaaaggagctggatgatagaagaaattcgggtggattattct

SEQ ID NO: 157654 - DNA, 841 bp, Homo sapiens
tcacccacccttctcctcccattagtcatttctctaagtacagctgatgtcatgtggggctgagaagaaagcagatcacacttcatcacagaaagaatgccttgtgattatcttctccacatctgaaattccttttgacacctgcattgggccgactgccattcccatgactgctgcacctgcgtttttagagaatgcctcataacccactgattctcattcacagagaatgggagaacggaatgaagaaagattccagcagcttatagaaggatagcaatattttgggacagggaaaatcctgtcatacctcatctcttcctcaggaggagttctgagctggtcctgcttttcatagttgtttcttttcttccacttaagaactcatagatttttcttactgtcctaaaggaagtccttacctctgaggtatctcctccaatgaatacctggtttcaaaggctggaaatagttcattaatgttaataaccttctttatgttctcaggggaaatgcttaggggggggtcacaaaatgtgccttttcttttcttttttttttttttttttagggggaaaatttttttttttttccccagcttgaaggccagggggccaattttgtttaatggaagcttccccttccgggtttaaccctttttttttgcttaaccttccaagggagtgggaattacgggttcccccacccacccggggtaattttttttgatttttaaaaaaaaacggttttattgggttaacccgggagggtttgattttcttaacttaatgatccccccgcttttgcttccaaaggggtgggattaacggccctaacccct

SEQ ID NO: 157655 - DNA, 343 bp, Homo sapiens
ggcacgagccaaatggattttatgccgaaattgaatgtgaaagatgtaactcacctgagctggatgaagaaggctacagcatcatacccgacgaacccggctctaccaatggaaagcacttttattcttcaagtgaatcggagtactaagaataatcacataagatctagtatccagattaaaccatcgctatctacagacattcttaataatgctgcgcctgtagatgaattgaaggcgtcaataggcaacatcgcactttccccatgaccagagggtgccattaaaaggaacttatccagagaagaagtggcaagacccaggcgtttcacaccatctccag

SEQ ID NO: 157656 - DNA, 382 bp, Homo sapiens
ggcacgaggaaaagaatgagaagattagaaatgtcggattgtgtgaagctattgtacagtttacaaggtaatacctctaagtgtgcctttagcgttcagtgaattcttaaaactgctgctggagaattgtcccaaacatatttttttaacctttgtaggacatttagcccatcaaaacctgcaaaatctttacatacacagaagaacagacagttcttcaatgaaccagaagaaaatttctggatggtcatggtatttacatacacagtgtatctttctgaaattgtatgggtagagttatggtgatctttactggtcagaatttaaaaaaagttctctgctgttgcatccaagtaaaattaaaataaaattggttgcaatt

SEQ ID NO: 157657 - DNA, 427 bp, Homo sapiens
  misc_feature (1)...(427): n = a,t,c or g
tcggcacggggaccagatggattcacagctgaattctatcagacattcaaagaagaattggtacaaatcctactgaaacaattccaaaggataaagggggaaatcctccttaaaatcattatgagaaaccagtatcaccctaatacccaaaaccaggaaagggacataacaaagaaactgttgactcgctctttctgggtttctctctgccccgtgctgtcatcccctgcagactctggagtccaggccctcttctatctctatgaatcanctttgcactctgtctgtttctctgttctgtctgcctctgctcacccacacgtgcacttgtgccccacatgccccaccctcggttctctctggttcccactgtgtctggtgtgtgtctctattcttcttctgattactctttcctcccccaccctta

SEQ ID NO: 157658 - DNA, 344 bp, Homo sapiens
ggcacgagaccgtgcagcactggagacagtcatccgacgggcccggcccgagctccgtcggccaggcgtgcagggtatccccagggtccacgagctcaagattgaagaatatgtgcagcgggggctacagcgagtggggctagatccccagctgccactgaatctggctgccctttatgcccacgtggcctaggagaaacgtgtggtgagtatattaagccggactatactgattgttatactcggtggagagtcttatattattgattatagtgttgacctatggatatcagttatcgatattatgtacttgctcagtagggaatatattctagtttattatg

SEQ ID NO: 157659 - DNA, 932 bp, Homo sapiens; identical to SEQ ID NO: 108088

SEQ ID NO: 157660 - DNA, 2544 bp, Homo sapiens
atgaagcccccaaggcctgtccgtacctgcagcaaagttctcgtcctgctttcactgctggccatccaccagactactactgccgaaaagaatggcatcgacatctacagcctcaccgtggactccagggtctcatcccgatttgcccacacggtcgtcaccagccgagtggtcaatagggccaatactgtgcaggaggccaccttccagatggagctgcccaagaaagccttcatcaccaacttctccatgatcatcgatggcatgacctacccagggatcatcaaggagaaggctgaagcccaggcacagtacagcgcagcagtggccaagggaaagagcgctggcctcgtcaaggccaccgggagaaacatggagcagttccaggtgtcggtcagtgtggctcccaatgccaagatcacctttgagctggtctatgaggagctgctcaagcggcgtttgggggtgtacgagctgctgctgaaagtgcggccccagcagctggtcaagcacctgcagatggacattcacatcttcgagccccagggcatcagctttctggagacagagagcaccttcatgaccaaccagctggtagacgccctcaccacctggcagaataagaccaaggctcacatccggttcaagccaacactttcccagcagcaaaagtccccagagcagcaagaaacagtcctggacggcaacctcattatccgctatgatgtggaccgggccatctccgggggctccattcagatcgagaacggctactttgtacactactttgcccccgagggcctaaccacaatgcccaagaatgtggtctttgtcattgacaagagcggctccatgagtggcaggaaaatccagcagacccgggaagccctaatcaagatcctggatgacctcagccccagagaccagttcaacctcatcgtcttcagtacagaagcaactcagtggaggccatcactggtgccagcctcagccgagaacgtgaacaaggccaggagctttgctgcgggcatccaggccctgggagggaccaacatcaatgatgcaatgctgatggctgtgcagttgctggacagcagcaaccaggaggagcggctgcccgaagggagtgtctcactcatcatcctgctcaccgatggcgaccccactgtgggggagactaaccccaggagcatccagaataacgtgcgggaagctgtaagtggccggtacagcctcttctgcctgggcttcggtttcgacgtcagctatgccttcctggagaagctggcactggacaatggcggcctggcccggcgcatccatgaggactcagactctgccctgcagctccaggacttctaccaggaagtggccaacccactgctgacagcagtgaccttcgagtacccaagcaatgccgtggaggaggtcactcagaacaacttccggctcctcttcaagggctcagagatggtggtggctgggaagctccaggaccgggggcctgatgtgctcacagccacagtcagtgggaagctgcctacacagaacatcactttccaaacggagtccagtgtggcagagcaggaggcggagttccagagccccaagtatatcttccacaacttcatggagaggctctgggcatacctgactatccagcagctgctggagcaaactgtctccgcatccgatgctgatcagcaggccctccggaaccaagcgctgaatttatcacttgcctacagctttgtcacgcctctcacatctatggtagtcaccaaacccgatgaccaagagcagtctcaagttgctgagaagcccatggaaggcgaaagtagaaacaggaatgtccactcagaaacaaccatgacaacccaaaccccagcctgcccttcctgctccaggagccgtgccccggctgtcccagcccccatacaggctccctctgccatcctgccactgcctgggcagagtgtggagcggctctgtgtggaccccagacaccgccaggggccagtgaacctgctctcagaccctgagcaaggggttgaggtgactggccagtatgagagggagaaggctgggttctcatggatcgaagtgaccttcaagaaccccctggtatgggttcacgcatcccctgaacacgtggtggtgactcggaaccgaagaagctctgcgtacaagtggaaggagacgctattctcagtgatgcccggcctgaagatgaccatggacaagacgggtctcctgctgctcagtgacccagacaaagtgaccatcggcctgttgttctgggatggccgtggggaggggctccggctccttctgcgtgacactgaccgcttctccagccacgttggagggacccttggccagttttaccaggaggtgctctggggatctccagcagcatcagatgacggcagacgcacgctgagggttcagggcaatgaccactctgccaccagagagcgcaggctggattaccaggaggggcccccgggagtggagatttcctgctggtctgtggagctgtag

SEQ ID NO: 157661 - DNA, 901 bp, Homo sapiens
acccagtgtatggacatcaggcctcccctccccaaggcaggacttcacctgtcctttactttcactgagtaggatccactatactctagaggctgactcatgaggaaaccttctaggaagggagggcttcctccgttcagaaagccaacagaggtcccttgaactgttttctgatccccaaatctgcactccgaatgcagctgcacggccaggcgtggacctatccctgacagcatgctcttctgtttgaaaatctcctgtgacaaatggccattctaaggtggagtgtatgtgtggcaggatggggggctggaagcttggtggcagcgctgctggttgcccgcctccttgactgccttcctgctccctttctgtttccggatgttcctgccctagttgcctgcttcagcaccaccagccacctcaaatcctgatccagctgtgtctcgtgtcatgaatatgaaaatcgaaggtgcccccaaggcgcagaggccctgtcctaacagggggatcctgggaggggagtgacctgtcacatgtctcgatgttgaagtagtgagggaacccagccacacctagtcactgctccctccctcaacctcccactcctcaggaaggggctgcctaaacccagactttttcttcttttagaaacaaccatgacaacccaaaccccaggtaagttcccagcccccttggcccctttccacatccttgcccccagcctgcccttcctgctccaggagccgtgccccggctgtcccagcccccatacaggctccctctgccatcctgccactgcctgggcagagcgtggagcggctctgtgtggaccccagacaccgccaggggccagtgaacctgctctcagaccctgagcaaggggttgaggtgactggcc

SEQ ID NO: 157662 - DNA, 3071 bp, Homo sapiens
gccccacagtgagaggaaggaaggcaacagtcgccagcagccgatgtgaagaccggactccgtgcgcccctcgccgcctctgcctggccacatcgatgttgtgtccgccgcctgctcgcccggatcacgatgaagcccccaaggcctgtccgtacctgcagcaaagttctcgtcctgctttcactgctggccatccaccagactactactgccgaaaagaatggcatcgacatctacagcctcaccgtggactccagggtctcatcccgatttgcccacacggtcgtcaccagccgagtggtcaatagggccaatactgtgcaggaggccaccttccagatggagctgcccaagaaagccttcatcaccaacttctccatgatcatcgatggcatgacctacccagggatcatcaaggagaaggctgaagcccaggcacagtacagcgcagcagtggccaagggaaagagcgctggcctcgtcaaggccaccgggagaaacatggagcagttccaggtgtcggtcagtgtggctcccaatgccaagatcacctttgagctggtctatgaggagctgctcaagcggcgtttgggggtgtacgagctgctgctgaaagtgcggccccagcagctggtcaagcacctgcagatggacattcacatcttcgagccccagggcatcagctttctggagacagagagcaccttcatgaccaaccagctggtagacgccctcaccacctggcagaataagaccaaggctcacatccggttcaagccaacactttcccagcagcaaaagtccccagagcagcaagaaacagtcctggacggcaacctcattatccgctatgatgtggaccgggccatctccgggggctccattcagatcgagaacggctactttgtacactactttgcccccgagggcctaaccacaatgcccaagaatgtggtctttgtcattgacaagagcggctccatgagtggcaggaaaatccagcagacccgggaagccctaatcaagatcctggatgacctcagccccagagaccagttcaacctcatcgtcttcagtacagaagcaactcagtggaggccatcactggtgccagcctcagccgagaacgtgaacaaggccaggagctttgctgcgggcatccaggccctgggagggaccaacatcaatgatgcaatgctgatggctgtgcagttgctggacagcagcaaccaggaggagcggctgcccgaagggagtgtctcactcatcatcctgctcaccgatggcgaccccactgtgggggagactaaccccaggagcatccagaataacgtgcgggaagctgtaagtggccggtacagcctcttctgcctgggcttcggtttcgacgtcagctatgccttcctggagaagctggcactggacaatggcggcctggcccggcgcatccatgaggactcagactctgccctgcagctccaggacttctaccaggaagtggccaacccactgctgacagcagtgaccttcgagtacccaagcaatgccgtggaggaggtcactcagaacaacttccggctcctcttcaagggctcagagatggtggtggctgggaagctccaggaccgggggcctgatgtgctcacagccacagtcagtgggaagctgcctacacagaacatcactttccaaacggagtccagtgtggcagagcaggaggcggagttccagagccccaagtatatcttccacaacttcatggagaggctctgggcatacctgactatccagcagctgctggagcaaactgtctccgcatccgatgctgatcagcaggccctccggaaccaagcgctgaatttatcacttgcctacagctttgtcacgcctctcacatctatggtagtcaccaaacccgatgaccaagagcagtctcaagttgctgagaagcccatggaaggcgaaagtagaaacaggaatgtccactcaggttccactttcttcaaatattatctccagggagcaaaaataccaaaaccagaggcttccttttctccaagaagaggatggaatagacaagctggagctgctggctcccggatgaatttcagacctggggttctcagctccaggcaacttggactcccaggacctcctgatgttcctgaccatgctgcttaccaccccttccgccgtctggccatcttgcctgcttcagcaccaccagccacctcaaatccttgatccagctgtgtctcgtgtcatgaatatgaaaatcgaagaaacaaccatgacaacccaaaccccagcccccatacaggctccctctgccatcctgccactgcctgggcaaggtgtggagcggctctgtgtggaccccagacaccgccagggccaagtgaacctgctctcagaccctgagcaaggggttgaggtgactgggcagtatgagagggagaaggctgggttctcatggatcgaagttaacttcaagaaccccctgggtatgggtttcacgcatcccctgaaacacgtggtggttgattcgggaaccgaagaaagctctgcgtacaaagtgggaagggagacgctattctcagtgatgcccggcctgaagatgaccatggacaagacgggtctcctgctgctcagtgacccagacaaagtgaccatcggcctgttgttctgggatggccgtggggaggggctccggctccttctgcgtgacactgaccgcttctccagccacgttggagggacccttggccagttttaccaggaggtgctctggggatctccagcagcatcagatgacggcagacgcacgctgagggttcagggcaatgaccactctgccaccagagagcgcaggctggattaccaggaggggcccccgggagtggagatttcctgctggtctgtggagctgtagttctgatggaaggagctgtgcccaccctgtacacttggcttccccctgcaactgcagggccgcttctggggcctggaccaccatggggaggaagagtcccactcattacaaataaagaaaggtggtgtgagcctgggaa

SEQ ID NO: 157663 - DNA, 391 bp, Homo sapiens
cggacgcgtgggtaagtgtcctgtgctgtaatctttcagaagccaaaagaagaataaattctttatcatataatcaatgtgaaaacatccgacgtctaccatcttttaggacgtatggaatggtgaaaattctaggtacgtggaaaagcaagcttcagaacagcaagttgagctcttgaccaatgagagatatttgatggaggaatcacaattattactacaatacctgcatgtttatcatatgaattacttcctggatttgacatgtcgtcctacgttctactgttatcttaccgaggctccaataggttaaccgatgtgcaaaggctacctgtcatgatgatactgaatcatacctgactaccactgtgctccttaatgaccaaggctt

SEQ ID NO: 157664 - DNA, 380 bp, Homo sapiens
gtgggtcctggcactggcgggtcgcaacgctgtgggcgttccaggaggtggtcgtggcgaacctggcagctgcgggcatcatggtgggaggcttgaagaggaaacactctgatttggaagaggaggaggagaggtgctatgtgtaggctagttgccgttttgactttttttgtttattgtgctatcgagtattgttctctaatttgactgtattctgtttcgcttatcgctactttaatatatatatgtccttttgctttacattctttctttacttctggtggttatttgttatgattttcttcttattatgtattctgaactcttttaattgtactagtgtgtttctttcctgttagttttgtaatgtttctgatttt

SEQ ID NO: 157665 - DNA, 389 bp, Homo sapiens
cccacgcgtccggacttcttcgcccagcagcagcacttgacccctgacaagatctaccacgtcacagtgatgccctgctatgacaaaaagctggaagcctccagacccgactttttcaaccaggagcaccagacacgggatgtggactgtgtcctcacaacaggagaagttttcaggttgctggaggaagagggcgtctccctccccgacctggaaccagcccctctggacagcctgtgcagcggtgcctatgcataggagcccaccagccatagggtgagggggctcgggaggctacctggatcacgtgtttcggcatgcctctttacagctgtttgatagcatgtcgtttaagtttcttccatacacttgcgatgataggatgtctg

SEQ ID NO: 157666 - DNA, 502 bp, Homo sapiens
tccagtgtggtggaatttgcagcgccgcacaagcgccggaccgggtaccgctgtgcccggcctggccgtggcctagttccggcagacgggactgacgaggtcaccaagctctggccgagacggcgcgggtgtcagggacttgtggaatccccctcccccagtcccgatcccgctttcctttggggtttcacctcagaggacccgacagcactcttgcagaacagccgtctgcctgtcttcctggctcgctccctgcaggaatggtctggggcaaccccagcaacacggccacctgtggccagggtgaatagggatccagttcaggcttggcttccatggcaatcaaggcccaccaggccccagcaaccttccctaccccccattcctttttgctgcccccctccacaccaggcatgttccctgccacaccattgctgtcccctcacctgggctgccctcccaactcctctctgcctctggagatgctctgccattcaagaca

SEQ ID NO: 157667 - DNA, 831 bp, Homo sapiens
atgggcaaggacttcatgtctaaaacaccaaaagcaatggcaacaaaagccaaaattgacaaatgggatctaattcaactaaagagcttctgcacagcaaaagaaactaccatcagagtgaacaggcagcctacagaatgggagaaaatttttgcaatctactcatctgacaaagggctaatatccagaatctacaatgaactccaacaaatttacaagaaaaaaacaaacaaccctatcaacaagtgggcgaaggatatgaacagacacttctcaaaagaagacatttatgcagccaagagacacatgaaaaaatgctcatcatcactggctatcagagaaatgcaaatcaaaaccacaatgagataccatctcacaccagttagaatggcgatcattaaaaagtcaggaaacaacagaaagaaaaagaacaatatcaaattgtatgtatgcagagttttcatcacggataactgtgaggagctaatccctgaatacctgaacttcattagagtgctggtagactcggaggatctccctctaaatatttcccataagatgttacaacaaagcaaaattttgaaagttatcaggaagaatttggtcaaaaaatgcttagaactctttactgaactggcagaagataaagagaactacaagaagttctatgagcagttctctaaaaacataaagcttggaatacatgaagactctcaaaatcagaagaagctttcagagctgttaaggtggctaacaaagagaagggaagatggagctgccatcttgaacatgattggcacaactgatggcatctatgtctgcctagcttga

SEQ ID NO: 157668 - DNA, 775 bp, Homo sapiens
aaacatatcccgtgagatgttgcaacaaagcaaaattttgaaagttatcaggaagaatttggtcaaaaaatgcttagaactctttactgaactggcggaagataaagagaactacaagaaattctatgagcagttctctaaaaacataaaggttggtgtaaataaccattagttttccaattggcctctttagttttttttttttttttttaattcagaaagtctttgtaaagaacatactttgtttcagcttggaatacacgaagactctcaaaatcggaagaagctttcagagctgttaaggtactacacatctgcctctggtgatgagatggtttctctcaaggactactgcaccagaatgaaggagaaccagaaacatatctattatatcacatggtaagagaacactatgttacagtcatacacgtcgttcttacaaccttgtaggctctgtgggtgtgttttctactcaggtagcactgttacaactggtattgatctaggcaagataattaacatgaactaggtcattttctgtcttaggttctgcctaggtatctggctagcaagaaaagtcagagctagatgaaaccattcttaactgttaaaaggtctaaaagtaactttgtaatacctcaggtgagaccaaggaccaggtagctaactcagcctttgtgggaacgccttcggaaacatggcttagaagtgatctatatgattgagcccattgatgaggactgtgcccaacagctggaggaattttgagggaaag

SEQ ID NO: 157669 - DNA, 2963 bp, Homo sapiens
cagttgcttcagcgtcccggtgtggctgtgccgttggtcctgtgcggtcacttagccaagatgcctgaggaaacccagacccaagaccaaccgatggaggaggaggaggttgagacgttcgcctttcaggcagaaattgcccagttgatgtcattgatcatcaatactttctactcgaacaaagagatctttctgagagagctcatttcaaattcatcagatgcattggacaaaatccggtatgaaactttgacagatcccagtaaattagactctgggaaagagctgcatattaaccttataccgaacaaacaagatcgaactctcactattgtggatactggaattggaatgaccaaggctgacttgatcaataaccttggtactatcgccaagtctgggaccaaagcgttcatggaagctttgcaggctggtgcagatatctctatgattggccagttcggtgttggtttttattctgcttatttggttgctgagaaagtaactgtgatcaccaaacataacgatgatgagcagtacgcttgggagtcctcagcagggggatcattcacagtgaggacagacacaggtgaacctatgggtcgtggaacaaaagttatcctacacctgaaagaagaccaaactgagtacttggaggaacgaagaataaaggagattgtgaagaaacattctcagtttattggatatcccattactctttttgtggagaaggaacgtgataaagaagtaagcgatgatgaggctgaagaaaaggaagacaaagaagaagaaaaagaaaaagaagagaaagagtcggaagacaaacctgaaattgaagatgttggttctgatgaggaagaagaaaagaaggatggtgacaagaagaagaagaagaagattaaggaaaagtacatcgatcaagaagagctcaacaaaacaaagcccatctggaccagaaatcccgacgatattactaatgaggagtacggagaattctataagagcttgaccaatgactgggaagatcacttggcagtgaagcatttttcagttgaaggacagttggaattcagagcccttctatttgtcccacgacgtgctccttttgatctgtttgaaaacagaaagaaaaagaacaatatcaaattgtatgtacgcagagttttcatcatggataactgtgaggagctaatccctgaatatctgaacttcattagaggggtggtagactcggaggatctccctctaaacatatcccgtgagatgttgcaacaaaagccaaaattttgaaagttatcaggaagaatttggtcaaaaaatgcttagaactctttactgaactgggcggaagatccagcgaactaccagaaatctctatgagccagttctcttaaaaaccttaaagccttggaataccacgaagactcttcaaaatcggaaagaagcttttccagagctgttaaggtacttacacatctgcctcatagtgatgagatggatactctcaaggacttactgcacccagaatgaaggagaaccagaaacatatctattatatcacaggtgagaccaagggaccaggtagcttaactcaagcctttgtggaaccgtctttcggaaacatggcttaggaagtgatctatatgattgagcccattgatgagtactgttgtccaacagctgaaggaatttgaggggaagactttagttgtcagtcaccaaagaaggcctgggaacttccagaggattgaagaagagaaaaagaagcaggaagagaaaaaaacaaagtttgagaacctctgcaaaatcatgaaagacataaaaggagaaaaaagttgaaaaggtggttgtgtcaaaccgattgggtgacatctccatggctgtatttgtcacaagcacatattggctggacagcaaacatgggagagaattcatggaaagcttcaagcccttaaggagacaacttcaacaatggggtttacatggcagccaaagaaacacctggagataaaccctgaccattccattattgagaccttaaggcaaaaggcagaggctgataagaacgacaagtctgtggaagggatcttggtcatcttgctttatgaaactgcgctcctgtcttctggcttcagtctggaagatccccagacacatgctaacaggatctacaggatgatcaaacttggtctgggtattgatgaagatgaccctactgctgatgataccagtgctgctgtaactgaagaaatgccaccccttgaaggagatgacgacacatcacgcatggaagaagtagactaatctctggctgagggatgacttacctgttcagtactctacaattcctctgataatatattttcaaggatgtttttctttatttttgttaatattaaaaagtctgtatggcatgacaactactttaaggggaagataagatttctgtctactaagtgatgctgtgataccttaggcactaaagcagagctagtaatgctttttgagtttcatgttggtttattttcacagattggggtaacgtgcactgtaagacgtatgtaacatgatgttaactttgtgtggtctaaagtgtttagctgtcaagccggatgcctaagtagaccaaatcttgttattgaagtgttctgagctgtatcttgatgtttagaaaagtattcgttacatcttgtaggatctactttttgaacttttcattccctgtagttgacaattctgcatgtactagtcctctagaaataggttaaactgaagcaacttgatggaaggatctctccacagggcttgttttccaaagaaaagtattgtttggaggagcaaagttaaaagcctacctaagcatatcgtaaagctgttcaaaaataactcagacccagtcttgtggatggaaatgtagtgctcgagtcacattctgcttaaagttgtaacaaatacagatgagt

SEQ ID NO: 157670 - DNA, 405 bp, Homo sapiens
tgggacagagtggggcaagaacacacacggccgggcacagcctcttagccagctctccatgtcagtatgagcagtaaccagggaactgggcaattggcacatcagcctatcagaattcatgggaggttatttcttaagtgaaattctaaagagttaaaggatgaatttggacagtgatggaatggatgacatcatcagtcaagaatcctcattggatatggaggggaattataaaaaggcccagaaaaatgagagagaagctatcagactgatattggcactttgaagcttctttgatgatggctcaagaatttatatcagctggagcaaagtggaaagcaaatcttttctccccattgataggggattaacttccaaattggtttgtcatcaacgtggtctccg

SEQ ID NO: 157671 - DNA, 478 bp, Homo sapiens
tcactttgttgatgtttaataataatgtctcattattaacattgactttttgtatgtttttagagttttctttgccttgtacagaagatgtaccaacttgtggagacagttgtgacaaagtacttgaatgcggaatccatagatgttcacagcgttgtcaccgaggtcccttgtacttaggtgatttatttccatgctgtttttcaggctggcccagaatgccttcattgtgaggaagggtgctccaagtcacggccactaggttgtcttcacccatgtattttgcgatgtcaccctggagaatgtccaccttgtgttcagatgcttgggactgctgaatcagctgttcttccccaagcctgtcactgtccccagttctgtcttcagtctccaccctttctcttcactcataaagagccacagtcatcctggagcagtggctagtctgtttgcctctttcttgagccttctgcattgg

SEQ ID NO: 157672 - DNA, 322 bp, Homo sapiens
atctggatggtcacttactgagcaggatccctacaataatattgtccgtactgcaatagaggcaatggcagcagtatttggagggactcagtctttgcacacaaattcttttgatgaagctttgggtttgtcacactgttaaaagttctctaattccattttcactccactttctcttctcataacaattctctctttcttatatttctatctttttattcattttaattttcttttatttctatctctctcttcttattcatttcttttatattttctatctcatctctatttttttatttttcttcctattcatttatct

SEQ ID NO: 157673 - DNA, 425 bp, Homo sapiens
  misc_feature (1)...(425): n = a,t,c or g
agggaactgttggctttttggcaaaattttaagctccgcccccagggtccttttttttccccttggcccggggggggaaaaaaaacgttaaagcttacccaaaactcccccaaaagggggccctcctggccctttccgaatggaaggctgccttcggggggccaattgcccccgccaaggggtgggtgcctcaaggtnnnnnnnnnntccccaaggggccccaagggtggggcccgcctttcccataaagaagccccccctgccccccccacaggattggggtgccccaagtatcaagttccccaaccccaggtttggtttttcctaggggccctttaaaccctggtaatttgggtgggacnnnnnnnnnnnnnnnnntcagttccaaggccgctcgcgatctagaactagtccggacgcgtggg

SEQ ID NO: 157674 - DNA, 313 bp, Homo sapiens
tgacatttgttctttgttgataaaactcctgaaaataactcacaaggccagtgctgcactctggcacatgtaggttgttttgagggtttgttggttggttggttggctgcttgattggttcgttctcttacatcactaccgcactcgccacctaacccaactctctccctaccctcctaactaccaccttatggacctgtctacctctctcactaccctccctctccacccatcacttccctcacccatccccctccatctccctccccccccacctcactaccccctcctctctcccatcactcccacctcc

SEQ ID NO: 157675 - DNA, 378 bp, Homo sapiens
  misc_feature (1)...(378): n = a,t,c or g
aaatgaaggtgaatgtagaaaagatgtagagatggaaccagtacttcaagctgaaaaaactaatttccaaaatcacaaaggccatgagtttattcctacactctgcgcactttcctgccaattgtgatgcctgtgccaaacctctctggcatgttattaagccaccccctgccctagagtgtcgaagatgccatgtcaagtgccacagagatcacttagattatacagatgacttaattttcccatgtaatataagatacgatgtatcatctactcttagatatagctgactcttacatttctcggatgagataactatcatatagtactcctattatattctcctactacctacaccgtatacttataggatactcn

SEQ ID NO: 157676 - DNA, 369 bp, Homo sapiens
gagcacacaagggcagaagatcatatgctagaagagcgcgaagagagatagcgcgccgaacgagcacaacgcgaggaatagctaccagagtatcaggagcggatgaagacattataagaagcggataggaatatacgcccaagggagttggaaattgaagaacgagaacggctgtacagaggaagagagaatacttggcgatagctccctttctagaaaggactctcgctggggagatagagattcagaaggcgcctggagaacaggacctgaagcacattctgagtggacaataggctcgccacagatggagtggagaccttgagaatggctatatgacgacaggtcttatactggagattaaatacg

SEQ ID NO: 157677 - DNA, 512 bp, Homo sapiens
cctggggctttccaaaggcacctcgcatgcctgtttggagcctgtcagccccagcacaggacaacatcttgttgaatgcggatgacgtggaagggttgaagccgcacccggatatggaagccatctttgccacaactttttaccatgtacttattggcaaaaattcgggcagcctccagggcttcagaggacagctgcttcatattcatctgacaccatgttgggcacaaaagcggaaactcatccaacttttgccttttttccggcccaaggtccaaaatgcgaatcttggcaatcaagggacacctcggcaagaagcgagactttgggtacggcttgttcttacaataccggtaacaactgggcgggggcggcggcccatggcgacaccgaggatcttcagtggctgcaacgaaaaagagagagtcggaacggaagacgagaacagacctaaaaggtgtgagaaccagcaacggcaccgcaagagacgacaactgcgcttactcaccaca

SEQ ID NO: 157678 - DNA, 709 bp, Homo sapiens
cccggactgtccttcacgtccgacaacgcacgcggcacgtcgcccggaaataagacagagaacgcacacaaaggccccaagagcgtatcgagcgccccgaaaatgcggtgaagcttgcaggacacaggccagaagatacgagggaacccgttcgcttccacaccgacacgggaacgaaggaacagacagtaatatttgcagactaaaaaatagccgggaggtgtaaaacatagggtcagttcccaagacagaggccgccgcacgggggaggctccaccccacaattgttttcagcggccataggcacttctttccccgcccgtttcccagcagtgaaagtacacggattcaagacttcaccaacggggcggggcggcggccattgggcgaacaccaggatctttcagttggcttgcaacgaaaaagagagagtcggaacggaagacgagaacagacctaaaaggtgtgagaaccagcaacggcaccgcaagagacgacaactgcgcttactcaccacaccgaagggaaagaggcgctcctccgcctgcgcatggcttatataggcggtctgtctgcgcgcgtaagaaccatatagtcctgtcgaagacgggtggacgctctgtcagacgtcatgaccatagacgcagccgctcttggcgcttgcgcccgggcgtatcccatcacatgcgcagatcacagaggtgaccgg

SEQ ID NO: 157679 - DNA, 357 bp, Homo sapiens
  misc_feature (1)...(357): n = a,t,c or g
accctttttaaatcaaataacccaatccggtaaagtttcggggataaaaaacccctggcctttttaaaaatggcctgggggaaaaaaaccccaaaaaggcattttcttttttttagggtccnnnnnnnnnnccnnnnnnnnnnnnccctaggaatagatttaaccaagaaagtgaaaaagctctccaagaaaaactacaaaacattgatgaaaaaaattgaagatgacagcaactaaaaagacaactcatgcttatgaattagaagaccatattacccaaagcaatatacagattcaatacaatctctgtcaatatacccatgaggtttttaccggacgcgtgggcggacgcgtggg

SEQ ID NO: 157680 - DNA, 759 bp, Homo sapiens
agaggagctcaagccatcatcattgtcttcacctgaatgatgtggcatctctggaacatccaagcaagtggttggccgatgccctgaaggagaatgaccttcccagtgtgcttctcttccttacccgtgctcagtatgcgctgatggagaaagacgccctccaggtggcccaggagatgaaggctgagtactgggcagtctcatctctcactggtgagaatgtccgagaattcttcttccgtgtggcagcactgacctttgaggccaatgtgctggctgagctggagaaatcgggggctcgacgcattggggatgttgtccgcatcaacagtgatgacagcaacctctacctaactgccagcaagaagaagcccacatgttgcccatgagggctgaggagactgttcagagactgcccagccctagggcactgtgccaccctcattcctccagagcttgacccctggacatttgcactgactttatccagaccaaagagctgcctcttggtggcagtattcccacagaggggtagctgggatcatgctagtcacttcctgcccccaggcaccgtgccaaagactggatgccccctactcctcaggggactgtccagggcgcccagtggtagtgagggagagtgtctctgttcttttgctcagcctgctgggccctttgtgtttgaggatgcttaatgattccagcctctcactgtgccttatgcattaaaatttctttgttacgagcaaaaaaaaaaaa

SEQ ID NO: 157681 - DNA, 147 bp, Homo sapiens
tatgcgctgatggagaaagacgccctccaggtggcccaggagatgaaggctgagtactgggcagtctcatctctcactggcatcaacagtgatgacagcaacctctacctaactgccagcaagaagaagcccacatgttgcccatga

SEQ ID NO: 157682 - DNA, 809 bp, Homo sapiens
ggaattcgggctgtttctgccactcttccagccatcatcattgtcttcaacctgaatgatgtggtatctctggaacataccaagtaagtgagcatcctgcaatataatgggaggctccgggaagagagggttcagaacagaggggtggtcaggaagaagaagaatgcatgtaggaccagagagggggtaattgggcctatgaatgtcagtgggaggggccctgcagactcactcatcccttactttccacctcccatggcaggcagtggctggccgatgccctgaaggagaatgacccttccagtgtgcttctcttccttgtaggttccaagaaggatctgagtgtgagtgtgccagtggggggacttcccagcttggtgagggaatgcccccctctgactctggccttccctcagacccctgctcagtatgcgctgatggagaaagacgccctccaggtggcccaggagatgaaggctgagtactgggcagtctcatctctcactggtgagttggaggctttagggctctgctgtgacactcttgcctggctctcctctcactgctacacctccagctgtgccctgtgtccccagacccagcactgcccctgagcacctatctgctctctgtgtcaggtgagaatgtccgagaattcttcttccgtgtggcagcactgacctttgaggccaatgtgctggctgagctggagaaatcgggggctcgacgcattggggatgttgtccgcatcaacagtgatgacagcaacctctacctaactgccagcaagaagaagcccacatgttgcc

SEQ ID NO: 157683 - DNA, 920 bp, Homo sapiens
  misc_feature (1)...(920): n = a,t,c or g
atggaacgatttgaggtgctgggcattcccttcagtttgcagctttgggataccgctgggcaggagaggttcaaatgcattgcatcaacctactatagaggagctcaagccatcatcattgtcttcaacctgaatgatgtggcatctctggaacataccaagcagggggtggccgaatgccttaaagaagaataaccctccagggtggttctttttcctgttaggtttcaaaaaggatttgagtacccctgctcaagtatgcgctgatggagaaagacgccttcccaggtgggcccaggagattaaaggctgagtactgggcagtctcatctctcactggtgagaatgtccgagaattcttcttcccgtgtggcagcactgaccttttgaggccaatgtgctggctgagctggagaaaatcggggggctcgacgtcattgggatgtttgtccgcatcaaccagtgatgacagcaaacctctacctaactgccagcaaagaagaagccccacatgtttgcccatgagggctggagggagactgtttcagagactgccccagcccttagggaacttgtggccacccttcatttccttccagagcttgaacccctgggacattttgcactggactttnattccagaccaaagagctggcctcttgggtgggcagttatttcccacagaggggttagctggggatcatgttagtcacttccttgcccccaaggcacccgtgccaaagacttgatgccccctaatttcttagggggactgttccaggggcgccccagtggtagtgagggagagtgtctctgttcttttgctcagcctgctgggccctttgtgtttgaggatgcttaatgattccagcctctcactgtgccttatgcattaccatttctttgttacgaaaaaaaaa

SEQ ID NO: 157684 - DNA, 405 bp, Homo sapiens
ttttttttttttttgcccgaaatgacaagtaccgtttattgtcgttacacaaatgaacccagcctctggttgggcaccgtccacggaccagcagatgagcatggtcagccgacccctttccccacccccgagtcatgtgcagtcatacactccaggcagaaagtcgcagtatcgaataccggacacaggttcccttggcttggtggtgcatctctgatccacagactggcccacctctcggagtggccaacgagtcgctgaaacgttgtcaaataagcaagtaagtgctacaggtgtgtgagccttataaaaccttggctgaacctaccgacctccaggagaatttcagccaaaacaaaaaagcaaatacacagagggaccctggaaccagaatccctccccatg

SEQ ID NO: 157685 - DNA, 562 bp, Homo sapiens
caggtgctttgcaagatatcgccctgtccatgcagaccccctctactgtcaaggacacgcagctcctgtcggctattccacagtctctagaactcacgcgcctggaggctacagctgcctccacctccaccatacacggctgtagaggggcccaagtagggagaggctgtagtcctgccagaagtggagcctggcctcaccgctcgggagcagtagaccaccccctgacgcagggagaccacacagctcccgaccactcatcaggcctcaacgaccacagccaccacggcgcaggagcccgccacctcccacccccacagggacatgcagcctggccaccataagacctcaacccctgcaggacccagccaagctgaccttcacactccccaaggccaggttctccgttagctcctgtggccccaccctgggccctgggctggaatcaggaatattttccaaagagtgatagtcttttgcttttggcaaaactatacttaatccaatgggtttttccctgtacagtagattttccaaatgtaataaactttaatataaagta

SEQ ID NO: 157686 - DNA, 331 bp, Homo sapiens
  misc_feature (1)...(331): n = a,t,c or g
tattacccagtttaccagaacccnccggcatgaggttacagttgccttccacttcccacctgccggtgaagaggggcnccaaggagggagaggctgtagtcctgccagaagtggagcctggcctcaccgcccgggagcaggaggccaccccccgacccagggagaccacacagctcccgaccactcatcaggccctgggctggaatcaggaatattttccaaagagtgatagtcttttgcttttggcaaaactctacttaatccaatgggtttttccctgtacagtagattttccaaatgtaataaactttaatataaagtaaaaaaaaaa

SEQ ID NO: 157687 - DNA, 496 bp, Homo sapiens
ttttttctaaactaggagacccaaatctggaagccaaaatgtaggcttagtttgtgtgttgtctcttgagtttgtcgctcatgtgtgcaacagggtatggactatctgtctggtggccccgtttctggtggtctgttggcaggctggccagtccaggctgccgtggggccgccgcctctttcaagcagaggccagaggcccccagcccagggctcctgcacttacttgcttatttgacaacgtttcagcgactccgttggccactccgagaggtgggccagtctgtggatcagagatgcaccaccaagccaagggaacctgtgtccggtattcgatactgcgactttctgcctggagtgtatgactgcacatgactcgggggtggggaaaggggtcggctgaccatgctcatctgactggtccgtgggacggtgcccaagccagaggctgggttcatttgtgtaacgacaataaacggtacttgtcatttcgggca

SEQ ID NO: 157688 - DNA, 2939 bp, Homo sapiens
caaattgtggctactaatttgccccctgaagatcaagatggctctggggatgactctgacaacttctccggctcaggtgcaggtgctttgcaagatatcaccttgtcacagcagaccccctccacttggaaggacacgcagctcctgacggctattcccacgtctccagaacccaccggcctggaggctacagctgcctccacctccaccctgccggctggagaggggcccaaggagggagaggctgtagtcctgccagaagtggagcctggcctcaccgcccgggagcaggaggccaccccccgacccagggagaccacacagctcccgaccactcatcaggcctcaacgaccacagccaccacggcccaggagcccgccacctcccacccccacagggacatgcagcctggccaccatgagacctcaacccctgcaggacccagccaagctgaccttcacactccccacacagaggatggaggtccttctgccaccgagagggctgctgaggatggagcctccagtcagctcccagcagcagagggctctggggagcaggacttcacctttgaaacctcgggggagaatacggctgtagtggccgtggagcctgaccgccggaaccagtccccagtggatcagggggccacgggggcctcacagggcctcctggacaggaaagaggtgctgggaggggtcattgccggaggcctcgtggggctcatctttgctgtgtgcctggtgggtttcatgctgtaccgcatgaagaagaaggacgaaggcagctactccttggaggagccgaaacaagccaacggcggggcctaccagaagcccaccaaacaggaggaattctatgcctgacgcgggagccatgcgccccctccgccctgccactcactaggcccccacttgcctcttccttgaagaactgcaggccctggcctcccctgccaccaggccacctccccagcattccagcccctctggtcgctcctgcccacggagtcgtgggtgtgctgggagctccactctgcttctctgacttctgcctggagacttagggcaccaggggtttctcgcataggacctttccaccacagccagcacctggcatcgcaccattctgactcggtttctccaaactgaagcagcctctccccaggtccagctctggaggggagggggatccgactgctttggacctaaatggcctcatgtggctggaagatcctgcgggtggggcttggggctcacacacctgtagcacttactggtaggaccaagcatcttgggggggtggccgcttagtggcaagggacagagtcccaatttgttttcgtggggaggtctaatctagatatcgacttgtttttgcacatgtttcctctagtttctttgttcatagcccagtagaccttgttacttctgaggtaagttaagtaagtgattcgggtatcccccaatcttgctttcctattctatggtcgggagcaagcatcagggttaagaagactttttttttttttttttaaactagaaggaaccaaatcctggaagccaaaatgtaggcttagtttggtgtgtgttctcttgagtttgtcgctccatgtgtgcaacagggtatggactatctgtctggtggccccgtttcttggtggtcttttgccaggctggccaggtcagggctcccgtgggggccgcccgcctctttcaaagcaagtcgtgccctgtgtcccatgcggttagggccattgctgaaggcctgggcccgctgcccacgtttggagaagcccgtgtgagaagtgaaatgctgggactcaaagccttcagacaagagaggacttgtaggggagggcggcagggggcctggagatccctttctgcagccacccgcccgtccttgcctgtggggcccgtctccagggggctgcttcctcctaggaaattgactgaaggggtgtcttggggcatagctggctctgatcgcctccatccaaggcccaggttctccgttaagctccctggtggccccaccctggggccctgggctggaaatcaggaaatattttcccaaagagtgaatagtccttttgcttttggcaaaactctactttaatccaatgggtttttccctgtacagtagattttccaaatgtaataaactttagtataaagtagtcctgtgaatgccactgccttcgcttcttgcctctgtgctgtgtgtgacgtgaccggactttttctgcaaacaccaacatgttgggaaacttggctcgaatctctgtgccttcgtctttcccatggggaggggattctggttccaggggtccctctgtgtatttgcttttttgttttggctgaaattctcctgggaggtcggtagggttcagccaaggttttataaagggcttgatgtcaattttctgtgtttgccaagcttccaagccccatctttctaaaatggcaaaaaggaaaggttggaatggcccccaagaacagcttgaccctgaaggctgtggtcaacagcgggaggtgtgggagccgaggccttaccccgtcagacaccttgggacatcctcctccccacccggctggcagaggccagaggccccccagcccagggcttcctgcacttacctggttaatttgacaacgttttcagcgactcccgttgggccactccgagagtggggccagtctgtgggatcagagattgcaccaccaagccaagggaacctgtgtccggtattcgatactgcgacttttctgcctggaagtgtatgactgcacatgactcgggggtggggaaaggggtcggctgaccatgctcatctgcttggtccgtgggacggttgcccaagccagaggctgggttcatttgtgtaacgacaataaacggtacttgtcatttcggaaaaaaaaaaaaaaaaaaa

SEQ ID NO: 157689 - DNA, 1049 bp, Homo sapiens
tttttttttttgaaacaggtcactttaccctccttaggacccattttgggggggaaaaaccaacacattccagagctttccaagtcctttgaacttcaggttcacattcagggatcacacagttcctgccctgtttctcaggggcacagccaactggccaatccccgctgaaaaaggccctcccctgggccacagcacagggctgcacggtgcacgcatttccctgaaggcagccccttcttcggaagcagctgttccaggcctcggaacagggcctgggtatccgcgtggtgggctggcagctgacggcctgctcagtggagccaggagctaactcagaccccaaagcaagcagggggccagtggcggggcccagcgcccagcaggacacccatgccaagaaggcttgagcccccccaacatcccaaggaacaggagagacatggagtggcgctggaacagtcacgacaaggactttgcctccagcactgggacacacctgtgtttaagaccagccctctgctttcccagtcccggcccagccttggggcaatccttccatgggctcagcactgagaggtcttgggtctgccacgttctatagctctccagtcacccactcatccagggtaggaggggttctccctgccccccccccgtgggccttgggatctcaccctctccatgtcctgggggacagcctcgccctcagccggactgcatccctcctgggggcctgagcttcgggattcagtgggacaccaaagttcaaaggaccaggcacccaccacgggccctgccagcctctgccttccccagctggcctgggttctggcctgggtgaggatctggaagctgttggcaggactcaaccaagcaatgctctctagctccagggcagtaagccacaggaggcagcgccctgcagcctcccgtccacactgccagcaatgcccctggcccagtgagcccagacgctcctccaccccttccagaccaagctcaacgcctccaagaccagcaggccaaggccaagccctgccccagat

SEQ ID NO: 157690 - DNA, 665 bp, Homo sapiens
cccacgcgtccgcctgaacggtatcgtagaccgatgagtcttgggatgcttaccatgctacgatttggggatctttactgaccgggacttgggcgttcatgctgacgcccatgacttggtcgagaacctgataggacctgattgcttgatagattccttttctggccgaagggatcagaatccatggagacaaagtcacggtggcactgaggccgttccacgagaggatggaggcctgtttcaaacagctgaaggaaatggtggagaatgagtacggcgtccgaatcatgccctcaagtctggatgattgaagaggcatccgcccccggtccatggtgcgggccttcacgatgccttcctcatcccgccctctgtctgtggcctctgtctcttccctctcatcggacagcaccccttccagaccaggctccgacgggtttgccctggagcctctcctgccaaagaaaatgctctccaggtcccatgacaagctgtacaaggatgacctggacacggacaagaaggactatatgacgtataactggacctgcagacagtttcagatctctcgtgataaaatgaaacgcaccgacgtttccctgtacattatgctcgtctcacctaatcccaatctatcttactgattcagccatataccaaatacc

SEQ ID NO: 157691 - DNA, 339 bp, Homo sapiens; identical to SEQ ID NO: 122381

SEQ ID NO: 157692 - DNA, 519 bp, Homo sapiens
tattttatttttatttttattttattttatttcatttttgagatggagtttcacttttgttgcccaggctggagtgcaatggtgagatctcgactcactgcaatctccacctcccagattcaaatgactcgcctgcctcagcctcctcagtagctgggattacaggcacatgccaccacgcccggctaattttttgtatttttagtagagatggggttttaccatgttggccaggctggtcttggactcctgacctcaggtgatccacctgcctcggcctcccaaagtgttgggattacaggcatgagccaccatgccgggccaaccatgaagctcttaaatccacagtcagaggtaatcttttcacctcggaattcccacagcactctccttacaccactttcaagacatttaccacatcctatctcaatttctacttggtgtatacattatgctccattgcatactgtgagcatctccgcagaagaagccccatggctctttgcatgtccccagagt

SEQ ID NO: 157693 - DNA, 697 bp, Homo sapiens
ctgaagctcatcgactaggtgcagccacttggtgatgctggaatgccctgagacgggcaacgggctgctccacgaagtcctgctctgggagcccgagccctcgcccaaggctctaccggagccactgccggcgcctccagaaaacaagaagtagccgctgggccggcggggcatcgcttggtgagcacagccgcagcaggaggaggcccgagcctgcgccaggtctgcagcgcagaccacctgggcgggccgttcgctccggtgggcggggccaggtcagggagacccccccaggctgcctgggcggggcgtggcatccgagggagcccaacggacattccgctttccgcttccgtcccgcggggcccatcggggttttggggccgcaaccgggaccctcccggaaaatgaccttgtacaaaagctttccctccccttccccccaacgccacggccaaggcaggcccccccccccgctgttttccgtgtcaaccgtgtttgattttgggacccccgagccccccagggacccttgagggccccatcccgttatccgagacccttcctaccccccattcctcggcgctgggagctatttttgcccaaggggggggggatgggggggctggcgccaccgaacctgcacatctcaacttgtaactcaataaacagaagtgacaatcggaaaaaaaaaaaa

SEQ ID NO: 157694 - DNA, 317 bp, Homo sapiens
cagaggagagcttcacagcccatatgctgcgccaccgtggggtgcaacccttcccctgtgggcaatgcgacaaggcctatggcacccagcgagacctcaaagagcaccaggtggtacattcaggtgcccggccctttgcttgtgaccagtgtggcaaggcctttgcccgccggccctccctgcggctgcatcgcatgacccaccaggagccagctgcctatgccccttgcccatgctctgtgtggtgcggcccctggcagccagggcttcctgtggaaccatatgaggcttcatacatgaaaaaagcctttcttgcg

SEQ ID NO: 157695 - DNA, 672 bp, Homo sapiens
agcaaagaatgatataaagaaagagaaaaacaatataaaggacacaagggaggcacacagacaatcggagagagagcagtcgtctggactcacagagtatagagaatagtcccgtagtctcatgagcagaagtcacaggcaccaagctatcatgagtcacactgggttaggcttacctagaggaagcagctccaatatccctggagaaccaaagcccagttgttaaataacaaacaggccaaagaaactattcttatatttatgttgaagctcatgagtggtagcctctctgtacaagagagaagagtgaatacatgtgcacatcgtatagtcttgcacgttctagagtagggcaaactttgtgtaaaggagtgcagtggcgccatctcagctcactgtaacctccgcctcccgggttcaagcaattctctgcctcagcctcccaagcagatgggattacagatgcccaccaccacacctggctaattttttctatttttagcagagacagggtttcaccatcttggccaggctggccttgaactcctgacctcgtgacccacctgcctcggcctcccaaattgctgggattacaggcgtgagccaccgcgaccggctaataataaattttttagattttgaaggctacacatagtctgctacagattcttt

SEQ ID NO: 157696 - DNA, 461 bp, Homo sapiens
atcagatcgagcagctccatcggagattttaagcagcatgagtggagatcagcctaccattcgcaaggagaacttcaacaatgtcccggacctggagctcaaccccatccgatccaaaattgttcgtgccttcttcgacaacaggaacctgcgcaagggacccagaggcctggctgatgagatcaattacgaggactttctgaccatcatgttctactttctgtccatctaaaccatcatgtatgaggtcctacttttgctgtaaatttatctagtagtcttaattatcattgacctttttatataattattattttattgatagaatcacaatatctgtttctatttaccttatatactatattatttgatgagtaatacactctattgaattgactttaaatatcttgatcagagtacttcactatagtatttatatattcaatctttcttaagaatcg

SEQ ID NO: 157697 - DNA, 360 bp, Homo sapiens
  misc_feature (1)...(360): n = a,t,c or g
nnnnnnnnnnnnnnnnnnnnnnnnnnnnnnnnnnnnnnnnnnnnnnnnnnnnnnnnnnnnnnnnnnnnnnnnnnnnnnnnnnnnnntaaaattaatatgggaatacttctcaaactggtgtacagattcagcatacaccctgtaaaaaccccagctggactgtttaaaaaaacgaacaatgataaacagagtttgacaagcggatcctaaaatccatatggaaatgcaaggaacatatagtacccgaacaatgtttaaaaagaccgaagctaaaggacttccttctcaatttcaaaacttactatgaagccacagaatttaagacatcgtaggaccagcaaaaggatcgatacaaagaac

SEQ ID NO: 157698 - DNA, 436 bp, Homo sapiens
gcgtcgacttttttttttttttttttttttgagacggagtctcgctctgtcgcccaggtgggagtgcagtggcacaatattggctcactgcaagctccacctcccgggttcacaccattctcttgcctcagcctcccaagcagctaagaccacaggcgcccgccaccatgcccagccaattttttgtatttttagtagagacagggcctcaccatgttggccaagctggtctcgacctcctgaccttgtgatctgcccgccccggcccaccaaagtgctgggattacagacatgagccaccgcgcccggctgatagtttcactctttaaaaggcaaaaaacatatggtaacaactagggactgtttaaaattgccttgtcccaaaaaaattaaccaaaatctaccagcattattacaaacacgaaagagaattaaa

SEQ ID NO: 157699 - DNA, 336 bp, Homo sapiens
  misc_feature (1)...(336): n = a,t,c or g
cggggtgatacgggtcggacgttggcacagcgaggggccaggagctctgggttccaactgtgtgaatccgggccgccagttaaccagtgccgggtaaccgcactaatatgggaaagctcgagccgccatgcccacgccctctctggtgaggcctgttctcaaagtgggccacagtccgtcacctgaagtcagtggttcagccgcggaaattgccccctggaccatctcttctcctctccanganccatcctcactccctgggccagcctcttctccaatgccaattcccaactcctctccccttgctagtcctgtgtcctatacagtcctcgtgcc

SEQ ID NO: 157700 - DNA, 371 bp, Homo sapiens
  misc_feature (1)...(371): n = a,t,c or g
cgatcgaggccagaactaaatgattataaagataagaaagcagctactaagaatgtgcaaaagaaatgaatgcagagacaaaaaggaacattgcgattgatgccacagaaacacaaagaatcattagagactgttatgaacactataacaaaatgnnnnnnnnnnnnnnnnnnnnnnnnnnnnnnnnnnnnnnnnnnnnnnnnnnnnnnnnnnnnnnnnnnnnnnnnnnnnnnnnnnnnnnnnnnnnnnnnnnnnnnnnnnnnnnnnnnnnaaagtctcccatcaaagaaaaactcaggatctgagggcttcactgctgaattctaccaaagatataaaacaccacttatactcaaactattcaaaaaaat

SEQ ID NO: 157701 - DNA, 406 bp, Homo sapiens
ggcacgagcggcacgagtttttctccataggacatctcttaatttgagcaatggaggaacacaatgttagaaaaccatggttgtccatgatgatgaatatagtgaaccctgcatgaccccatccaaggagggcactctaatcgtacgccagactcagtccgctagtagcacactccagaaacacaaatcttcctcctcctttacaccttttatagaccccagattactacagatttctccatctagcggaacaacagtgacatctgtggtgggaatttcctgtaattggatgagaccataatccattaatgcattatcctactcagaaaggttcattgtctttctgaatttctactcatcacttatcctcaaagtgcattctgtgtaattttcttacactactgcg

SEQ ID NO: 157702 - DNA, 367 bp, Homo sapiens
ggctcacttttgccacttctgttcaacataatattggaagttttagctaaagcaatcaggcaagaaaaaagcatccaaaatgaaaaggaaaaagtataattatctctgctgacagatcacatgatctcatgtaaaaccctacagttaaaaagttaactacctgaaagctataaaatgttgctgaaaggaaattttaaaagacataaagacatcctgtattcatggataggaagactcactattgatgtcagttttattgtatattgatgtcagttttatctatagccctcagtgcactctcaaagcagtcaattattttgtggatggtgacaaaattactctaaagtttattatggaatctcgggcc

SEQ ID NO: 157703 - DNA, 501 bp, Homo sapiens
gaggcctgctgtgaactgactctgcagccactgcgtcgcttccctttggatgctgccatcattttctccgacatccttgttgtaccccaggcactgggcatggaggtgaccatggtacctggcccaagctggctatgaggtggttgggcttgactggacagtggccccaaagaaagcccgggagtgtgtggggaagacggtgacattgcagggcaacctggacccctgtgccttgtatgcatctgaggaggagatcgggcagttggtgaagcagatgctggatgactttggaccacatcgctacattgccaacctgggccatgggctttatcctgacatggacccagaacatgtgggcgcctttgtggatgctgtgcataaacactcacgtctgcttcgacagaactgagtgtatacctttaccctcaagtaccactaacacagatgattgatcgtttccaggacaataaaagtttcggagttgaaaaaaaaaaaaaaaaa

SEQ ID NO: 157704 - DNA, 930 bp, Homo sapiens
cccacgcgtccgcccacgcgtccgctcagattcaggttaaattgtggattgagctcgcagttacagacagctgaccatggaagcgaatgggttgggcctccagcgtatacatactgacacctacccccacccccacctgatcgccagacctcagggttttccggagctgaagaatgacacattcctgcgagcagcctggggagaggaaacagactacactcccgtttggtgcatgcgccaggcaggccgttacttaccagaggttagggaaacccgctctgcccaggactttttcagcacgtgtcgctctcctgaggcctgctgtgaactgactctgcaggcactgcgtcgcttccctctggatgctgccatcattttctccgacatccttgttgtaccccagatgttttctccccctccaggcactgggcatgggaggtgaccatggtacctggcaaaggacccagctttccagagccattaagagaagagcaggacctagaacgcctacggggatccagaagttggtagcctctgagctaggcttatgtgttccaagccatcacccttacccgacaacgacgtggctggacgtgtgccgcctgattggcctttgctggtgccccatgggaccctgatgacatacatggttgagggtggtggctcaagcaccaatggctcaggccaagcgctggctctatcagagacctcaggctagtcaccagctgcttcgcatcctcactgatgctctggtcccatatctggtaggacaagtggtggctggtgcccaggcattgcagctgtttgagtcccatgcagggcatcttgggccacagtttttcaacaagtttgcactgccttacatccgtgatgtggccaagcaagtgaaggccaggttgccgggaggcaggcctggcaccagtgcccatg

SEQ ID NO: 157705 - DNA, 611 bp, Homo sapiens
tttcagactaaattttattaaatatggtgtcatttggctacaatcggtttgtctttataaaactaagtaacttattttgtagtaaaaacaaccccaacccactgcccctctttggcagcccttgaaactcagttcaaagctaggcctggctcccggccatggcccctgctgccttcacctgctgagcgctctaggaagcctcccaggacttgtaccctggctgccaagcagggtggggtgttttcatgaggattgcttttaaccaaaagtcctcagccttctgcagacccagggcagaggcgagttgctctacatcatgtgctttaagtagagccctttgccagccaggaggcccagccacccccttccctgccctgtggctttgcggggagacacagagtcacctcaaggccccagcccactcagcgcacggtgcacacatccaggatgcagaagcgtgcgcggcaggtggggcagggcacgcggctggccagccaggtgtcagggcgcagggggtcctggcggctggcgaaccacttgcccatgcaggtgaggcaccacatggggcggcagtaacactgctggcactcgcctgtggctgcctcctggca

SEQ ID NO: 157706 - DNA, 779 bp, Homo sapiens
atgacaaaagtttggttttaatatcgggcaacacaaaacacagtacatcacttcagactaaattttattaaatatggtgtcatttggctacaatcggtttgtctttataaaactaagtaacttattttgtagtaaaaacaaccccaacccactgcccctctttggcagcccttgaaactcagtttcaaagctaggcctggctcccggccatggcgccctgctgcctccacctgctgagcgctctagggaagcctcccaaatcccaaggggtagggcccccggagtccattacctttgccttaaacagccaaggcccagggggcttttggggccgcaaggtaatgaaaggcccctcccaagtaagccacacctgtgtgcagggctgtgcctgggggggcctgggccaacatcccccctcccctttgaaaccatcaggaactgggcaagacgcccaccagaggcttgaccacagggggcgtgcatccccttctgagcctgggagaccctaggggagtggggtagccctgggtatgaacccctggtgggcttgtgttctggatgtcgctatggcactttggtcctcaactcaaacccccacccctacccaggagtctgagacctcggccttccctggacttgttgggcagaaaaaggcaccaaggacaggatgagaaacccggaggggcagccccacaaatgagggcgctctgacctgtcctcccattgccaccccacccaggaacagcccctcaactggtcacagccaccaggaagcccca

SEQ ID NO: 157707 - DNA, 492 bp, Homo sapiens
  misc_feature (1)...(492): n = a,t,c or g
tggggatagacttgaactcgatncccctngtttcgctcttgttggccaggctggaacgcagtgatgcgatctcggctcagtgcaacctccacctcttgggttcaagtgattctcctgcctcagcctccttagtagctgagactacaggcatgtgccaccatgctggctaatttttgtatttttagtagagacagggtttcgtcatattggccaagctggtctcgaacccctgacctcaggtgatccacccatcttggcctcccagatgctgggattacaggcgtgagccactgcgcctggcctaattgtcattttcgtttttttgttgagacagagtttctgtcacccaggctggaatgcagtggcacgatctcagctcactgcagcctctgcctcttgggttcaattgattctcctgcctcagcctcccaagtagctgggactacaggtgtgtgccaccacacccagctaattttttcatttttagtagan

SEQ ID NO: 157708 - DNA, 462 bp, Homo sapiens
  misc_feature (1)...(462): n = a,t,c or g
tctatatactagcaataactagaaaacagctttttgaaaaccttaccacttgcaatagcatgcagaaatattaaatacatgaatttaacaaaatgtgagagctgcaaactgagagaaattaacagatctaaataaatggggcagtacaccatgttcaacaattggaaaactcagaattgttaaaatgtcatttctccctaaattgatctataaatcccagaagactttctttttgcagacattgataaaannnnnnnnnnnnnnnnnnnnnnnnnnnnnnnnnnnnnnnnnnnnnnnnnnnnnnnnnnnnnnnnnnnnnnnnnnnnnnnnnnnnnnnnnnnnnnnnnnnnnnnnnnnnnnnnnnnnnnnnnnnnnnnnnnnnnnnnnnnnnnnggaattccaccgcatggactagtgtctacgattaggggtttcaaatnnnncnnntcttnnnngaattcc

SEQ ID NO: 157709 - DNA, 1264 bp, Homo sapiens
  misc_feature (1)...(1264): n = a,t,c or g
tttttttaaattggaaaagtaaaatactttattccacagatgacatgattatctacatagaaaatgctaaagaatctagaaaaaagctactagaataagttaactgatctaagttgcttgatacaagatcaatgtacaagtctaatgcatttctatatactagcaataacttaggaaaaccggctttttgaaaaccttacccacttgcaatagcatgcaggaaatattaaatacatgaatttaacaaaatgtgagagctgcaaactgagagaaattaacagatctaaataaatggggcagtacaccatgttcaacaattggaaaactcagaattgttaaaatgtcatttctccctaaattgatctataaatcccagaagactttctttttggcagacattgataaaagttgttttttttgagacagtttcactcctgggttgcccaggctagagtggcnatggccacgatctcaagctcactgaaaaccttccaacctcccaggttcaagcaattctcctggcctcagcctcccgagtagctgggattctacgagcgcctgccaccgacgcctggctaatttttttgtatttttagtagagatgtggtgatgcatgcctacagtcccaactacttgggaggctaaggaaagagctcacttgagcccggatgttcgaggttacattagctgtgattgtgccactacgctccagcctgggcaacagaatgagatttctgcctcaaataaaactacagtaatcaatatagtgtcatattggtgtaaagttatacacacaagaagaatggtgtccagaacagaccacttctatgtcacttcgagtttttacaaacctgtgaagacttggtcattgggaaagtagagtctcaacaaatagaaccgaaccaaccaaccacacagataaaaaagtgaatcttgacccttatcacatatggtacacaaaaatgaactcaaaatggatcacagacttaaatgtaaaaggtaaaactataaaagttccataaaaataaaaaacataggaaaaaatcatgtcctttgagtaggcaaatttcttaaactcaaattattataaaatatcataaatcattattattattatcttggtttactgcaacctctgcctcctgggttcaagtgattctcctgcctcagcctcccgagtagcagggactacaggggtgtgccaccgacccagataatttttgtatttttagtagagacggggtttcacacgttggccaggctg

SEQ ID NO: 157710 - DNA, 407 bp, Homo sapiens
gatgtttgcaagcctgacctgacggttggcctgcgatacgcacctcaccaatataaaagcgtggttgccacgaacctgccagaggcaaaatactgtttcttgaactggattgctgacctctctaaagctgccccacggaacaatgacagccctgggcactagcgctcaagcgtactatggctaccggaaacaggagcagatcctgctctgagaagaggatgcccttacaggaaccaatgagtccctggaacgccagatgcgtgaaatggaagagaactttgccgttgaagctgctaactaccaagacactattggccgcctgcaggatgagattcataatatgaaggaggaaatggctcgtcaccttcgtgaataccaggacctgctcaatgttaagatgggccctg

SEQ ID NO: 157711 - DNA, 3345 bp, Homo sapiens
atgaacatcgatgcaaaaatccacaataaaatactggcaaaccgaatccagcagcacatcaaaaagcttatccaccatgatcaagtgggcttcatccctgggatgcaaggctggttcaacacaagcaaatcaataaatgtaatccagcatataaacagaaccaacgacaaaaaccacatgattatctcaataaatgcagaaaagacctttgacaaaactcaacaacccttcatgctaaaaactctcaataaattaggtattgatgggacatatctcaaaataataagagctatctatgacaaacccacagccaatatcataccgaatgggcaaaaactggaagcattccctttgaaaactggcacaagacagggatgccctctctcatcacttctattcaacatagtgttggaagttctggccagggcaatcaggcaggagaaagaaataaagggcattcagttaggaaaagaggaagtcaaattgtccctgtttgcagatgacatgattgtatatctagaaaaacccatcatctcggcccaaaatctccttaagctgacaagcaacttcagcaaagtctcaggatacaaaatcaatgtgcaaaaatcacaagcattcttatacaccaataaaagacaaacagagagccaaatcatgagtgaactcccattcacaattgcttcaaagagaataaaatacctaggaatccaacttacaagggatgtgaaggacctcttcaagaagatctaccaatcactgctcaatgacataaaagaggatacaaacaaatggaagaacattccatgctcagggataggaagaatcaatattgtgaaaatggccacattgcccaagtgtctaccaaccacctgcatccacatgataagacctcagtttagagttagcagtgtgaggagagacttcaattcagaggtagcaatggaagaacttaaacaaacgaggaaacccatctttctggcaagggaggtgcgaacactcaccagtttccccattttccaaccctatggttttcttattctacgtggccacagacaggaacaattcactagcacagtggttctcagaatcacctggacaaaaggtatactagtgattcaggtaaatccttggctgaccacactggaagctggcatctccaaggctcccgacaaaccctggaacccaagccaagttgctcctgcactaccccagaagccagctcaggtccttggcttgtggcttgctttttctgtcaacagaacatggatgcagctggagaccatcatccttagcaaactaatgcaggaacagaaaagcaaatactgcatgttgtcacttataagtgggagtgagtcagtcagcaagcgtcgcattgccctgggatcggcactgcacgtagaaggcccgaccgcacacagcaaggcgatggcccagctgtccccgcgccagagacgcagccgcgctcccaccacccacacccaccgcgccctcgttcgcctcttctccgggagccagtccgcgccaccgccgccgcccaggccatcgccaccctccgcagccatgtccaccaggtccgtgtcctcgtcctcctaccgcaggatgttcggcggcccgggcaccgcgagccggccgagctccagccggagctacgtgactacgtccacccgcacctacagcctgggcgacgcgctgcgccccagcaccagccgcagcctctacgcctcgtccccgggcggcgtgtatgccacgcgctcctctgccgtgcgcctgcggagcagcgtgcccggggtgcggctcctgcaggactcggtggacttctcgctggccgacgccatcaacaccgagttcaagaacacccgcaccaacgagaaggtggagctgcaggagctgaatgaccgcttcgccaactacatcgacaaggtgcgcttcctggagcagcagaataagatcctgctggccgagctcgagcagctcaagggccaaggcaagtcgcgcctaggggacctctacgaggaggagatgcgggagctgcgccggcaggtggaccagctaaccaacgacaaagcccgcgtcgaggtggagcgcgacaacctggccgaggacatcatgcgcctccgggaaaaattgcaggaggagatgcttcagagagaggaagccgaaaacaccctgcaatctttcagacaggatgttgacaatgcgtctctggcacgtcttgaccttgaacgcaaagtggaatctttgcaagaagagattgcctttttgaagaaactccacgaagaggaaatccagtgacctgcaggctcagattcaggaacagcatgtccaaatcgatgcgaatgttccatagcatgacttcacgactggcccgacgtgacgaacgtcagcaatatgaaagtgtggctgcccaagaacctgcaggaggcagaagaatggtacaaatgtcaagtttgctgacctcttctgagggcttccaaccggaaccaatgagccccttgcgccaggccaaagcaggagtcccactgagttaccggagaacagggtgcagtcccctcacctgtgaaagtggatgcccttaaaagggaaccaaatgaagtcccctggaacgccagaatgcgtgaaaatggaagagaacttttgccggtgaaagctgctaaactacccaagaccactattggcccgcctgccaggatgaagattcaggaatatggaaggaggaaatggctcgtcaccttcggtgaataccaatgacctgctcagacgttaagatgggcccttgagcattggagattgccaccttacagggaagctgctggaaggcgaggagagcaggatttctctgccctcttccaaacttttcctccctgaacctgagggaaacttaatctgggattcactccctctgggttgatacccactcaaaaaggacacttctgattaagacggttggaactaggagattggacaggttaatcaacgaaacttcttcagcatcacgatgacctttgaataaacaattgcacaacactcagtggcaggcgatatattacccaggcaagaataagaaaaaaatccatattcttaaagaaacagctttccaagggcctttctgcagtttttcaggagcgcaagatagatttggaataggaataagctctagttcttaacaaccgacactcctacaagatttagaaaaaagtttacaacataatctagtttacagaaaaatcttgtgctagaatactttttaaaaaggtattttgaattccattaaaacctgctttttttttttccagcaagtatccaaccaacttggttctgcttcaataaatctaaggaaaaactcca

SEQ ID NO: 157712 - DNA, 451 bp, Homo sapiens
  misc_feature (1)...(451): n = a,t,c or g
cccacgcgtccggtggaatggaaagttcagaaacaaattatttcaatacactatggtcaatagattgttgacaagggttccaggaccattcaatgaagaaagaacagtgtcttcaactaatagtgctaagacaagtgaatattcacatgcaaaagaatgaatttgtacctgtacttcatnnnnnnnnnnnnnnnnnnnnnnnnnnnnnnnnnnnnnnnnnnnnnnnnnnnnnnnnnnnnnnnnctttgagaagaaaatacaggaataaatcttcatgaccttggatttggcaatggtttcttagatatggcaccgaaagcacaagcaacaactgcttaactgnnnnnnnnnnnngacaacatccccttttatccctttctactttctggggtcctttttggaaagggtgaagcaccctccgcccaggggggataattattggtgtattttt

SEQ ID NO: 157713 - DNA, 2526 bp, Homo sapiens
ggcacgagaatgcacttaatccttataacaaccttatgaggtagttctatggccctttttatagcttaaggaaattggggtacagagaagttagccccaaggttatatattgcaagtaaagtggcagagcagggattcatacaaagaccttctcactcagcagtcttcactcttactattcctgccactaggtagaaaaagaaagatttcggccgggcacagtggctcacgcctataattcccagcactttgggaggctgaggtgggcggatcacgaggtcaggagatggagaccatcctggctaacacagtgaaaccccgtctctactaaaaataaaaaataaaaaaaaattagccaggcgtggtggcgggtgcctgtacgcccagctactcgggaggctgaggcgggagaatggcgtgaacccaggaggaggagcttgcagtgtgccaagatcgcaccactgcactccagcctgggtgacagagcgagactccatcaaaaaaaaataaataaaaaaaaaataaaagatttcattttatgtgaggaattattttaataaaaaaaagagggtttatgctctatagtaataaaatttaccagtaacacccaatcagaaaattttggttccttagtatttagggaagacttttgtttaaatctcttatggaattttacatgttttgatttagaaaagtagatgcaatataatatatttcaagttttatacatattagatgaattgcatggtattttaggcaacttaactataaacaaatttattcatagaagcattgttgccaacaatttagatgacctcgatgaaaaaacacaccaattgacaaaactggctcaaaaggaaataaaaaatccaaacagacctgtaacaagtaaagagattgaaccagtaatcaaaaatctccccaacaaaggaaagtccggggctaaatgagtttactgggcaaactatggccaaacatattaaaggaaggaattaacactaatccttcttgaactctcccaaaaaatggaagagaaaggagcaccctgtgacattctataaggcggacattaccttaacaccaaagccagacaaagacctcacagggaagctacagaccaatatcccttatgaatatagatgcaaaaaaacttcaaaatactagcaggccaaatccagcagcttattaaaatgatcacacagcatgacccaagtgagatttatcaaagaaatgcagggatggttcctacatacaaatgtcaatcgatgtaataatataccatattaatagaatgaaggggaaaaaacagcatgatcacctcaattgataagaaaaagcatttgacaaaaatccaacaccctttcatggtaaaaacactctgcaaactaggaagaaaagggaactttcttaacctgataaagacatccataaaaacccacagctaacaacataatagcaaaacattgaaaatttttcccctaatatcatgaaaattcctgatttccccactgctattcaacattatactagaaggtctagccagagcaattaggcaagaaaaagaaataaaatgaatcccaaataggaagaagtaaaactacatttgcagaaaacatggtcctatatattaaaaatcctaaagaatccacaaaatgattccggctgattttaaaaattcagcaatgttgcaggttgcaagatcaacacacaaaagtctaagaaaaacctgaggggaaattaaaacaatttcatttacaataacatgaaaaagaataaaatacttagaaataaatttgaccaagaaagtgcaagacttggacactgaaaagtacaaaacgttgctgaaagaaattaaagaagacctaaataaatggaagacatcctgtgctggcaggttggaagacttaacattgttaagatggcattactcccaaaattagtctatagatttaatacaatccccattaaaattccagtgacccttttacagaaactgaaaagctgaccctagaatttatatggggattgcaagttactgaaggtactcaagtctgttcaaaacaatcttgaacaagaataaagttgaaggactcacattttccaatttcaaaatttactgcaaagctacttcaatcaaaacagtgttgtgctggtataaaaatatataaagcaatagagtagaatggaaagtccagaaacaaattacgccaattccacttatggtcaattgatttttggccaaggggttccaggaccattcaatgaagaaagaacagtgtcttcaactaatagtgctaagacaagtgaatattcacatgcaaaagaatgaatttgtacctgtacttcataccatatataaaaacttaattcaaagatagatcaaagaccctaaatgtaagagcgtaaacccaataaaactttgagaagaaaatacaggaataaatcttcatgaccttggatttggcaatggtttcttagatatggcaccaaaagcacaagcaacaacagcaaaaaaaaaaaaaaaaa

SEQ ID NO: 157714 - DNA, 641 bp, Homo sapiens
taaaaaaataaaaaacataaaaggttcaatacagcaagaaggtttaacagttgtaaacatgtatgctcctaatgacaaaccatcaacatatatgaaacaaaaattgacgtaattgaagggagaagtacaattctacattaatagttggagtctttaatatcactatctcagtagtggatagaaccatcaatatctaagcaaggaaatataggactttcacaacacaataaaccaactagatctaacaaccatatacagaacactctacccaacaatgaaatacacattcttctcaagtatacataggataaattccaagataggtcataaattaagtctgaattgattttaaaagacagcaaaatatcttccctgaccacaatgggatgaacttagtaatcatacccaaaaagaaaactggaaaatttaaaaatcatagaaattaacacactcttaaccattagatcaaaaaagaaaccacccggcattggttgaaaatcaccccccggctttggccatggcagcgggtgagattcggcgcccagagcctccaggggcctcagctcaccgcacgctgacacatgtgcggcggtgaaacccagccccaacaggccccgcggcctctccctgggtgcggccgc

SEQ ID NO: 157715 - DNA, 377 bp, Homo sapiens
ggcacgaggtacttgacagagaaaggcctgcgcaccgagggcctggtccggagatccgtcagcgtgcagaccgtccgtcagatcctgaggatctacaacctagggcagcccgtgaactttgacgactacggggacatttacatccctgccgtgaatctgaaaaccttcctgcgagagctggccgagtcgcttctgaccttccaggcctacgatcagattctcgggatcacctgtgagtatctgccctggcgcaggagtggagggcttagtcctcacatgctgtccctgatctactggcccatggtcaggctctggggtggccgaggtgacgtgtacccatcctgctactgttgccatatggcactgtacggcatgag

SEQ ID NO: 157716 - DNA, 893 bp, Homo sapiens
tccatttcttctcaacaaacttgatcttcctgggccccttgctataggtcccttccagcttctacctgggcttcctctctttgttcatcctcttctctctcaatttctttttccttctcatctgtatactcatctcctcctggttcctccacacctttagcctccatactgtcagccttcttctgacctttggacttctcttccttggcctctgtctcttccctactcccttctctcaatctgacttttgtctcttggcttcccccagcctcccctctatcctcactggcctttccagcctccaccttggtctctggacttccctctgcctcttccctgatgtctagcctgcctccaggctcagcctgcttgtcctccccaacttcccagcatgcctgctcttccccaccctgtcccagagcctgccttccacatcctgctgcctctccctccagactccctgaacccttccagattgggggtttaggtcccagaaggggacttaggtcatcataggcactcaggaaaacttcctccccattttcctcctcaacttcaggcctggggccagcggagtccagggaacagcagctgggggccaagacaaactgtgcctcatccagagacaggtcatccaggtgtggctccacagagaactcctccacgtgaggcccaactcccaggagctcctccaggtagcccatcccagggtcgtcctccccaggggagaaggctgctcctgctgcttctgcgtgggccgcctccccatcctctgcccccacccactcaggttatgagctgcttgagtcctctaggaaggagaaggagtcctgcacctcctgggacagcgagtcctccagggcaggagccaagtcgtctgggcctgagtctgc

SEQ ID NO: 157717 - DNA, 1429 bp, Homo sapiens
gccactatggtgagtaagccgtgcggtttccggctgcttttatggaagcagggaaaagcgagccggcggggcgctggggccctgtatacagccgggaagggctggcctcagagccgtccgtttggagggcggaaaacgagtcgagaggccagggcgggagtggtgagacctcggtgtgtgtaaatagcgggggcccggaaaggtcgaggggcgccaggatttcttctcggactctggaagggatggggggctcgggctgccctccgccgtatccggagctctcttttgtcgcgtaactgtgtcctgggtgcggtccctcgagtccccgcagtcctttccagcgcatgcccttactccgccttgggtggacgcgcgccgcgacttttccagcccttactttctcttgagcgcgaaaagcgggggtgggaagcagctggagacaaaagcgcgcacgcgcgaccgttaccttcccgccgctcctgggcgggaaaccgccactgcgctttgcgcatgcgctctgggtcgcgacgcgactagggctacagggcgtgtctcctgttaacctgagtgttctttttttgatgaaagcaataagaggactgcggaagagctccctgtcaatgtaccgctctacaccagtgtattacgacagttcgtacacaacagtctgtagaggccacctgtctctccctgctgcgttaggaattcaggggagcaggtggtggcagtaagggattttgagggaacggaaatcggatcttgacccagatctgggccgccgataatctcctactgcgctcagactgctgtggaggtgttaggctgagcccgatgccggcaggcaagggaggatgggcggcttgtgcagcgcctttgcagacgtggccatttcgtgcctctgcagcaccgccggggggcgcaagagcgcgcgcccggaattgctcattcatcctgtgccgcagagccccgccccttgtccctgcggacagacatttcttctgcgctggtctggccacgggcttcctgtgctaggagctgcccggaaatgggaccacctaatctaaagtgggcttctggggcctgaacgctggaggaatgcccaccttctgtctgggtctccaaggaagaacctggactaaccgcctggactggaagagccctcccggttagagggaggcactccttcaagcgctttacttaagggacagctccaacatatctccctccatacgccttggaggacctgcctaaaccgacatcggcttgcaacactctccaagcacctatcctccacacgtgttacccatccccccaacaccttcgtcctggcgggtcgtggcagtcggtgctctctgctcgcgccaggataacttgcacgaccaaccccgcctctgacgtataagcggtctgcgtccgccctgacaacttc

SEQ ID NO: 157718 - DNA, 1720 bp, Homo sapiens
tgatgttaatgactttactttgagatatgatggaaaaatattacaggtacacatggaaaagacatgatcaccaagtgaaaacaatctaaccagaaagctttaacatctgtcagttaagctgaagctgaaattctgggagcatgacatgctgcagggccaaaaggaatggataattagtattcctctccttcttcctcaccctctccttcaacagaatccacaccaacctcctcataatccttctcaagggcagccatatcttcacgggcctctgaaaactcgccttcctccatcccctcacccacgtaccagtgaacaaaggcacgcttggcatacatcaggtcaaacttgtggtccaggcgagcccaggcctcagcaatggctgtggtgttgctcagcatgcacacagctctctgtaccttggccaggtctccaccaggcaccacagtgggaggctggtagttgatgccaaccttgaagccagtggggcaccaatccacaaactggatcgtgcgcttggttttgatggtggcaatggcagcattgacatctttgggaaccacgtcaccacggtacaacaggcagcaagccatgtatttaccatggccagggtcacatttcaccatctggttggctggctcaaagcaagcattggtgatgtctgctacagaaagctgttcatggtaggctttctcagcagagatgacaggggcatatgtggccagagggaagtggatgcgggggtaggggaccaggttggtctggaattctgtcaggtcaacattcagggctccatcaaatctcagggaagcagtgatggaggacacaatctggctaataaggcggttaaggttagtgtaggttgggcgctcgatatcgaggtttctacgacagatgtcatagatggcttcattgtctcccatgaaggcacaatcagagtgctccaggggtggtgtggtcggtgagaatgtagttgtagggttcaactacagctgtggcaagcctgggcgcccgggtaaatggagaactccagccttggatttcttgccattaatcaaactgagagacgttccaatgagcagggaggtgaaccccagaacccagttcccccaaccaaagctgtggaaaaccaaagaagcccttgaagaccggttgcactgggtcagccaagcttgcgaattcggtccaaacacaaggtccaatgatctccttgcccaatggtgtaaggtccctcggggcataggggggtttttttttaaaaattttttttgggggccagccatcttcccttgccctgtgaatgaagctgcctccagggtggaaagagcttggcggtaaggtgccaagtgcggaacttcatccaatgacttgtgggttccaagtctacaaacacaagcccggggcacggtgcttgccagcgccccgtctcactgaagaaggtgttgaaggagtcatctcctcccccaatggtcttgtcacttgggcatctggccaatcgggctggataccgtgttacaggcaagagagctcccaagcaggcattgccaatctggacaccagcctggccaacgtggatggagatgcactcacgcatagtggctagggattcaggaggcgaaggcgacaggagcatgacaccgggtcccggttaccgtccccgacaagctaagagtcgcggcacgagctcgtgccaagcttgacgtaatcagggtctgcggtc

SEQ ID NO: 157719 - DNA, 394 bp, Homo sapiens
cccacgcgtccgaaaccacccaattcagaaatgggcaaagaaggggcttgagtagccatctctctaaggaaggcccacaagggccatttcccacatgaaaaggtgtccagcatcaccagccaccagggaagccaaatcagagccacaggtgagacgcacctcagaggatgtggcaatatcggaactctcacgcgttgctagtggggatgtaaacgctgcagccattgtggaaaccagtctggtggttcctcagatcgctaagcataggattacgctgtgatctgtagcaactccactcctaagtgtatgccacaggcatgcaaaccaggaacacaaagagatcttcatacaacagtgtttactgcagcattgttcacagtagctgaaggacaga

SEQ ID NO: 157720 - DNA, 380 bp, Homo sapiens
  misc_feature (1)...(380): n = a,t,c or g
tgacacgagaacacacgtggcagaagaagataaactcgccatcatagtggaaccggagaaaaggggtaaatatgtggtctggtttgatccccttgatggatcttccaacatcgattgccttgtgtccgttgcaaccattttcggcttctatataacgaattcctcttgactaaccttctttcaatcatgcttctgtctacgtgacgtaatctgtatcttgtctctctcccatttcatttagctttcctctctacttttcatctttcctttctctttttttttctctccttcctctccctcttttcctatcttttttttctattctcttccttcttctcttctcnnnnnnnnnnnnnnnnnnnnnnnnnnnnnnnctccct

SEQ ID NO: 157721 - DNA, 1192 bp, Homo sapiens; identical to SEQ ID NO: 157631

SEQ ID NO: 157722 - DNA, 542 bp, Homo sapiens
  misc_feature (1)...(542): n = a,t,c or g
cgaaattaagaatattacagattcctagaagcaaaagaaaatagaaccgcaacttactaaaacttaaggaccacgcagcaaaagcagaattaagaggcaagtttatatcaatatatgcctacatcaaaaaactagaaaaatttcaaataaagaatctaacaatgcaatccaaaaaattagaaaaattttaaattaaaaaatctagcaatgtattccaaagagctagaaaagaacaaaccaaaccccaaattagtcaaaggaaataaatatcagagaaggaataaacaaaattgagantaaaccaatgccacaaaaaatcactgaaacaaccgttgcttagctagactaagaaagaccaaaataaataaatgagaaaagaaaaaggagacatcaaactgagcggacgcgtgggtcgtccggagtatctccagacggcnctcaaggnttcaaanngtgcgccggtggggggtttagccgcgatatgcgccgccgaactgcaccgcaatgactgcaagcgacgaggtgcaccgtcgaatgtaaca

SEQ ID NO: 157723 - DNA, 403 bp, Homo sapiens
atgccctacctcaacaagtacatcctggacaatgtggggcccagcttgtagggagcatctgtaacctctccccacttttccagcctggccagcagcctaataccttgccactccaactcttcgcccctgccataaactcctacttctgcctgctctgtccgtgactgctgtcccatcacgtccctcacatcccagccacctgcccccttcctgtccccctcaattcaccttcaatgtccctcatctctaatgaggtgggccccaccctacccataaccttccaccgaatccctgcccggccctcctccagcttccagggttctccacccttcccagactgtccccctgaactccccctccaactcctccaatctgtcactgtgtttccaggttcttggctcct

SEQ ID NO: 157724 - DNA, 433 bp, Homo sapiens
gcgttcttttataagagttttggtagtgtagggaggaagatgatgacctggttgaaagtgaagacagttaacaatggggagaaagcttgaaaagagtgagcttcactttgctggatgatgaggcaactgaagatgcaggtgatttaaatgtaaagaaaaattctgatgaagttaaatcctcttgaaaaaagacaggaaaaggagtcagcttaagtacagctccgcgtgttggttgcagaagtcgcctgtcttccccgcatgaggctgtttgctcgctttgacactgaatgctcccccaacaaacacgtttagcttgcttgcccttctcaccgactgcggagaggagtctcagtgcacagtcgcagagaaggcgtgcggtggcgtgcaggggctcacaggcgcctgcctctgcgggtgggaaaggaaggaggcg

SEQ ID NO: 157725 - DNA, 409 bp, Homo sapiens
  misc_feature (1)...(409): n = a,t,c or g
nnnnnnnnnnnnnnnnnnnnnnnnnnnnnnnnnnnnnnnnnnnnnnnnnnnnnnnnnnnnnnnnnnnnnngtaaatagaaatggaaatcaacagcagaaggaaattgaaaattcaaaaatatgtggaaattaaatgacacactgtaaacaaccattgggtcaaagaagaaatcaaaaaagaaattagaaaatacctcaagagaaatgaaaacaaaaacacaacataccaaaacttataggattcagcaaaacctgtactcagagagttcgttgtgataaatgcctacattaaaatagaagaaggatctcanataagcaacctaactttatacctcaaagacctagaaaaagaaattaaggccaaggttaacagaaggaaagatataaggattacagaagagataaacaa

SEQ ID NO: 157726 - DNA, 811 bp, Homo sapiens
aatgtgcagtaggtctgccggcgatggagtggtgggctagctcgccgcttcggctctggctgctgttgttcctcctgccctcagcgcagggccgccagaaggagtcaggttcaaaatggaaagtatttattgaccaaattaacaggtctttggagaattacgaaccatgttcaagtcaaaactgcagctgctaccatggtgtcatagaagaggatctaactcctttccgaggaggcatctccaggaagatgatggcagaggtagtcagacggaagctagggacccactatcagatcactaagaacagactgtaccgggaaaatgactgcatgttcccctcaaggtgtagtggtgttgagcactttattttggaagtgatcgggcgtctccctgacatggagatggtgatcaatgtacgagattatcctcaggttccctaaatggatggagcctgccatcccagtcttctccttcagtaagacatcagagtaccatgatatcatgtatcctgcttggacattttgggaagggggacctgctgtttggccaatttatcctacaggtcttggacggagggacctcttcagagaagatctggtaaggtcagcagcacagtggccatggaaaaagaaaaactctacagcatatttccgaggatcaaggacaagtccagaacgagatcctctcattcttctgtctcggaaaaacccaaaacttgttgatgcagaatacaccaaaaaccaggcctggaaatctatgaaagataccttaggaaagccagctgctaaggatgtccatcttgtggatcact

SEQ ID NO: 157727 - DNA, 426 bp, Homo sapiens
attttaaccattatttggtaaatatttagccattatttttttcaaaagtttttgcgtctcccttttataatgttcattatgcatttattaggctgcaaggttgatttatttatttttcagtgttttttccacttagtgttttattttggattattttactatttgaagttattttgttatactttcaagtttactaattgtttcctctatagtttctcgtttactgttcatctcatttagtatatttttccctcagatattatgtttttatatgtggaagtttaattcaagtctttcttttaacgttacctccctctttgtcatgttcatgcttttatttccttcttgaatatattgagtatcgttgttttctagttgataataattgaccatattttattgtccttacctacttttctaccatat

SEQ ID NO: 157728 - DNA, 353 bp, Homo sapiens
  misc_feature (1)...(353): n = a,t,c or g
nnnnnnnnnnnnnnnnnnnnnnnnnnnnnnnnnnnnnnnnnnnnnnnnnnnnnnnnnnnnnnnnnnnnnnnnnnnnnnnnnnnnnnnnnnnnnnnnnnnnnnnnnnnnnnnnnnnnnnnnnnnnnnnnngatatttcttcctgaaaaaaaactttacaaacttgaaaaatgggacagggcttttgacaacacctaaaacttttaaacataaaaaatcatactggggaaaaatcctaaaaatgtaaaaaatgggacagggcctttaaagggtggccacacttcattataggtaagatagttcatactgaaaaaaacttctacaagggtgaacagtgtggcaaaacttttaatga

SEQ ID NO: 157729 - DNA, 418 bp, Homo sapiens
  misc_feature (1)...(418): n = a,t,c or g
nnnnnnnnnnnnnnnnnnnnnnnnnnnnnnnnnnnnnnnnnnnnnnnnnnnnnnnnnnnnnnnnnnnnnnnnnnnnnnnnnnnnnnnnnnnnnnnnnnnnnnnnnnnnnnnnnnnnnnnnnnnnnnnnngataattcttactgaaaaaaaactctacaaacttgaaaaatgggacagggcttttgacaacacctaaaacttttaaacataaaaaatcatactggggagaaatcctaaaaatgtaaaaaatgggacagggcctttaaagggtggccacacttcattataggtaaaatagttcatactgaaaaaaacttctacaagggggaacaggggggcaaaacttttaatgaaggctcacaccttattgcacaggaaagcatttatacttgaaaaaaattgtccaaatataaagacg

SEQ ID NO: 157730 - DNA, 434 bp, Homo sapiens
  misc_feature (1)...(434): n = a,t,c or g
nnnnnnnnnnnnnnnnnnnnnnnnnnnnnnnnnnnnnnnnnnnnnnnnnnnnnnnnnnnnnnnnnngtctgtttattatatttctatgctcatttttaaattgggnnnnnnnnnnnnnnnnnnnnnnnnnnnnnnnnnnnnnnnnnnnnnnnnnnncccctaagcagatatatgatttgcaaatattttctctcattctgtgggttgccttttcactttgctgattgtattctttcgggcacaaaagtttaaaattttgatgtagcccaatgtatctattttttcttttgagacctaaaggtcttttaagatctcaaagatatactagttattttataaccaactacttaagaaattgagccagatttcaaaatatctgaattatattttaagcacaccattacaaagtagtggagaaagttataatacatcct

SEQ ID NO: 157731 - DNA, 510 bp, Homo sapiens
tttttctgagatagatagggtctcattctgtcacccaggctggagtgctgtggcgtgatttcggctcactgcaacctctgcctcctgggctcaagctgttctcctgcctcagcttcctgagtagctaggactacaggcgtgtgccaccatgcttggctaaattttgcatttttagtggagacggggttttgccatgttggccaggctggtcttgaactcttgactttgagtggtctgcccaccttgatcatgttgatctatataattgatcggcctcccaaagtgctgggattaaaggtgtgagccaccacacctggccccataaataccatttaaaaaatttaaatgtattctcttatcagtcaaaaagcacagttaataaccaactgagtagccaaatactgctactcaattaattcagaagacctcaggcccaagaatacctagaacagacttgagggttaatttatggtattcaatagctcttttcttcaaatgcagtttcttctg

SEQ ID NO: 157732 - DNA, 474 bp, Homo sapiens
cgcctgagtccatcaagagggccaaggagatggaccttgtggggctgggcctgcaccccctcttcagctcgcgttttgaggaggaggagctgcagcggctgaggctggtggacagcataaagaactaccgctcccgggcggacattttctcagaggtcgtgggccggaagcggcagcggtcaggacccaacaggggagccaagaggcgaagggaggaggcccggcagcgggaccaggaattctacatcccctaccggcccaaggactttgacagcgagcggggcctgagcatcagcggggaagggggagcctttgagcagcaggcagctggcgctgtcctggacttgatgggggatgaagcccagaacctgacgaggggccggcagcagctcaagtgggaccgtaagaagaagcggtttgtgggacagtcaggacaggaagacaagaagaagattaagacagagagcggccgct

SEQ ID NO: 157733 - DNA, 1069 bp, Homo sapiens
gcgggaggacaccaaggctgccgtgctgctccacctgctgcacaacgtggtgcggccccaggaccagaccgtggtgtttgtggccacgaagcaccacgccgagtacctcactgagctgctgacgacccagcgggtgagctgcgcccacatctacagtgccctagacccgacagcccgcaagatcaatctcgccaaattcacgcttggcaagtgctccactctcattgtgactgacctggccgcccgaggcctggacatcccgctgctggacaatgtcatcaactacagcttccccgccaagggcaaactcttcctgcaccgcgtgggccgtgtggctcgggctggccgaagtggcacagcctactccttggtggcccctgatgaaatcccctacatgcaggatctgcacctgttcctggggccgctccctcaccctcgcccgacccctcaaggagccctcagggtgtgggccggtgtggatgggcatgctggggtcggggtgccacagagtgtggtggacgaggaggacagtggtctgcagagcaccctggaggcatcgctggagctacggggcctggcccgcgttgctgataacgcccagcagcagtatgtgcgctcacgcccggcgccctcgcctgagtccatcaagagggccaaggagatggaccttgtggggctgggcctgcaccccctcttcagctcgcgttttgaggaggaggagctgcagttgcttgatgctggtgaacagcataaagaactaccgctcccgggcgactatctttgagatcaacgcctccagccgagacctgtgcagccaggtgatgcgcgccaagcggcagaaggaccgcaaggccatcgcccgcttccagcagggacagcaggggcggcaggagcagcaggagggcccagtgggcccagccccgagccgcccagcactgcaggagaagcagcctgagaaggaggaggaggaggaggcgggagagaagtgtgaggacattttctcagaggtcgggggccggaagcggcagcggtcaggacccaacaggtgagaccagaagcggggggaggg

SEQ ID NO: 157734 - DNA, 1012 bp, Homo sapiens
ctcccaagtcctggaacgggcctccccaccctccggggcaccgacactcacggagtcactccaacttctctgggtgctccgtggacgaagagcgctctaggacaagcaaggattcctcttctcctgtaaatgaccacagaggaagacaatgaatgaggtgaaagaatcccttcgcagcatcgagcagaagtacaagctcttccagcagcagcagctcaccttcaccgccgctctggagcactgcagggagaacgcccacgacaagatccggcccatctccagcattggacaaggtgcagatctacatggaacacttacttgcaacagcttccacagaccggcgggttctgctcatgttcctggacatctgttcagagctgaataagttctgccagcactttgaggccgtgcacttcttggcaccccagtcaccaacaacctccttggagaaattgcaaaaccctcgttaagccaaagcaaacgacttaaagcagcctcagagcaaaataccctcatgatgtggtgaaccacctcagctgtgacgaggcccggaaccactacgggcggcgtggtcagcctcatccccctcatcctaggacttaaatgaaagaatggatcgcccactccgagaagttgccgcgcaaggtgctgcagcacgtgagtgagccccaggcgcaccaggagagcaccaggggatccgctcgtcctgcccaggccatagggacccagcccagggccactaaacacaagtgtagacagctcacaaaagccagcctcaaacccaggggatgttcaaaaccaccctggaggcctcctggtgggaaattgtaactcagagccaggagctccgtcggcggagagctttgctgtttaatttggattttactggccggtccttttttcactggtacccatggaccctgccacttactaaccccaagggaatcagccaatatatttctgagacttcctctctctcaaaaaaaaaaaaaaaaaaaaaaaaaaaaaaaaa

SEQ ID NO: 157735 - DNA, 493 bp, Homo sapiens
  misc_feature (1)...(493): n = a,t,c or g
naaaaaaaaagcaaatattgtcagattggataaaaaagcaaaacccaactatatgctttctataaaaacccacttcaaaaaagatacaaataggttaaaagttaaaagtaaaaggagggaaaagatatcgcatgctaacactaatcaaaagaaagtgacattgaatcaaaatacaaaactcatgtgtttttctctatactagcaattaggagttagaaaataaaaatttggaagatatgtgtcatttatgatagcataaaaaataaaaagtcaggaataattctaatgaaagatgtatgaaaccttcactcagaagactatgaaaggttattgacaaaaattaaagatgactcaaataagtggactgatatgcagtttacaaggattagataatatcataaaatgttgattctcaaatgacctataatttatcgnacgcgtgggcggacgcgtgggtcggcccggtactacnggccatcaaaggggngtcaag

SEQ ID NO: 157736 - DNA, 247 bp, Homo sapiens
cccctctagcttcttgattacatgacagcaacacaaggagcccacagttccagaagagcctgggtttttccacagggagacacagatgccctgtttcttaataccatctgcaaagagtcctagctgcttggcaggctgaggcaggaggatcactttgaagcccaggaggtcgaggctgcagtgagctatggatgggccactgaactccagcctgggtgacagagcaagaccttctcagacggggcgg

SEQ ID NO: 157737 - DNA, 414 bp, Homo sapiens
ctggtttgtttatccaagtctgaatgtttacaacctcttttctatcatcatctgacattgaagaactgtcaatttcatctgtgtcgtattcttcttcatccccaatgctgaaaacaggctttacgccacggtaaggcttgcccactctgtcactgctgctcacatgccgctctgtacatgatctgtctggccaaggaagattgaaagacattcgatccacaggagttgatgtattctctataaaactgataactttttccctgacattaacggattttgtcttcaaagccacagtcattttatttactagtgatttcattcctctatcacttgagccattaggagattcaccatcaacagaattgatactgctccttgagcgtgaggtactagcaatccaatggccactcgtgc

SEQ ID NO: 157738 - DNA, 1899 bp, Homo sapiens
agcgaatcagctacaaggggaaggagtccggttctttgtggtggattgccgtcctgcagaacaatatggtgctgggcatttatcaactgctttccacttagattcagacctgatgcttcagaatccatctgagtttgcacagccattttataatccttgctggaagcacagaagcagtccattgagtctggctccatagctggtggggagcacctctgttttatgggcagtggcagggaggaagaagacatgtatatgaacatggtcctggcacactttttacagaaaaacacagaatatgtgagtattgccagtggaggatttatggcactgcagcaccacctggcagacattaatgtggatggaccagaaaatggatatggccattggattgctagtacctcacgctcaaggagcagtatcaattctgttgatggtgaatctcctaatggctcaagtgatagaggaatgaaatcactagtaaataaaatgactgtggctttgaagacaaaatccgttaatgtcagggaaaaagttatcagttttatagagaatacatcaactcctgtggatcggcatgtgagcagcagtgacagagtgggcaagccttacccgtggcgtaaagcctggttttcagcattggggatgaagaagaataccgacacagatgaaattgacagttcttcaatgtcagatgatgatagaaaagaggttgtaaacattcagacttgggataaacaaaccagatgtcaaacatcattttccttgtaaagaagtaaaagaaagtggacacatgtttcccagtcatctgttggttactgcaacacatatgtactgtttaagggagatttgttttcacggaaaaaaggattggcttattataccagttctcgacaagcggctgaattctggtagttaaaattaccatcccaaaaaaaaacatcctgaactcattaccttcaagtatggaaatagcagtgcttcaggaatagaaatcttggcaatcgaaaggtatttgattccaaatgcaggggatgcaactaaagccataaaacagcagatccatgaaagttttgggatgctttgggaaagttaatataaaagaaaattatataaaaagaaattaagacaaccaagagaaacatggacatatacctcctgactgaatactaactggagacctttcatttgctcatggggctgcttaaatagcaggtctaagaaagtgtaaatctattataatcaatctgtggacagtaaacttttttaaaaaattttttcttctgcatttttggttttataaaacgatgtattataaaggtcagttattaaattactttgaagtaactgaccctgtgcccttatggccctaagtaagggtacagaatgcagttctgttttgaagagctgttttaagggaacatgcatcactttcgggttcaaaaacaactgtacacatacatatctgcagtgtcttcactgaaaattagagatagaattagttgaagagacttccttaattgctacattgttttactcactgagcaatatcagmmactaaaacatagattaataattcactcactgtttctattcttcttaaaaagagtgaaatctttttaatggaatggttgaagattcctgccaactcaaaatacagtacagctagtaaaatgttgaaacatcagtttctaaatcacctttgctccattagctaattttttggacactaaatgcttcaaagataagaaacttcatcctaatgatttctaaagagcagttaaaagcattaaaataagtaggtaggctgttaagattaaaattaacattttggggacagaattgtgtctgtaaaaatgtcattggttttattacaagtggattattttattcatattt

SEQ ID NO: 157739 - DNA, 1424 bp, Homo sapiens
gcccggattcttctggataatgaccattacgccatggaaaaattgaagaaaagagtactggaatacttggctgtcagacagctcaaaaataacctgaagggcccaatcctatgctttgttggccctcctggagttggtaaaacaagtgtgggaagatcagtggccaagactctaggtcgagagttccacaggattgcacttggaggagtatgtgatcagtctgacattcgaggacacaggcgcacctatgttgggcagcatgcctgggtcgcatcatcaacggcttgaagactgtgggagtgaacaacccagtgttcctattagatgaaggttgacaaactgggaaaaagtctacagggtgatccagcagcagctctgctttgaaggtgttggatcctgaacaaaaccataacttcacagatcattatctaaatgtggcctttgacctttctcaagttctttttatagctactgccaacaccacttgctaccattccagctgccttgttggacagaatggagatcattcaggttccaggttatacacaggaggagaagatagagattgcccataggcacttgatccccaagcagctggaacaacatgggctgactccacagcagattcagataccccaggtcaccaccttttgacatcatcaccaggtataccagagaggcaggggttcgttctctggatagaaaacttggggccattatgccgagctgtggccgtgaaggtggcataaggacagcgtacggaagccaatttggaccgttctgatgtgactgagagagaaggttgcagagaacacatcttagaagatgaaaaacctgaatctatcagtgacactactgacttggctctaccacctgaaatgccgattttgattgatttccatgctctgaaagacatccttgggcccccgatgtatgaaatggaggtatctcagcgtttgagtcagccaggagtagcaataggtttggcttggactcccttaggtggagaaatcattttcgtggaggcgagtcgattggatggcgagggccagttaactctgaccgggccaagctcggggacggtgatgaaggagtccgcccacctcgctatcagctggctccgcaagcaacgcaaagaaagtaccaagctgaccaatgcttttggaagttttgatcttcttgacaacacagacatccatctgcacttcccagctggagctgtcacaaaagatggaccatcctgctgggaggttaccataagtaacctgtctcgccctcaactttttagtgggcggctggtacgttcagatgtagccatgactggagaaattacactgagaggtcttgctcttccagtgggtggaattaaagacaaagtgctggcggcacacagagcgggactgaagcaagtcattattcctcgg

SEQ ID NO: 157740 - DNA, 1381 bp, Homo sapiens
agccagagagtaagtgctgaatgtgacgcagaatcatgttaggtaacaaggactttgaggtaagtggctgaagtcttctgtggagtcagccgactcttgcaggattgtgtggtatcagtcacctttagcatttgccaacccaactctgatcattcttcttctttcaaggtatctcagcgtttgagtcagccaggagtagcaataggtttggcttggactcccttaggtggagaaatcatgttcgtggaggcgagtcgaatggatggcgagggccagttaactctgaccggccagctcggggacgtgatgaaggagtccgcccacctcgctattcagctgggctccgcagcaacgcaaagaagtacccagctgaccaatggtagggagccttgcaaccggccaaggcaggccttgacccagggaggcggtaccttccatggcggagactggcatgagctcgagactgccagttacacatctagcaaagtacacaccgttttgaacccctgtgttaaatcctagttcccatttcaggactatttgactagtgcctgaactagaaactaattcaaaaggtttattttgttttaatacgacttagagtagaatggaactgttcttccacaccctcacccaaattgtactgtccaccaatattttgaagaattcatttacccaaaacattcatttttgtttgtgactttttttttaggagaaaaagaaaacaggtttaatttttctacattaaagtccctttttcctttttaaagcttttggaagttttgatcttcttgacaacacagacatccatctgcacttcccaagctggagctgtcacaaaagatggacccatctgctggagttcccatagtaacctgtctcgcctcactttttagtgggcggctggtacgttcagatgtagccatgactggagaaattacactgagaggtcttgttcttccagtgggtggaattaaagacaaagtgctggcggcacacagagcgggactgaagccaagtcattatttcctcgagaaaatgaaaaagaccttgagggaatcccaggcaacgtacgacaggatttaagttttgtcacagcaagctggcctggatgaggatcttaaatgcagcttttgatggaggctttactgacaataccagaccttggctgttaaatatcaaactgtacgtccaaatctcaattttttagaattttaagttatgaagtgctcaaaggtactgacacagttgattttattcacaccattaggggtatgcaagatgtccctgttttataaacataatcacaacagtaataaacctcaagtagtggctagtgtttagtatagaaatataagatgttgatttagtaaactgataa

SEQ ID NO: 157741 - DNA, 411 bp, Homo sapiens
tccatcactttttaacatgtagaataaaaaacaagataaactatacaatagcaacaaaaacaataaaatacttaagaataaacttaagaaatttctaaagcctgactaagccaaaacttctgaaagacataaaagtagatttgaacaaatggaaaaatatttcttattcctggctaagataattcaagctcacaaatatatcagttcttcctatattaatttataaataaaatcccaatttaaaagatcaacactttttttataaagttagataaactgatgccaaagttcatatagaaaaataaacatgtaaaaataggtaggaaaacaccaaaaagaaaagctacaagggcatattaaccctatcagacattaaaacatactataaagtctctataatcaaaacggtat

SEQ ID NO: 157742 - DNA, 460 bp, Homo sapiens
  misc_feature (1)...(460): n = a,t,c or g
cagcttccccctgccctttccgctgcccccctgctcgagtccccagggaccacagctgctacgtaaggccatcaccaggccttggccaggcacatgcccttaccctgcctccacccaggttggtgaattcaccctcaggacaaggcctcagctcagtgtgggtgtgtaggaagaagggtgcccttacccatccccagcagatagccccatgtcagaagaccctggtgctgctcctccccaccaccccaggtcaccactgtagaggaacaggttactccaaaggaaaaactgctgtatttgcctggccagcctctcacctggcttcccccctccaacccactggcttgcctggaaagagaaacaatatgctaagtgtgcctaataatacccctcaaccggacgcgtgggtcgccccggaanttcggaggcggttccgcagcgnntctataaggggctcatt

SEQ ID NO: 157743 - DNA, 416 bp, Homo sapiens
tattctttccacactttttcaaatatgccattgtctttggagttcacagttgctgttaacaagtcactgtcaatatcattattgttgttcctcgaaaaataaaaacaaccttgcttggttgcttttgaaactttttctttataatttggaggcttgattcatacatctagctgtgattttcttgtatttatcctgcttggggttcactgcactttatgaatttgttgtttgctttcttttattagttttgcgaagttattctgtccttttgtttctctcctttccttctggaacttcagtcacacatattttagaacttctgtgtcccatatgtcttttaaactttgttctgttatttatgtatttttccttctctgtgcttcagtttgggtattttctatttctctgtcttcaag

SEQ ID NO: 157744 - DNA, 591 bp, Homo sapiens
gagacaaggtctcactttgtcacacgggccagaagtgcagtggcatgatctcagctcaactgcaacctctgcctcccggactcaaaaagatcttcccaccttcagcctcccgagtagctgggaacacagatgtgcatcaccatgcctggctagtttttttcccattttttgtagagacggggttttgccattgttgctcaggctgttctccaaaatcctggactccaagctatctgccctccaatggcctccccaaagtgctgggattacaggcgggggccaccacacccggcccaagaataggaacattttttaaggagcttaccttcaactggagaaagctacttcggtgagttgtagcatatttcaaccagaaaaatcaaaatattagttcactttgaagagacaaactgaagcccatccttctggcaacttttgtagaaacagactgacagacttaattcaattgaccccaggctagttgattggttttataccatctaatataaaatggtagcttaatcctgcctgtgcctttgttcatgtaatttagttgagtacagtgaaatgagaaagaaactggaagtcact

SEQ ID NO: 157745 - DNA, 701 bp, Homo sapiens
gacggagcccgctctatcacccaggctggagtgcagtggcacaatttcggctcactgcaagctccgccccccgggttcatgctgttctcctgcctcagcctcccgaagtagctgggactacaggcgcccgccaccacacccagctggattttttgtatttttaagtagaagaacggggtttcactgtgtttagccagggatggtcttgatctcctgacctcgtgatctgcccgccttggcttcccaaagtgctggggattacaggcgtgacgacccaatgcccggcccagtttcttttaataggatggaaaacttgatggaaacagttgactaggtagggtcaaaacagagttttgcaaggaatattacaatatggggttacggggacaattactgggggcactttccttaggtttattgatgctttagcatatgtaaacagctttaatagatccctcaaagtcaaagcctgacacccaacaaacattaaaaatccctttgcttgttcagtaagagaagtaaaaattaaattaaaataaaatatctcaagaggacctagagaggtcaccagtgggtaatctcaatcaccacacaatctccaaatgaaagactgctagagggcgctgctgtctgagacttggaggcttgagtggcagtgttacaaaaatgctggcagtacacaaactgaagaacaaaccgat

SEQ ID NO: 157746 - DNA, 232 bp, Homo sapiens
cggccgcgtcgacccccaggcctcttcgtttcctcccctcccccactcgcggcctggtcccgaactagcgcccaagacggagaagaactagctccgcagctcattaccccggctcctgagccggcaccgaccagtgcgcgtcccactcgcagcaacacgcaccgccgcctttctccttggagttctaggcccgtgactgaggaaatgcagtcggcagcgaagcacaatggcg

SEQ ID NO: 157747 - DNA, 385 bp, Homo sapiens
  misc_feature (1)...(385): n = a,t,c or g
atcccctggtcaagagtgggttgaaaccaccctgtgaaaaatgcccatcttccaaaagcagtttcaaaattcaaaacaatttccatcaaaaaaccccccttatttttcccaagaatggaaaaaaccatccttaaatttctttgggacccnnnnnnnnnnnnnnnnnnnntccctgtgtagnnnnnnnnnnnnnnnnnnnnnnnnnnnnnnnnnnnnnnnnnnnnnnnnnnnnnnnnnnnnnnnnnnnnnnnnnnnnnnnnnnnnnnnnnnnnnnnnnnnnnnnnnnnnnnnnnnnnnnnnnnnnnnnnnnnnnnnnnnnnnnncaacccacaaaatcaagccaaatacttacagacaactcatctttgacaaagcaaacaaaaac

SEQ ID NO: 157748 - DNA, 409 bp, Homo sapiens
ggaccggaaggaggagcggctgaggagcccaaggagcggggcggcggccactatgagctcaggaggcaagggcgtggccgagtgggacccacttccctgcctggacccagaactctgggatcagtttgacaacttagaaaatcgatagtcttgagaaattcatcatatctgccaaggaaaggactgagattgaactcagctatacaaaacaactcaggaatcttttaaagacatgccaacctaaaaggaactggaaggagaaagaatacattacgtaaaactctccttccctccctgtgaacaaaatgagtgatcacgctaggcagcattaagttatcttctttgaggtcttgaactttcagatcaccgtggagttacaagggcatgttcaaaaccaaaagcaggagag

SEQ ID NO: 157749 - DNA, 501 bp, Homo sapiens
  misc_feature (1)...(501): n = a,t,c or g
tgcatttcccaggccccccctttatgacagccgatgatcagcntcgaancnccggncgacccacgcgtccggccggggacgcgcggcccccggtcgggcactgcaggcggtgaaacgacttgggaaggccctttcggggtaatagtccgggtcctgatgttcttgtcatatgagttacgggcagcagagctgggtgaagtcggggcgggaggtccgcgtggggcgcggcgtccatcccagacagagaccgctgcctagccggcttcccgcttcgtccgtggcctcgggccccagaccctgcgccccacgtccccgggacccaggcgttcccgtcccctactcggagacgagcctccccggcgccgggtgggcggtgcatcctttcctcccacccgtaacgggagcggtgcctggcgcgctctggcgcagaccctgctgggaatgtagctcgcgcagttttcttcggactactaaattatttcttttttttggttttgggtt

SEQ ID NO: 157750 - DNA, 4222 bp, Homo sapiens
  misc_feature (1)...(4222): n = a,t,c or g
ggtcgggaggacgagcaccgagtcgagggctcgctcgtctgggccgcccgagagtcttaatcgcgggcgcttgggccgccatcttagatggcgggagtaagaggaaaacgattgtgaggcgggaacggctttctgctgccttttttgggccccgaaaagggtcagctggccgggctttggggcgcgtgccctgaggcgcggagcgcgtttgctacgatgcgggggctgctcggggctccgtcccctgggctggggacgcgccgaatgtgaccgcctcccgctccctcacccgccgcggggaggaggagcgggcgagaagctgccgccgaacgacaggacgttggggcggcctggctccctcaggtttaagaattgtttaagctgcatcaatggagcacatacagggagcttggaagacgatcagcaatggttttggattcaaagatgccgtgtttgatggctccagctgcatctctcctacaatagttcagcagtttggctatcagcgccgggcatcagatgatggcaaactcacagatcctttctagacaagcaacactatccgtgttttcttgccgaacaagcaaagaacagtggtcaatgtgcgaaatggaatgagcttgcatgactgccttatgaaagcactcaaggtgaggggcctgcaaccagagtgctgtgcagtgttcagacttctccacgaacacaaaggtaaaaaagcacgcttagattggaatactgatgctgcgtctttgattggagaagaacttcaagtagatttcctggatcatgttcccctcacaacacacaactttgctcggaagacgttcctgaagcttgccttctgtgacatctgtcagaaattcctgctcaatggatttcgatgtcagacttgtggctacaaatttcatgagcactgtagcaccaaagtacctactatgtgtgtggactggagtaacatcagacaactcttattgtttccaaattccactattggtgatagtggagtcccagcactaccttctttgactatgcgtcgtatgcgagagtctgtttccaggatgcctgttagttctcagcacagatattctacacctcacgccttcacctttaacacctccagtccctcatctgaaggttccctctcccagaggcagaggtcgacatccacacctaatgtccacatggtcagcaccacgctgcctgtggacagcaggatgattgaggatgcaattcgaagtcacagcgaatcagcctcaccttcagccctgtccagtagccccaacaatctgagcccaacaggctggtcacagccgaaaacccccgtgccagcacaaagagagcgggcaccagtatctgggacccaggagaaaaacaaaatttaggcctcgtggacagagagattcaagctattattggggaaatagaagccagtgaagtgatgctgttccactcggattgggtcaggctcttcttggaactgtttataagggtaaatggcacgttatatgttgcagtaaagatcctaaaggttgtcgacccaaccccagagcaattccaggccttcaggaatgaggtggctgttctgcgcaaaacacggcatgtgaacattctgcttttcatggggtacatgacaaaggacaacctggcaattgtgacccagtggtgcgagggcagcagcctctacaaacacctgcatgtccaggagaccaagtttcagatgttccagcttaattgacattgcccggcagacggctcagggaatggactatttgcatgcaaagaacatcatccatagagacatgaaatccaacaatatatttctccatgaaggcttaacaagttaaaaatttggagatttttggttttgcaacagtaaaagtcacgctggagtggttctcagcaggttgaacaacctacctggctctgtcctcctggatggccccagaggtgatccgaaatgcaggataacaacccattcagtttccagtcggatgtcttactcctatgggcatcgtatttgtatggaacttgatggacggggggagcttccttattcttcacattcaacaaccgaggattcagatccatctttcatgggtggggccgagggtattgcctccccagatcttagtaagctatataagtaactgccccaaaagcaatgaagaggctggtagctgactgtgtgaagaaagttaaaggaagagaggcctcttttttccccagatcctggccttccattgagctgctccaacactctctaccgaagatcaaccggagcgcttccgagccatcccttgcatcgggcagcccacactgaggatatcaatggcttgcacgctgaccaagttccccgaggctggctggtcttcctagttgactttgcacctgtcttcaggctgccaggggaggaggagaagccagcaggcaccacttttcttgctcccttttctccagagggcagaacacatgtttttcagaggaagctggttgttaagggaccttcttaggattgnttcacaggggcctttaactttcatgttgccttcttttctattccctttgggcccctgggagaaggaagccattttgcagtgctggtgtgtcctgctccctccccaacattcccccatgctcaaggccccagctttcctgtagatgcgcaaatgggattgttgatggtagtacaaaaaagcagggggcncagccccaggctgttgggctacattgagtatttagagggaagtaaggtaagccaggccagtcccagccccttattgtgggagacaccatgggatttttggaaaatcagctttctggaaggaatgcatgtcaacaggcgggactttttttcagaagagtggtgcagccgcacgacattttgcacataaggcaccaaacaggcccaggactgcccgagtactctggcccgcccggaaggaaccctgcctttgggtacctanggaaacttttctttagggggacacgtcccctttcttcacagccttcctaaggtgtcccaagtgccaattggggaatgtttttccaggggaaaggcactcgggcaaatcccgcatcttcagcccctcctcagggagccagtccttcccatcatgctgaatttttgtctttccagggagctgccccctatggggcgggggccgcagggccagccttgtttctctaacaaacaaggggcccagccttgtttctctaacaaacaaacaaacaaacagccttgtttctctagtctacatcatgtgtataccaaggaagccccggggaatacaggttttattgatgatttgggttttaattttgttttttattgcacctgacaaaaaacagttatttgatggtccctcgaattatgttattttaataaaataaattaaatttaggtgtaatggctgggctgttacctccctttttaaagtaattctgagctcacaacttggaatgcccccatttgttcaccctcttcaggagcagaattcaagaacaggaaatgtgcccagagcctaggctgggaatgaatttgtaattaatttaacctttgtactctttgtaaacctctactgaagagttaagtagtaaaaattaattaagcagaaagtactctaaactcaggctaataccttaaagtaatacattttataaactatttatttatttgggtagggtacagcttttttaaacacaaaaatagattagataaattccagcttggaacaagctaggtgctggttcacaaggttatgctcacccttccaattaaaatcaaaatgactacaagacttgccatcagctctcttcaggaccactgtctgggtcagaatcaggaaaccttgggtgccatggaaatttttacaaaatttcaaatcaaagccagggctttgcaggctaggataatagatcacttgagtacggaaccacacatgtaagtgtcacgtatatttgagttcttcaatacaattaccctgatggggcaagaacccacaggtggagagcagaggcttggttcccctagagggccctggctggagggccccaaccaccaaccagacgacaggaggggccagattgctacccagttattgttacctcctgctccttcaagagcctccctaagggagaagaagatctatacttccactttgtttgctgcacatgtggcaacaagattgctaccctgatttgggacacttgagagaacttgaaa

SEQ ID NO: 157751 - DNA, 419 bp, Homo sapiens
aagagccacagtggatccaggccctgatgcctgagaaggagccagctaggcagagccggggaggagcactccggacagacagcagtgaaccatccagaaatgaagtgaagaagacaatctcatttataatattggcaaaaagaacatacctagaaatatatgcaacacaagatgcataaaacttgtgtactgaaaaatacaaaatatttttgaaaggaatcaaagagtatcgaactaaatggaaagatatcctgcagtcatggatcacgagacataatgttaagatggccaaactcccgaattcatctatagcttcacaatctgtatcaaaatgccatctgtctttttacaagctgatcctcatattcatgaggaagtacaagggttgcagaatagccaacacaatctagagagagagg

SEQ ID NO: 157752 - DNA, 425 bp, Homo sapiens
  misc_feature (1)...(425): n = a,t,c or g
cggacgcgtgggtgacttcaacaaatgctgataaagaatttgaaaaaattcaacatcccttaatgataaaactgtcatcaaaatgagtatacatatatgtcatatatatacccattattcaaaataataaagggtatatatgacaaatccttggttaatatcatattgaatgtggaaaaattgaaggcctttttttctaaggacgggtacaagagaaagacannnnnnnnnnnnnnnnnnnnnnnnnnnnnnnnnnnnnnnnnnnnnnnnnnnnnnnnnnnnnnnnnnnnnnnnnnnnnnnnnnnnnnnnnnnnnnnnnnnnnnnnnnnnatacttttccaaagacaatataatgttatacctagaaaaacctagactccatgactttttcnnannnnannnnnnnnnnnnnnnnnnnnnnnnnn

SEQ ID NO: 157753 - DNA, 408 bp, Homo sapiens
  misc_feature (1)...(408): n = a,t,c or g
agggaggcagccacggtggcggctctgggggcagctcttgtcttcggggagaaggcccttggagccgggctggcatcggccttctcggggtgagcgaggtcaccatgccagcttcccagagccgggcccgtgcccgggaccgcaacaacgtcctcaaccgggctgagttcctgtccctgaaccagccccccaaggggggcccggagccccgcagctcgggcagaaaggcctcgggcccatcagcacagcccccacctgctggtgacggggccagagagcgacgccagtcacagcagctgccagaggaggactgcatgcagctgaacccctccttcaagggcatcgccttcaactccctgctggccatcgatatctgtatgtccaagcggctggnggtgtgcgctggcc

SEQ ID NO: 157754 - DNA, 451 bp, Homo sapiens; identical to SEQ ID NO: 94434

SEQ ID NO: 157755 - DNA, 422 bp, Homo sapiens
  misc_feature (1)...(422): n = a,t,c or g
atcaaaagcaaaaataaacggatgggattatatctaactaaaatgctggtatacagcaaagaaagcaatcagtggagtgaaaagacaacctacagaatgggaaaaatatttgcaaactagtcatctgacaggagannnnnnnnnnnnnnnnnnnnnnnnnnnnnnnnnnnnnnnnnnnnnnnnnnnnnnnnnnnnnnnnnnnnnnnnnnnnnnnnnnnnnnnnnnnnnnnnnnnnnnnnnnnnnnnnnnnnnnnnnnnnnnnnnnnnnnnnnnnnnnnnnnnnnnnnnnnnnnnnnnnnnnnnnnnnnnnnnnnnnnnnnnnnnnnnnnnnnnnnnnnnnnnnnnnnnnnnnnnnnnnnnnnnnnnnnnnnnnnnnnnnnnnnnnnnnnnnnnnnnnnnnnnnnnnnnnnnnnnnnnnnnag

SEQ ID NO: 157756 - DNA, 1287 bp, Homo sapiens
ttttttttcactgtttctcataagagcttctattgtggcatataataataggtactctatataatattaaattaaaaataaagctccagcaggttgcacaggttggctgttaataaatatatctctgggtaattgtgccccaagaccagctcacgaccactctccctcatccagagaattatacaaaaataaatacaggctcggggggtaggcggaggacatgcccagttccactctaaaagttcccctcacttcacaccatcttacccgttccctcatcttccactggtggtcaccacaagggaagccctgtgttgactggaggagcttgggggattgaggaaggcctctgctttgcagttgaggcattcttcagaaggcaaagggaccccagggtccccttcacttgcacagggccatgttattcccattctttaagggcttttgctggattccccacaaggcagggcctattgagaaccaagccagagagaggcacagcgcaagcaccaggagggacacaccgctgttcagagccacagggaccaccactagcccggccaggacccccagagtctgggtcaagggcccccggagctgaggaggcattgcaaacacaacattctgcagggactgctagggtgggaaaacttctttgggggttcaaggcttgggcctgcatccttttcatcctgggagctcacatgaggcctggctacactagagagacagacttcggcccccaagggactgaggagggtgggattttgcccctgcagaaggacgggagaggctggctccttgccagatatgggatccaagctgcctgcccactcactggtgacctctatctgggcttctgtcccggcctcccccagggactcagtcaccccagctatcaccctattcatgtgcaaagagctggtgtccttgcccatccctttctccaggatccccaatgaactgaccctctgtacccagaaccacagggccgtcacatcctgagccctctgcccatgggagccacacatctcccatcgtggctaccacagaacgggccccggagaggatttctggaggcgattccttggggctgtccccttctgggctggagggtgtgaacagagagcccctcttcaccctccccttcatcatcagggtcttcggtgtccttgatgagctccacgccacgccccagccgggcatagtgcagcgtgatctcctcagccagggcgctgttcagggcccgctcaaggccaggccacttcaagatcagttcgcggtccg

SEQ ID NO: 157757 - DNA, 2239 bp, Homo sapiens
atggaggaaagaaaaggacacaaagaaattcacttaagaagactgaaagtcagaatcctaagtgtgagaatgtcggccatcaaagaaagtcctagactgctaataggcaatcaagagccattgaagcaacttaaacaggagagtaagatgaataggtatgtctttaacacagattattctggctgtataagattgatacaaagcaggttaagtcatttcccagagagttcaggacaacaaaatccaaaaccgtatatgagaaaatttaagacacctttaatgattgctgaagaaaaatatagacaacaaaaagaagaaattgaaaaacagaaacaggagagttcttactacaacattgttaaaactcaaagccaaaatcaacacataacagaggtggaaaaggaaatgccattacaaaaaaccaatgaggaggtttccctatctggaattgattcagaatgcactgtggttcaacccagcccaggctctcaaagtaatgctcggatactaggagtgtgttctgataaccaactctccacaacatcgccagaaacagtcgctgccaagaggctccaccatgttttagcagcttcagaagacaaagataagatgaaaaaggaagttttacaaagctcaagggacattatgcaatccaaatcagcttgcgaaattaaacaaagtcaccaagaatgtagtacccaacaaacacaacagaagaagtatttggagcagttgcacttgccccaaagcaaaccaatttccccaaatttcaaacaatctgagattgatgttcaaacctttaccaaaaaacaatatctgaaaaccaagaaaactgaagcaagcactgaatgtagtcataagcaatctctggctgaaagacattatcagttacctaagaaggagaaaagagtgacagtacaattgcctacagaatccatacagaagaaccaggaagataagctcaagatggttcccaggaagcaaagagaatttagcggatctgacagagggaaacttccaggaagtgaagaaaaaaatcagggaccatcaatgattggtcgaaaagaagagagattaataactgaaagaaaacacgaacatctgaagaataaatcagcaccaaaggtcgtcaagcaaaaggttatcgatgcacatcttgattcacagactcagaattttcagcaaacacaaataccagaccgctgaaagtaaagctgaacataaaaaattgccccagccatataatagtctgcaggaagaaaaatgtctcgaagtcaagggcatacaagagaaacaagtcttctctaatactaaagattcaaagcaagagattacacagaacaaatctttcttttcctctgtgaaagaatcccagcgggatgatggaaaaggtgccttaaatatagtggaattcttgagaaaacgtgaagaactgcaacagattttgtcgagagtgaaacagtttgaagcagagccaaataaaagtggccttaaaacatttcagacactattaaatactatcccaggatggctgataagtgaagataagagagaatatgcagttcacattgccatggagaataatttagaaaaagtaaaagaagaaataacacatattaaaactcaagcggaagatatgcttgtgtcctatgaaaatataattcagacagccatgatgtcctccaaaacaggaaaaccggcaaatggggcccattagtctcgacgaagacatcgcccaaagtatctaatgttcatgtcagcaataatgaaaatagcgaacagaaagaaaattaaattgccaaagagaaaacagtccagcaccaagtagcagctcatgatgaagcaactgttcgtagtcacgtgaaaacccatcaggaaattaaactggatgatagcaacattcctcctccctctttaaaaacacagcccaccgtcaccaacttttatcacaatagaatctactgcccgacgaacagaaaaccctactaagaacgagctttctcagtcccctaaaaaggacagttatgttgaacccccaccaagaaggcccatgtcgcaaaaatctgaaattcacagagcaaacacttccccttctccacccaggagtcgctctgaacaacttgtcagactcaaagacaccactgcaaagttatccaaaggggccatcccatgtccagcagcaaccccggttccaattgtagagaagaggtctgaaatcatcatgtctcctgcaacactt

SEQ ID NO: 157758 - DNA, 461 bp, Homo sapiens
cccgggtcgacgatttcgtccgcggcgcggtcggtcggcgcctattctcgggctgtttggcgggcgtggaggactggccagcccccaaacctcaaggcccatcggctggatgccgtggataagcgaggggagagcgactaggccctgtctgcgggtaccttcggcgaggagaggcgacgaaggtctgcaccagcgagcaacagccaactcagtttataaatccagaaacacctggctatgttggatttgcaaacctccccaatcaagttcaccgaaaatcagtgaaaaaaggttttgagttcacactgatggtggtcggtgaatcaggtctaggaaaatcgactctcatagacagcctattcctaactgatctgtacccagaaagagtcatacctggagcagcagaaaaaattgaaagaacacgaaatcgtcgacccggcaatcgctacgtacagacgcac

SEQ ID NO: 157759 - DNA, 742 bp, Homo sapiens
ctgggcggaatcccacaagcacagtctaggtaaggagaagccagttaagttgggaagtagccagatttaagagtttgggcaatggccaaaggtgcagaagtttgaactacaaaaagttcagtgtagttggttcgtgtgtttccgtggagagaggacaaggtctggtggcactgccaagaattagaccgaaaaggtaaaaaagcaagccaggtttgtctgggccagtaggccaggtcacagttgggactccactgagaccacggaagccacaggtttgctcctcatccccgggccaactcggcggcctccaaccctataccataccccctgctgcctgtccgtgcctcgctggtgcagaccttcgtcgcctctcctcgccgaaggtacccgcagacagggcctagtcgctctcccctcgcttatccacggcatccagccgatgggcttggaggtttgggggctggccagtcctccacgcctcagggaggaaatggcaccgttagaaagacaagatggccacacaagctctaagtgtttgtcgggcctaaacctgtatcctccctccaagcaccaaaacctcccgacctcgaccgcactcgacgccccgaggcccagcaccgacgacagtgcagaggaattcccgcagggtcaacaaggggtcaccggaatccccactcccgcgcccgggcctgcccgtgtcggagccacatgtcgccggcactaggaccgcccgggacggggg

SEQ ID NO: 157760 - DNA, 433 bp, Homo sapiens
  misc_feature (1)...(433): n = a,t,c or g
atttgaagatatcaaataagtcataggtaaagtcaagaaaatgatgtctaagcaaaggggaaatatcaataaagggaaaataataaaaaggaaccaaaaggaaattgtggagctgaaaagtacagtaactaaaataaaaaatttacttggaggatttaaaaacagactgtaacagacagataaatgaattagttactttaagatacaacagttgaaattagtcagtctgggaaacagnnnnnnnnnngattggagggaagagaacagagcctaaagaacctatggaacaccatcaaactgaccagagtatacactgtgggagtctcagaaaaagaaaagaaagagcagattgtttgaaaaatatcagctggaaacttctcaaatttgattaaaaacatgaatataaatattcaagaagctcaaagaactccaa

SEQ ID NO: 157761 - DNA, 281 bp, Homo sapiens
cccaggccgaccgggactccgaagcgccaggtgctgatggcgcgggcccgcgaggggccctgcccgttcccgggggtcacggccaagatccagcggaggatggaccaggtgttcacgctggcggtgcgcgagacggaggccctgatcccgcccgaggtgcctacccgccaatgcccagcacacgaggctgtcggaaaggttcattggctaatttgccacagttggttttcaatatgtccatccctttttctgatttccagagctcagtatttctacccagg

SEQ ID NO: 157762 - DNA, 427 bp, Homo sapiens
  misc_feature (1)...(427): n = a,t,c or g
agtaaccggggggtgttaaaacccctaaatagggatcccccgcccccgggcttccaaaagggtggggttttaggggggggcccccagggccgggcaaatttgttttttttaaactcccaaaagggggttttcccggggccgaaatttttctgggggaatttttccaaagggggaaaaaaggactaggccccatttttccccctgtttttttaaaaaccgaagaggggggaaccctttccattccttttttaaaggaagggtttttttggtttttaaacccaaggccgggccnnnnnnnnnnnnnnnnnnnncaaactataaaccaatatacctcaataacacagatacaaaattctttaacaatatgttagcaaatagaatttagcaatgtataaaagaagttatgcaatatgaccggacgcgtggg

SEQ ID NO: 157763 - DNA, 731 bp, Homo sapiens
ttttgtgccccggggctgagtgagtcccccaggtggagctcgcccagataagtaaacatttattagatgaagccattagcaagcagtgcagcaaacagttcacacatgttgatttggtaaacttcagtgaaaccccagttctgtgttcctacaagatgtttcaaccataccttccatagatggttctctttaggttgatcgtgacaacaccttaaaagcataattggctaactttaatagtccagcaattataatcccagacttggactaacccctaagaacgattttgaaaaggtaggaagatttacagaaaagtttacccaaatcttatgcccctgtttaaaaaggcggggggagtatcccccaaaatatttaaggacaattccatatatggctgaatgcaacctaatttaaacaaaagacccactttctacccattcctccatggtaaaggcctttaggggctaaacaggaatattttcctttttgagacaggggtctctgtttgcccacgttagaagtgcagtgggcccccatcttgggctcactgcaacctccacctcccggattcaagcaattctcgtgcctcagcctcccaaatagctgggactacaggtgcatgccaacatgcccagctaatttttttgtatttttttgtattttttaatagagataggtttcaccaggttggccaggctggtgtcacaactcttgacctcaagtgatctacc

SEQ ID NO: 157764 - DNA, 589 bp, Homo sapiens
tgctggccaggtgggccaactgggtttccctggctgggcaggaggagagggcagaggaagaccccctctcctgtgactgagcctgccagggaggcagctacctcgggaggaaggtctcacatctgtctctgggcacccatgctggccagcagtttcccagggctccctggggttgaaaagccccaaggaaacctttgcgggtggggcgttactgccaaaactccagaggcaaagtggacctggcaaccacaagaccctccccataagcaggggaccagcagacccgggagctgtccctgtctgtcacagcacagtggggccacgaggctgacattctctggccttgcacacagtgccccctgagaagttcaacatttatttcttcacgtgtccagaaaattcctcatttaattccttgcctctgcccttcaggagcagcctggaaggaatccaagcaggagtttcatctgcatgggggcactctgcaggccctggaacattgggcctgagtggagatgggagacagaggcaggccagaaggttctctctgcacagctgcctcccttgctctccctgaggctggcctgcc

SEQ ID NO: 157765 - DNA, 463 bp, Homo sapiens
  misc_feature (1)...(463): n = a,t,c or g
caaagtcatttaaattgaggtgagaaaactgataaaattcaacatcctctcatgataaaaaccctcacaaatctgggcatagaaaaagcatacatcagcataataaaagtcatacacaacagacccatggcctgtatcataataaatggagcaaaagtgaaagcctttcctgtaagatctgaaagacaaagatgttcgccttcaccattgctattcaacataggactgaaagtcccagttagagcaattgaaaaagagaaagaaatgaagggtatatgaattggaaagaaagaaatcaaattatgcttatctggaaatgataatgaccttatatttgaaacatcctaaaaactccaccaaaactattagaactgatacattcagtaaagttgcaggatacaaaaatacggacgcgtgggtcgncccgngntttccgaggggtgtcattagggtaaaatgccgt

SEQ ID NO: 157766 - DNA, 378 bp, Homo sapiens
  misc_feature (1)...(378): n = a,t,c or g
gaaaaaagactcaaagtgagacctgaaactagggaaacctgggggaaactctcatggacattggtctaggcaaagaattcatgactaagacctcaaaagcacaagcaacaaaaccaaaaatagatgggacttaaactgaaaaagtttctgcacagatacaaatatcatgcatatggttttaatttatctgtagcctagggcctagatgaatcttagattttcattccagctgtctgactcttgctttgtaagaaagcacatgaataggatatgggcctggattagtaaaacgttaatgtttgggccctaatcagtagatgtgggtataatttgcaaagactaataggaatgagtatggctagttcactcaacagtgtn

SEQ ID NO: 157767 - DNA, 779 bp, Homo sapiens
tcaatgaatattttcttctgaaaaactcaactttaaactttgtaattttacagttccattgagattatattgtttatttgttttaagacatatactataactgttttggttttgcttctagaaaaactgattgcttatcaacgagaattccttgctttgaaagaacgtcttcgaatagctgaacacagaatctcacagcgctcttctgaattaaatacgattgtgcaacagttcaagcgtgtaggagcagaaacaaatgggaagtaagggatgcgttgaataagttttcaggtacaaacagtattttttatattataaaaagattttatatatatatatatatatttttttttttttttttctttgagacagagtctcactctgtagcccaggctggaatgcagtggcgcaatcttggctcactgccagctccacctccagggttcacaccattcttctgccctcagcctcctgaaatggctgggacctaccaggcgcccgccacccaaaccctggctaatttttttgtattgttggtggagacggggttccacgatgttggcccaggatggtcttgatctcctgacctcgtgatccaccccctcagcctcccaaagtgctgagattacaggcgtgagccactgcacccggctgaaaaagattagatttgcaaaggggcatgtggaatttttttttgaaagtcatgtagaatagtttataagccagccctttcagaaagaaaaaccaccacacaaaactttcttttacttgtaaattac

SEQ ID NO: 157768 - DNA, 375 bp, Homo sapiens
  misc_feature (1)...(375): n = a,t,c or g
ggaaaatggatggtgctggatagctacatatggaagaacgaaaactggattcctatctctcactacatgcaagagttaactcaagagggacttggatctaggaactgaaaccatggaaattctggaggaaaacctgggggaggttcttctggacattggcctaggtaagaatttatgactaagacccccaaagcagattcaacggaaataaaaataaatagataagacnnnnnnnnnnnnnnnnnnnnnnnnnnnnnnnnnnnnnnnnnnnnnnnnnnnnnnnnnnnnnnnnnnnnnnnnnnnnnnnnnnnnnnnnnnnnnnnnnnnnnnnnnnnnnnnnnnnnnnnnnnnnnnnnnnnnnnntcagcgtcgacg

SEQ ID NO: 157769 - DNA, 382 bp, Homo sapiens
  misc_feature (1)...(382): n = a,t,c or g
ctcaacacatgaaacattctccaagatagaccatatgatagtccacaagtctcagtaaaattaaagaaacaattgtattaagtatctnnnnnnnnnnnnnnnnnnnnnnnnnnnnnnnnnactccaaaagtaaccttcaaaactatacaaatacatggaaattaatctgctccagaatgatttttaggttaacaatgaaatcaagatggaaacttaaaaattctttgaaatgaatgataatgacacaagttatcaaagcctctgggatacagcaaaagcagtgctaagataaaatcggaaagatcacaaattgacaacataacacctcaaggaactacagaaacacgaacaaacacaaagctaaaactagaaaataataaat

SEQ ID NO: 157770 - DNA, 400 bp, Homo sapiens
  misc_feature (1)...(400): n = a,t,c or g
ccaggtttaactcttaagggggtttggttcctaaaaaaaggcccaaccgtgttttaaataaaaaaatttagatggggccccaagccccctttaaaggaacccccgggggttttccggattttccaatcataaatttgggaatcccggcccggtccccggaaaagattttaaatttccaaattttccnnnnnnnnnnnngtgggggggaagggccccccccgtagtcccaaccaccccggggggttaaatgggaaggttcccttaacccccggcctttggggttccaagagggggggatgggtcccccccgcccggggcaccaaaagaagggcccctttccnnnnnnnnnnnnnnngaaaatgnnnnnnnnnnnnnnnnnnnnnnnnngagcgctcgtttg

SEQ ID NO: 157771 - DNA, 464 bp, Homo sapiens
gtttttgagacgagtctcgctctattgccaggctggagtgcagtggccgacctcggtcactgaacctccgcctcccgggttcaagtgattctctgcctcaccctcccgagtagctgggactacagacgcgcgccaccacgcccagctaaattttgtatttttagtagagactgtatttcaccatattggccaggatggtctccatctcttgaccttgtgaaccgcccgcctcagcctcccaaagcgctgggatttacaggcgtgagccaccgggccggccttgttttgtttttaaacaagccagtcacaggcctgggttttgatagtcatcatccctatcattctcagatttcagaaaaggaccctccccctatttcttctatttttaacaaaaaatctatacacacaaatcttttaattccaaattgatacagataaatttgtttgcctttttttttttcgag

SEQ ID NO: 157772 - DNA, 686 bp, Homo sapiens
ccctgggccgcctccggaagtgagacagcacattcgtgtcccagggacgagaacgggaagggcggccatttggccaggctcgtttcctgtggggtttcccctgcacagagcccagggccggggccaaagccccttccccttcccgcaaggcacaaaaggtctgggtcttgagtggaaggggtgctgccatgcaggtgcccaggagacagggtcccctttaccaatcatggtgcacttctcaggctcttgggagatggtgtccagggggaaaccaagctcctagcagctggaggcatgagggagagggcgggcccctgggctggggagcaaagcaggccccaggctgcatcaggacaccccggccagccaatgcatgtgggtatgcctgaataccccctccagacagcgtgtgcgtggaccagacacacaagggtatgtatgtgtaccgctacccccccaaccccatgctccaagaatgaatcaggggcagcttccgccgggggcgccaccaccacctccgcccccaagcctggtccccaaatactttccaccctcacagagcagctgggatcggaaaataccaaggctgcaggccccgccctgcccgccgcgccacgccctcccagcctgtcactaacgctttgcctaatgggcccagactctcagcagaagctccgtggctgggc

SEQ ID NO: 157773 - DNA, 603 bp, Homo sapiens
tcgggatgcagccgccggtgccctggcccttgggcctgctggaccccgcaaaagggctttcgaggaggaagaaaacgtcgctctggtttgtggggtctctgctgctggtgtccgtcctcatagtcaccgtcgggctggctgccaccaccaggacggagaatgtgaccgttgggggctactacccagggatcattctcggctttggatctttcttaggaattattggcatcaacttggtggagaatagaaggcaaatgctggtggcagcgatcgtgtttatcagttttggggtgggggccgccttctgctgcgccatcgggggcggcgtatttgcagcacagtacattgaaccgaggcccctcaccacgggaagatgccagttttactccagtggggtggggtacttgtacgatgtctaccagacagaggtcacctgtcactccctggacggcaagtgccagctgaaggtgagaagcaacacctgttactgctgtgacctctatgcctgcgggagcgcagagccctcgcccgcctactatgagttcatcggcatcagcggctgccaggacgggctgcacctggaacggctggttttgggccttg

SEQ ID NO: 157774 - DNA, 1011 bp, Homo sapiens
cctccgtgaagcccctgctttcaggggttagttctggagtggcccagccctggggccttcccctctgtcaggggaagtgacatggtggccactgatgagactgtctgtgtatgttcaggttgtgaaggagctcctgacccagggagctgaccccaacctgcccctgaccaaaggcttgggcagtgccctgtgtgttgcctgtgacctgacctactagcaccagaggaacatggacagcaagctggccctgattgaccgactcatcagtcacggggccgacatcctgaagcctgtaatgctcaggcagggagaaaaggaggcagtgggcacagccgtggactatggctacttcagattcttccaggaccggaggattgcccgctgccccttccacacgctgatgccagcagagcgcgagacgttcctggcgcggaagcggctcctggagtacatgggcttgcagctacggcaggctgtctttgccaaggagagccagtgggaccccacgtggctgtacctgtgcaagagagcggagctgatccccagccacaggatgaagaagaagggccccagcctgcccaggggcctggatgtgaaggagcaggggcaaattcccttcttcaagttctgctaccagtgtggccgctccatcggggtccgcctcttgccctgccctcgctgctacgggatcctgacctgcagcaagtactgcaagaccaaggcctggaccgagttccacaagaaggactgcggggacctggtggccatcgtgacacaactggagcaagtttccaggaggagagaagaattccagtgaagcagcagctgcacgtccgaggcttggggaggacccaggactgtgtgggtttcttacctgcctgagccacctcagggaatcttccagcctaatgcaggcatttctgcacctttggggtcatgctttgtagcagtgtctcccttgcgacctcgcaataaattggccccacggggtgattttgacagtcaaaaaaa

SEQ ID NO: 157775 - DNA, 2489 bp, Homo sapiens
ctcctgggcccacagtaaggcaggtactggagggtcgttgaccatggccgggagagcagggtgtctggccccaggttcaggccttgcgttcctagctgctctgccacctggacgccacccctggccatgggatgcagcagctggtggttcgcccgcttcttgaggtggtgccgcgtgatcagcccttggtctatcacagccccgaccacccggtgcctcagacgccgctcccgattcaacacccgccggcgtttgaacagcttcttcttcagctctgatcccatctcgtgcgagataaaagggctcaggaacgcttgaggaaacaaagtcgcggcccccacacagtcaccgttcggggccggttgatctttccccccggagctcccatagtcgcgattccactccagttcacggtccgtacttccgctcagcgccggatccgcggggctccgccccggccttccgcgggccaatcgcaactcgggggcgggtcctcgggctccccgggcaacagcatcccatgtgcctttgtccagcagtagttggaaagagcctgaagaagccacagcccccaggttctgagcatcggcgtgcatgaagtggaggcttgaggcagggtgtccagggcatagaggtgtttggcctgggccaccctccaggaggctattcatgtgggccacagccacaggagaaaagtccacccccagcacatccactgggtgtggagatttggtgtagaggcctgtacataggctggaagtcccacagcccacatccagcactcgcagaggactggcagcctgtgcctcctgcagcaatggcagtaggagcccctggacttcgtcgtatccaaagaaccagtcgaaggtggggacagtgcccaaacgaggctgggcatgcagccgatcccagagacagcggtccgccaggcaactatcagccagtgagcctgcatatcctgcacatggatcctggaacttgttgacctgagtgacaacagcatccacgacctcccctttaaatggccggaaaacaatggccttgtacttaactggataaaggacaaagcctcggcctggctggatcacaccagcaccaatattgtcaatggtggtgacagcaattacaaagccatacttccctgtgcaggtcccctccacctcggtgaagagcttctgcttcaccgtgttgagcaagttggggccgaagtagcgcgggtgcagcaggatttcgtgctctagggagatagcatctcggtacttcccttcccggtagcgctggttcccttcctccttgtacagctgagcctcctgcagacgcttctccataactgtcgcccacggttcttgcggaactgggaagtgaaggagcaagtgaagaatgtcattcttgtccacacgggtccccacaatctttaagcggatctcatcgtcctgctgaatcacaatatcatgtcgagagatgaagcaagacatgggcccaatttctgtgaagagtccaacccctagaaggggtcccacttctggatctggtttgctgcgtttggccaggtcctcattgtgagccttgcggatgtggcggtagaggtcccctgactgcgtgtagctccgcaggcagtagcggcactcatagggtcgctcacgtgtgtgcaccgtggcatgtcgccgtagtgtgtaagagcatgagaaggtcttcccacatgtcttgcaggtgggaacatcctcagtaaaaaccccaaagcttcctggagctgcttcgtactcagaagacaggtaaagtggctcatgcagggatgcgggtgcaggcagaggtgaggtcaccagtcctcgatgatactgccctgcacctggcagcagatggtagggtagatgagggtctgttggcaggaagtggtcacttggccccacctcctccagtcctgctgcccctgggtcttcaaaagcctctggctgggagggctgtgccccatacactgctcctccagatgggaaagctctctcaggaccctgaggctgttcatctgacacatcagtctcttcatcagagatcacaatagcttcaactttcacctggaccagctcagcttcagctggggctggagcctgggatggaactggagctttcatctccagcattatagattcaggcacatcatctccctctacttccttcctcaactccagcctcttcttccaatcttcctcattagggacaaccaccaccactttccgagagaaggtcttgaacagcaatagcttccgccgttggccagaattgtacacattacacgaacgcgaagaagtggagatgattcggccacctctggtgtagcaggaaatggtgaccaagaacatgcccaaatcttgattcacaggggactctggcagctcaagctctaaggtaacacgatacggctgtccatacatcagcacattattaatcaagcactgacagtgctcagtctccccagccagctctggcacagtcat

SEQ ID NO: 157776 - DNA, 810 bp, Homo sapiens
ttttttttttttttttttcaaagggctagggctttattacaaatggagttgactgctaaagagacccttctccaatctttcttttgtaccttcttccctcccaaagacatccctctagggcgcggtcagtaggccattagggtaggaggaaatctggagagtgaaaaggggccttgcttttgtcaaagtcctcttgaaacaaccactgagtctgaaggctggcctccaagttgagaatcttctagtggaagaggtttagctcttcaatctttcaagggtccttcaattttctaacatccctggggggggcttttgtctttctttttgccctttttgaagctgtggttcaactaagtccctgggctggcctttgaagggggcttccactttccatgggctgtcttctcttttctgggcaaagccggaatctgcttggaaggagttttctgcgcttcttcccttgacagtgtaaatgttggcacgtgcactggacgcccgcttcttgaggtggtgccggcgtgatcagcccttggtctatcacagcccctgaccacccggtgcctcagacgccgctcccgattcaacacccgccggcgtttgaacagcttcttcttcagctcctgccggggagaaagatgcgaatcagatggagtgggctcgccgcgaccccgggcccctccaccaggcagccccggcccctcactgatcccatctcgtgcgagataaaagggctcaggaacgcttgaggaaaacaagtcgcggccccccacacagtcaccgttcggggccggttgatctttccccccggag

SEQ ID NO: 157777 - DNA, 411 bp, Homo sapiens
tcctgtgcgccgccgtcaacagagccctcgacgaagggataccattaactagtgccttgtactacgcgacagtgaccctggatcaggttcggaatatacttcgttctgacacagacgtttccatgcctttagtagaagagaggcatcggatgctctatgataccggaaaaattctgctggagaagtttggaggctgttttctcaactgcgtccgagaaagtgagaatagtgcgcagaagttaatgcactcgtggggctgaaagttgtccttcttacagagatgtgactctagttgaggggaaaagagcttctttttacaaacgaacccaaatccttgtatcatatacgtgcattgtattggaaggcaaatgagatgcgtgcttgcaggacatcctcagtatcaccatgtta

SEQ ID NO: 157778 - DNA, 518 bp, Homo sapiens
agcaggcgggcctggactgccgtgtgtgccccacctgccagcaggtgctcgcgcatggcgatgccagcagccaccaggcgctgcatgctgcccgggacgacgacttcccctccctgcaagccatcgccaggatcatcacgtagctcccgccagcgtggccagagctgtcgcaccgtgagcgtccttcctccttcctctccgggctgccaggcagccaggtaaggcctgatttgggccctcccaaagctgagggctgcagcccgtggggcctcagagctgaaagctgcggcgccactggtgccagagtcagatgtcacagatgtgttgtgtaaacagttggctgtttcatgcttcaagaatgttcaggattaaaagcagacaagaaattgtgctacttgaagttgaatctttttatgagacaagctgaatctgggatctcaaattgcctctgaccttttataagacagtttatcttcaaataaatttattttgccataccccgaaaaaaaaaaaaaaaa

SEQ ID NO: 157779 - DNA, 1359 bp, Homo sapiens
gaagctggccctggaggccaggcagcccgcagtcagcgagggtcctctctgggtcttgtcctgccacccctcaggcttcagcgctgtggtgctcctgaagggcacgcctcccccacccccgccgggcctggtgcccccaatcaactggccgccccctggcttctctggccttgtgcctagcccccacccggcctgtgttacccagccccgccaccaccaccaccacaaaagcacccaggctgctgcctgccccacgggccttacctagtccccgagaacttccgggagaggaaccttcagctcatccagtccatcagggacttcctgcagagcgacgaggcccgcttcagcgagtttcaagagccactcaggggagttcagacagggcctgatctccgcagcccacatattacaagagttgccgggacctgctgggggagaatttccagaaggtctttaatggagctgctggtcctgctgcccgacacgggccaagcagcaggagctcctgtcttgcacacacgggacttctggcaaccgcgagaagcctctgagcaccaagtccaagaagaacaagaagagcgcgtggcaggccaccacccaagcaggcgggcctggactgccgtgtgtgccccaccctgccaagcaggtgctcgcgcatggcgatgccagcaagccaccaggcgctgcatgctgcccgggacgacgacttcccctccctgcaagccatcgccaggatcatcacgtagctcccgccagcgtggccagagctgtcgcaccgtgagcgtccttcctccttcctctccggggctgccaggcaccaaggtaaggccttggtgaggccacttggcctctttggtttggccaggcccaccagggaagtcaccaggacagtccacccgccctgttggcacactcaagcggggagtccaccccttgcctcaagtggtgggccagtctcggtttgcaattcttgtgctttttgggaggtgccaaggggagggaagggctgggatgcttgggacctgttgtttgctggcaaagccagaggtcacagtggcctgatctgggccctcaccaaagctgagggctgcagcccgtggggcctcagagttgaaagttgcggcgccactggtgccagagtcaaatgtcccaaatggtgtggtgtaaacagttggctgtttcatgcttcaagaatgttcaggattaaaagcagacaagaaattgtgatagcttgaagttgaatctttttatgagacaagctgaatctgggatctcaaattgcctctgaaccttttataagacagtttatcttcaaataaatttattttgcaatacccccgcaaaaaaaaaaaaaaa

SEQ ID NO: 157780 - DNA, 841 bp, Homo sapiens
ctaatgggggagatgctgattctgccctggcgtgaccatagatagctagaagctgaagtcattttgagtcgggagaatacagttgggggcactgccggaaaggatctttaagtcagagaatgccctagggcgtgatcatatcccacccggtggcccttgcccacagtcccctagtccacgagattgcaatccgatctgggaaggtccctgctcccttggtagaaggaggctctgggatgggagaagggagcttcttagcgatttgaaaattagcatcccttcagtagcgcaaaccttatggaagaaaccttggccttaaaccattctcagaggggagactggcaggaacaggcctgtttattcaggggaaagttggagaagggagggcgagtttagcagaaaagctcgagatgcctggataacaaaaagtttgcgctcatacttccttcgagggacaatttgctgaatatttacacacctttgcgtgctgcgaggtctttgttggctactgggatgcgagatgtgtatgatgtgaatgtgcaaatatgtttgcatgtgcgaaaagtggctgcacatttgtgggccggtgcagtaagtgtgtgtttgtgccggtgacagagagcacttggctgaatgtgtgcgtgggtgcgtaaggcattggtgcacacgggcgtgagtgcgcatgtgtatagtgtgtgcacgtgtcatgtgtagtgtctaagtgagtggggtgtgcatttgcaaaagtccgtgtgtattgtgcaagagcatcgtaaacgtgtgtgagcctgaactcacacgtggttttgtgtgcacgtgtgcgtatgaaattcagcaaaaa

SEQ ID NO: 157781 - DNA, 863 bp, Homo sapiens
ctagtcaagagggtggccctttttttccctcgcatgggtaatattttttccccagaaacaaacaacaatttgtgagccgcccctttttttttttttaaacaaagtctcattctgttgccctggcatgatctcagctcactgcaacctcctcctcctgggttcaagtgatcctcgtgcctcagcctcctgaagaagctggtattacagacgtgcaccaccatgcctgactaatttttgtatttttagtagagacaagttttcgctatgctggccagggctgacctcgaactcctaggcctcctcatatgatccacccacctcagtctcccaaagtgctggggattacaagcgtgagccaccttggcacagccaaattcaaggtcacttttaaaatacaaatttatttatatgtctaagggacattattcggtaaaggtggaaaacacaacccacagaatgggggaggaaaatattttggcaaaccatggtatctggataagggggtctagaatccagaatatataaagaactcttacaactcagtaataaaaagacaaacgcctaattaaaaagtggggccaaggctcagcacagacacttctccagggaacatacacatatgggccaacagcacccagcaaaggtgcttgatagcatcactcatcagagaaatgcaaatccaaatgacaccagaggctacttcacactcattagaatgattataaccagaaagtcagataataactagtgttggcaagaatgcgcagaaattggaaccctcttacttactggtgggaatgtgaaatggtgcatggacgtgggaaaatagtttggcagttcctcaaaaatatacagttaccatt

SEQ ID NO: 157782 - DNA, 357 bp, Homo sapiens
attcaatcagtaatgagaacttcccaacaaaggaaagccaaggaccagaaactttcactggtgaattctaccagacatttatagattatcaccaatccttctcaaactcttccaaataactgattaagcaggaacacttcccagctcattctatgagatcagcattaccataataccaaagccagaataaaaatcacaagaaaattacagtgcaatgtatcttatgaatatagacacaaaaatctttcagtaaaatactagcaacccaaatctaaccatatattaacgtcattatacactatgaccaggtggggatttatcccagggaatgcaaagttcatttaacgtaataaatcg

SEQ ID NO: 157783 - DNA, 207 bp, Homo sapiens
cggccgcgtcgaccacacccacccggggctgccacgccccctctgtccacacagccccgacccacacagcgtatgtaatcacatagcgctgtgggggcatcgggcctcgcagacccctatgagaggattgtggtatcataggacggcaattcttcttccccaaatcatcagggagatggagcttcacagacctctggtgaacaaatt

SEQ ID NO: 157784 - DNA, 801 bp, Homo sapiens
caaccccgtgacccctcttcaggcacccaccaccctgatggtgacagagggggacagccagcacccatctgtccccgtcagggctcttgttctcacagccccctggagcatgccccatgccccattcttgggcctggctcctggcccagatggcacctggcctcttgagtctgctgggggaccccaaagttggtggtcccatagcctgccctcctgggtctccacctcatgcctggacaggacgctgtggcctgtccgggccttggccagccctgcagctgcaccccgatcctcatccctcaccccattccctgccagcatcctaaggctcctggcgggcatcctctctgctcaaaattattgacctgtctcccggccacacctgctgtgccctctcagccaggccatcatcaccccctgttcattatgtcaggcctcatgggagcctggccttctccagaagctggccccggcgtcctcccaagctggaccacggctgaatgaggaacgcgccactggacacatgaggaagaggctgctctgggagctactgatgctgtgacctcacctctctggctttgggcggcaggtccctgcacctaggatgcctgcctggaaatgtccttgcattcgtggcctccttcacagcctcctcctcagagaagcctctgcaagtgcacagggagtgtgtgcagccttgtgaagggctgggaccacttgcccagactggggcccctcaggcacaggcgtggggtcctactgacctgtctccccagctcccacacagaaagcatctaaaat

SEQ ID NO: 157785 - DNA, 926 bp, Homo sapiens
cctcttcaggcacccgccaccctgatggtgacagagggggacagccagcacccatctgtccccgtcagggctcttgctctcacagccccctggagcatgccccatgccccaaccttgggcctggctcctggcccagatggcacctggcctcttgagtctgctgggggaccccaaagttggtggtcccatagcctgccctcctgggtctccacctcatgcctggacaggacgctgtggcctgtccgggccttggccagccctgcagctgcacccccgatcctcatccctcaccccattccctgccagcatcctaaggctcctggcgggcatcctctctgctcaaaattattgacctgtctcccggccacacctgctgtgccctctcagccaggccatcatcaccccctgttcattatgtcaggcctcatgggagcctggccttctccagaagctggccccggcgtcctcccaagctggaccacgtaggccccagatcacaacctgggggtccagatgtaggggtccccgtgtgcacgcccaaatccagaccgagcacttgtgacactaccccaacacctctcccagggctgaatgaggaacgcgccactggacacatgaggaagaggctgccctgggagctactgatgctgtgacctcacctctctggctttgggcggcaggtccctgcacctaggatgcctgcctggaaatgtccttgcattcgtggcctccttcacagcctcctcctcgagagaagcctctgcgaagtgcacagggagtgtgtgcagccttgtgaagggctgggaccactttgcccagactggggcccctcaggcacaaggcgtggggtcctactgacctgtctccccagctcccaccacagaaagcatctaaaataaacacacgtgggatggaaagcgttaaaa

SEQ ID NO: 157786 - DNA, 426 bp, Homo sapiens
agggtctccagcctcagggcctggcttctgttgggggcagcacctcactgccgtcctgttcctactcaccaggggctcttcagagcagcaggacacctgctcaaacccagggccctgctcatcacctacggggaacccagaatgggggcttcgggacacagccctcctggaggacctgggaaaggccagtggcctgctcctggagaggatggtggacatgccagccaacaacaaatgcctgatcttccggaaaaagtaagcccctccttcacccccgcacacctgcatccctgccggaggctctgtgaggcacgaaccctgcctccctaggccggaccttgtggacgacagccccacccagtctgtgctctcagccgctggccgaagggcccagcctgctcagaataaagcatgtcctgctgccgg

SEQ ID NO: 157787 - DNA, 753 bp, Homo sapiens
cccatcgagatcactagtcagtgtggtggaattcccagatttgcccccatcacagtcggggtgagggtctccagcctcccccatcacagtcggggtgagggtctccagcctcccccatcacagtcggggtgagggtctccagcctcccccatcacagtcggggtgagggtctccagcctcccccatcacagtcggggtgagggtctccagcctcagggcctggcttctgttgggggcagcacctcactgccgtcctgttcctactcaccaggggctcttcagagcagcaggacacctgctcaaacccagggccctgctcatcacctacggggtgagtgggcctgtccacggcgggcctcccgctcccagtcctagctgctgtctcctgccctgctgagagtcctccctcctgggctccctgcccccccgccagccaccagcacggtctgccctccacttccagtctgtacccctccctgggtcatctgccagcctccctacccccttgcccaccaggctggccttggctgactccctcttggggacagggagggggtgccctttcattctccaaaccccagcctgcaagtctgtcccaggctctctgagaaataccccgaccttggtccagtgggctgggtccccatgcccacaaccctatgccatcaatgggaagatctccccccagagcaacgtggactttgacctgatgctcaaatgcacgaacccagaatggcggctttgggacacaag

SEQ ID NO: 157788 - DNA, 750 bp, Homo sapiens
gcggccgcggagcggaacaaggatcccatcttgcacgtgctgcggcagtacctggatccggcccagcgtggcgtccgcgtcctcgaggtggcctcgggctccggccagcacgcagcgcacttcgcgcgggccttccccctggccgagtggcagccgtcggacgtggaccagcgctgcctggacaggggctcttcagagcagcaggacacctgctcaaacccagggccctgctcatcacctacgggggagggggtgccctttcattctccaaaccccagcctgcaagtctgtcccaggctcttctgggaaataccccgaccttggtccagtggggctgtgtccccatgcccacagccctatgccatcaatgggaagatctccccccagagcaaacgtggactttgacctgatgctcagatgcaggaacccagaaatgggggctttcgggacacagccctcctggaggacctgggaaaggccagtggcctgctcctggagaggatggtggacatgccagccaacaacaaatgcctgatcttccggaaaaactaagcccctccttcacccccgcacacctgcactccctgccggaggctctgtgaggcacgaaccctgcctccctaggccggaccttgtggacgacagccccacccagtctgtgctcgtcaccggcgtgcgcgaagggcccagcctgctcagaataaagcatgtcctgctgccggaaaaaaaaaaaaaaaacctgtgccgaat

SEQ ID NO: 157789 - DNA, 380 bp, Homo sapiens
  misc_feature (1)...(380): n = a,t,c or g
caggtgtgagcnnnnnnnnnnnnnnnnnnnnnnnnnnnnnnnnnnnnnnnnnnnnnnnnnnnnnnnnnnnnnnnnnnnnnnnnnnnnnnnnnnnnnnnnngggaaaaaaaattccaatgctatattttgcagaaatagaacaatgcatcttaaaattcgtataaaagatcttgaaaagcaaaataaattctgccaaagaacaacaaagctggaggactcaaatttcctgatttcaaaacttactacaaagctgcagcatcaaaacatcaagtcggtggcctgtggaaggaactgaggagcaccctccaagcccagcagacctgggtccccagggaggagctgaggagcacctctccatcctatcagacccaggtccagct

SEQ ID NO: 157790 - DNA, 397 bp, Homo sapiens
  misc_feature (1)...(397): n = a,t,c or g
nnnnnnnnnnnnnnnnnnnnnnnnnnnnnnnnnnnnnnnnnnnnnnnnnnnnnnnnnnnnnnnnnnnnnnnnnnnnnnnnnnnnnnnnnnnnnnnnnnnnnnnnnnnnnnnnnnnnnnnnnnnnnnnnnnnnnnnnnnnnnnnnnnnnnnnnnnnnnnnnnnnnnnnnnnnnngtcataattactttgagtaatctacagagtcagcataatctctatcaaaataccaacgacatttttcacagaaatagaaaaaacctataatttgggaggaatgacaatagaccttgaatacctaaagctatcctgagcttatagaacaaagttggagacatcccactgcctgactatgaataccacttaaatatgaattgattacactctccgcccatatatta

SEQ ID NO: 157791 - DNA, 345 bp, Homo sapiens
  misc_feature (1)...(345): n = a,t,c or g
caggtgtgagannnnnnnnnnnnnnnnnnnnnnnnnnnnnnnnnnnnnnnnnnnnnnnnnnnnnnnnnnnnnnnnnnnnnnnnnnnnnnnnnnnnnnnnngggaaaaaaaattccaatgctatattttgcagaaatagaaaaatgcatcttaaaattcgtataaaagatcttgaaaagcaaaataaattctgccaaagaacaacagagctggaggactcaaatttcctgatttcaaaacttactacaaagctgcagcatcaaaacatcaagtcggtggcctgtggaaggaactgaggagcaccctccaagcccagcagacctgggtccccagggaggagctgagg

SEQ ID NO: 157792 - DNA, 412 bp, Homo sapiens
  misc_feature (1)...(412): n = a,t,c or g
tttttttttaagacccaacagtatgctgcctacaagagtcacctcacttttaaggacacccatagactgaaagtgaaaagtttggaaaaagatactccatgcaaatagaaaccaaaagaaagcagggatagctaaacttatatcagacaaaatagactttaagtcaaaaactgtaaaaagagacattatataaatgataagagcatcaattcatccaaggaggnttattaacagttatatatggcacccaacattggaaacacctaaatacataaaatattgaaggatctgaagggagggataaattgcaatacaataatagtaggagactttaatactctacagataatccagacagaaaattaataaacattgggcttgaacaatactgtagaccaaatggacctaactg

SEQ ID NO: 157793 - DNA, 471 bp, Homo sapiens
tgagacggagtatcactctgtcgcccaggctggagtgcagtggcgcgatctcagctcactgcaagctccacctcctgggttcacgccattctcctgactcagcctcccaagtagcagggactacaggtgcctgccaccatgcctggctaattttttgtatttttagtagagactgggtttcaccgtgttagccaggatggtcttgatctcctgaccaagtgatccacccacctcagcctccgaaagtgctgggattacaggggtgagccactgcgcctggcctatttctttttcttaaagacaatttaaaaaaactatcaagtaccaatttgttgtaacaataaatttttgccatgttcctcctctgtgcaaaggcaccatgcttggctttacagtgactacaagatgggggagaaggtcttgccttccagaatgcaaatgactatgctaggggagagtatgaggtaaatg

SEQ ID NO: 157794 - DNA, 580 bp, Homo sapiens
  misc_feature (1)...(580): n = a,t,c or g
cgccataggaaccgnccctgattgaccggncccatcacgcgtccggataattaggaggtatctgtcagcacatccctctgaaaccattctgagcttcagctcaagcttcgtgttgcttgaaaaatgaaatgtacagctgatctgagtttgttagaaaaagatacataaattaaacttgaagaaaatagatgacaggaaagaataatgctaagagcagaagtcaatgaaatagaaaacaaaatagagaacattaataaaactggaagnnnnnnnnnngaaaaatattataaaattgataaccccctaacaagatcgataaggaggaaggtgaacataaattaccagtttcagaaatgaaaaagggagtgtcactacaaatcctactgaaatcaaaaggacagtaaaggaatacattatgaaaaactttatgccaataaatttaacaacttagatgaaatgaaaaagtttcttaaacacaatttaccaaaattgacacaaaaaataaacagaaaatcagaatgttctnnnnnnnnnnnnnnnnnnnnnnnnnnnnnnnnnnnnnnnnnnnnnnnnnnnnnnn

SEQ ID NO: 157795 - DNA, 588 bp, Homo sapiens
  misc_feature (1)...(588): n = a,t,c or g
tagggaggctgccatgcatgccctccttcatagtgagaagttccaggtttgaccataagcacctctcacttaggtggaccagtcagctgctgtcgtcccagggtggagcccactgctacttcaggaggggcctgctcaggtgtagttaccacaggtgatggctgagttcagaaacaacccaggggaagtggaaggaagaaaggcaaaaagcatgaagggacagacaactgggaagaaccaggacaatcctgtgattgatgaaatagacttccttgaagcttttaaaaatattcagccctcatcgttttcgaagcgtcattgggattaatgggtatcaagcctgttgactgggaggagattggtggccttgaagatgtaaaacntgaagttaaaacagcccattgtcacttcgtcagaagtcgggtcactgcccagttgcgcgagactcccaacgggccttcttgcgacgctcgggtctgggtccgggtccggacgtgcaacagaagccgtcagtggccccgctggctaaaaaagggcaagcatcggaggctcgagccagcggccgcggcgcttcccgacagttcctaa

SEQ ID NO: 157796 - DNA, 1300 bp, Homo sapiens
  misc_feature (1)...(1300): n = a,t,c or g
ctgtagggaggctgccatgcatgccctccttcatagtgagaaggacaatcctgtgattgatgaaatagacttccttgaagcttttaaaaatattcagccctcatcgtttcgaagcgtcattggattaatggatatcaagcctgttgactgggaggagattggtggccttgaagatgtaaaactgaagttaaaacagagcatttgagtcgcctctgacattcccttgggaatttgttagaatgggcctgacacaaccaaagggagttctcctctatgggccccctggatgtgctaaaaccactctggtgagggccctggccacaagctgtcactgctctttcgtttcagtgagtggagctgatctgttttcaccggttgttggagattcagaaaaagtgttgtctcagatatttcgacaagcaagagcaagcactccagcaattttgtttttggatgaaattgattcaatcttgggagcctcgctcagcccagcaagacaggatgtgatgttcaagaacgagttctttctgttctcctgaatgaattatatggcgttggacttaagacaatagagagaagaggaagtaaatcaagtcaacaggagtttcaagaagtttttaaccgaagtgtcatgattattgcagcaacaaatagacctgatgtgttagatactgctttgttacgacctggaagattagataagatcatctatatcccacctccagatcacaagggccaggctttctatttataaacgtctgtacaaaaaaccatgcccaatagggcctgatgtctccttagaaaacctcgcagcagaaacctgttttttttctggagctgatcttagaaacctctgcacagaagctgctttgctggctctgcaagaaaattggactagaccgcaacttacagtgaaacaagagcacgtgttctaaaatcacttaagactgtaaaaccggtcggttaaagttgcaaggacttggctttatatgaaaacttatttaagaaagaaggattttctaaccgtggaaggtatttaaaaatcaccttaaactcttgttcagttcacattaattgaaatgtgaccttgcctgtcgtttgcaacttcacacttttagaatttgtgtttatatttcctgtaagtgaatnnnnnnnnnnnnnnnnnnnnnnnnnnnnttgtgcctgataagctaaggctcatttatttttaaaaggcatattaaataaaatactgtaatttaggnnnnnnnnnnnnnnnnnnnnnnnnnnnnnnnttaatnnnnnnnnnnnnnnnncaact

SEQ ID NO: 157797 - DNA, 2049 bp, Homo sapiens; identical to SEQ ID NO: 126142

SEQ ID NO: 157798 - DNA, 4342 bp, Homo sapiens
atgagtgctttcgaatcagtgccagatgatgaagaagtggatgtagacgcagtaccagaaaataagttgacattcgacaatctggcagaggggttccgattattcaagactgcttgtgacttcttgtaccatatggacctttctatgaatgaagatatagagaaagaagttaaggaagaaattgaccccgacgaagaagaaagccccaagaaaaagcatttggataagaagagaaaattgaaggagatgtttgatgcagaatatgatgaaggagaaagcacatattttgatgatcttaaaggagaaatgcagaaacaagcacagtgcctaggagggagaagcagtgtgagcatgcaggcacacaggaggccagttgtacatggaggcgacagttgttcagatcctgctgccatgttaactacggtgaaggcagagttcaccactggaggagtccttcagcgtggaggccttcagcaatcttggcaagcaccaattttcatggatgtaggagaatgggagcagaggaactggaggctcaactgcagaaaacttttgtggggttttgctgcagagagaagcagagaaatgaagccgttgttggtggaagaagtggaatcaaaaggttttgagataagagagagaacagagggaagagctgttggaataaagtccaggaagagtggatggtgtctagggtgccccaggaggacagaaaaccaacctgcttgcctgcagtcagacctaaactcagacccaagagcacttgtgattagaaccagtacaaaggtaaaagaaacgctttcactggaagaagggactgtgaagaatacggattactctgaactagggcacatgggcagggagcagtggtctagtgagcagcccctggagcagacacttcaagactatacaaagagatacacgcagcaacattatacagaaatagatcaagatggagggactcaggatttgaagacaaaaaagcatcatattccagtggttgatcgaactccactagagcccccaccaatagtggtagtggtgatgggacctccaaaagttggaaagagcactttgatacaatgcctcattcggaactttacccggcagaagttgactgagatcagaggccctgtgacgattgtgtcaggtaaaaagcgcagactcaccattattgaatgtgggtgtgacattaacatgatgattgatctggctaaagtagcagatctggtactgatgcttatagatgccagctttgggtttgaaatggaaacgtttgagtttctaaacatctgtcaagtacatggctttcctaaaattatgggagttctcacccacctcgactccttcaagcataataagcaactgaagaagacaaagaagcgattaaaacacaggttctggacggaagtttacccgggtgccaagctgttctacctttctggaatggtgcatggagaatatcaaaaccaagaaatccacaatctgggccgttttattacagttatgaagtttaggcctctcacatggcaaacttctcacccttatatcctggcagacaggatggaagatttgacaaacccagaggatatccgaacaaacatcaaatgtgaccggaaggtgtcactttatggttatttaagaggagcacacttgaaaaataaaagccaaattcacatgccaggggtaggagattttgccgtgagtgacatcagtttcctcccagacccttgcgctcttcctgaacaacaaaagaagcgctgtttaaatgagaaggagaagctggtttatgcgcctctttctggagttgggggtgtgctgtatgacaaagacgctgtctatgttgaccttggtggcagccacgtttttcaggtatcggatgaagtggggcccacccatgagctggtccagagtctcatctctacccactccaccattgatgccaagatggcttcaagtcgagtgacgctgttttctgattccaagccacttgggtcagaggatatagataatcaagggctaatgatgccaaaggaggaaaaacaaatggacttgaacactggtcgaatgcgtcggaaagccattttcggagatgaagatgaatctggagatagtgatgatgaagaagatgatgaaatgtctgaagatgacgggttggaaaacggctctagtgatgaggaagcagaagaggaggaaaatgctgagatgactgatcagtatatggctgttaagggcatcaaacgacggaaacttgagttggaagaagacagtgaaatggatttgccagcatttgctgacagtgacgatgaccttgagaggagctcagcggaagaaggggaagcggaggaagctgatgaaagcagtgaagaagaggactgcactgcaggagagaagggcatttcaggatcaaaggctgctggagaaggtagtaaagcagggctgtcaccagctaattgccagagtgaccgtgtgaatctggagaagtctttgctgatgaagaaagcagctctccccactttcgattctgggcattgcacagctgaagaggtgtttgcatctgaagatgaatctgaagaaagctcctcactcagtgcagaggaagaagactcagaaaatgaagaggctattagaaaaaagctttcaaagccttctcaagtgagcagtggtcagaaactggggccacagaacttcattgatgagaccagtgatatagaaaatttactcaaagaggaagaagattacaaggaagaaaataatgattccaaagaaacgtcaggtgccctcaagtggaaggaagacctttccagaaaggcagctgaggcctttctgaggcagcagcaagcagctccaaacctccgaaagcttatttatgggacagtgacagaagataatgaagaagaagatgatgatactctagaagagcttggagggttgtttcgtgtcaaccagcctgacagagagtgtaagcacaaggctgactctttggactgctccagatttcttgtggaggccccccatgactgggatttagaggaggttatgaacagtatcagagattgcttcgtgactggaaagtgggaagatgataaagatgcagccaaggtcttagcagaagatgaggagctctacggtgactttgaagacttggaaacaggggacgtgcacaagggaaaatcaggccccaatactcagaatgaagatatagagaaagaagttaaggaagaaattgaccccgacgaagaagaaagtgccaagaaaaagcatttggataagaagagaaaattgaaggagatgtttgatgcagaatatgatgaaggagaaagcacatatttttgatgatcttaaaggagaaatgcagaaacaagcacagctgagtcgcgcagaatttgaacatcaagatgatgaagccagagtgcagtatgagggttgtcgaccagggatgtacgtccgcattgagatcgaaaatgttccctgtgaatttgtgcagaactttgacccccattaccccattatcctgggtggcttgggcaacagtgagggaaatgttggctacgtgcagatgcgtctgaagaaacatcgctggtataagaaaatcctcaagtcccgagatccaatcatattttctggaatgtttaattctgccttggaagtggccaaatttgaaggtgctgtgattcgaacagtcagtgggataagggggcagatcaagaaagcactccgagctccagaaggagctttcagggccagctttgaggataagctgctgatgagcgatattgtcttcatgcgaacttggtatcctgtttccatcccagcgttctataacccagtaacatctttgttgaaaccagtgggtgagaaagacacctggtcaggaatgcggaccacgggccaactcaggctcgcccatggcgtcagactaaaggcgaacaaggactctctgtataagccaatcctgaggcaaaagaaacattttaattcactgcacattccaaaagccttgcagaaggccctgccatttaagaacaagcccaagacccaagcaaaggcaggcaaggtgccaaaggacaggcggagaccggccgtcatacgcgagcctcatgaaagaaagatccttgcactgctggatgctctgagtacggtgcatagtcagaagatgaagaaggccaaggagcagcggcacctgcacaataaagagcacttcagagccaagcagaaggaggaggaggagaagctgaagcggcagaaggacctcaggaagaagctcttcagaattcaggggcagaaggaaagaagaaaccagaagtccagtttgaagggggctgagggccaattgcagtga

SEQ ID NO: 157799 - DNA, 1373 bp, Homo sapiens
ccactccccagctgtgaaaggaggagctctacggtgactttgaaaacttgcaaacaggggacgtgcactagggaaaatttggccccgattctcttaatgaagatgtacagaatccaggaagaaattgaccctgaccgaagaagaaagtgccaagaaaaagcatttggataagaagagaaaattgaaggagatgtttgatgcagaatatgatgaaggagaaagcacatattttgatgatcttaaaggagaaatgcagaaaagaagcacaggtaaacagcatacaaggtttcccccccgcgcaccacgtcatgtacagctgaatcatgcagaatttgaagatcaagatgatgaagccagagttcagtatgagggttttcgacctgggatgtacgtctgcgttgagattgaaaatgttccctgtgaatttgtgtagaacctttgacccccgttaccccattatcctgggtggcttgggcaacagcgaagggaaatgttgaacacgtgcagatgcgtctgaagaagcatcgctggtataagaaaatccctcaagtcccaagatccattcatatcttctgtaggtggaaggaggtttcagaccattcctactctattatattgaagaccacaatggaagacaaaggcttctaaagtataccccacagcacatgcattgtggagcagcccttttggggtaaaatatgattacaataacttgcctattgccgagattaaactttacaggctgcgttactatagctttgtgcttttcctttcataaaattccactcctaagatttttctcttttctgggagcagggaggtggtttggagtatatacgtaaatctatatccaaatctaaatgcccggaatccagtatgttaaactagaatctaaaatttctggtttgctatatttctttttttccttttcctttaagaccctatcactccacagggaactggtttcttggcaatacagtctgtcagtggcataatggtaactatcttggacaatttcttttacagattggttttgagaaatatatcctgaatgtggattactatgtacatgagactttaagttgaaaattactcatttttattaatataaagtaaatttccctttgcttttaatcttcgtacatccttttcagtagggtgtgggattagaggaggggaggtggaagaattataatggtacatttcctatttttgtgcatcttttgcatttatttatctaagcaagtacttaagcagtgctcaccatgtgctaagcactgtatgaggttgtgaggagccatcagagaccacccagacacaagactccctgcagctgtgcgtgggtagcagtctgttcactccattttcatttg

SEQ ID NO: 157800 - DNA, 432 bp, Homo sapiens
  misc_feature (1)...(432): n = a,t,c or g
cggacgcgtggggtaacattttctttattcagtcttccattgatggatacttaggttgattccgtatctttgctattgtgaatagcgctgtgataaacatatgagagcgagtattttcttcttcttctttttttattttttcggagacagagtctcgctctgttgcccagactggagtgcagtgtcaaaatcatagctcactcatagtaacgtcaaactactggactcgagtgatcttcctgactcagcttctcgagtggctggaattgcaggggcgtgccaccaagcccaactaatttttatttttatttttgtagagatggggtcttgcttgagttcctttctctcagtaggtttaaatcaattgttttgatttaaaacaacaacagattggaccttaatgtttggtctcaaagtaaatgaaaggtttgn

SEQ ID NO: 157801 - DNA, 464 bp, Homo sapiens
ctggtttttttttcttggtgtttgtttgtttgtctgtttgttttaaagactgagtctcactctatcgcccaggctggagtgcagtgacgtgatctcagctcactgcaacctcctcctcctgggttcaaccgattctcctgcctcagcttgctgagtagctgggattacaggcgtgcgcaactatgcccaactaattttattgttggccagctggtctcaaactcttgacctcaggtgatccgcctgcctcagcctccccaagtgttgggattacaggcgtgagccactgtgcccagccaagaattgtttcttttactagcaatattatcctcaaattcaaaaacagtttaagcaagggatgtttgatagaagcatactttgataagacagtgaaagccacagtgcttgaatatcttgccctaagaaatcccaaaccagaagaacacatctggggatttttatat

SEQ ID NO: 157802 - DNA, 652 bp, Homo sapiens
gcggggagggtttaaaggtggctgccagcagggtcagcagcgttctttcagggccctctcacccacagagcggcccgaaaggtccacagttcagtttctcttttttgtttggcccttcaggggttccagggtgggtaggtggggcaaccaatttcagattttttactgggacattcatgacagaatcgagatgtgcatccagctgcatcgcccaacccatccgctgcccagggcagctgacgagcaaaaacacactctgcaggggcccttgtccgtgccggggccctcgcccgcagcaccgcacgttctttgtaggagcaaaacccgaaactcaaagcacagcttgccctgataactgtcttcccagctgggcagccctctagaagatgtgggaaatgacaccctcctgtccagacacaagccacagtcacccccctcccgagggcgtccacggcctgaggggacccggctccatttcagcagagccgcagcggctcaggtcctctcggcaacccacgatcacggcccacgtggtcctgcccatgcccccgctgcccacgccccctgctgcccacgcatgccccccgctgcccacgcatgcccggggaacgagcagcaagcaggcagaaccaccacccagcgcctgctcccc

SEQ ID NO: 157803 - DNA, 480 bp, Homo sapiens
  misc_feature (1)...(480): n = a,t,c or g
cggcgtttgaacaacttcgatgacttctggannnacnnaanannngggnggancaacgcgtccgaccgagcacttgaagcttagctcggctgtttctccgggtttttgtcgatggcctccatctgcgccgaaagctgaactgagccccgcggtgccccggagccacagcagcaggtgcagcgacaatcgccgtcgtgcgcagtcgctggagtcctggagagccacgctgtcctctgcagacaacagcatcagtccgctgtgccccaatgcatcgacgccctgtggacggggcctgcagtccacccgtggtctgagcttgccgggctgcagctcggctgggacccagggaggggccaccctgggacccacagtctcctcagtcacgtgcagagcaaaaaatgcttcctgtgtttggaagagcaagtgacgcaccatttattgataaaaaaggatttttctgtctgatttcatgctgcggcg

SEQ ID NO: 157804 - DNA, 2253 bp, Homo sapiens
tttcaggtgatgggtggtgttttttactttttaaaaaaagccacaattggattttgaaaaacacagacaatggagggctgggccaaccatgaggagtgcaaagggtggcaccggccagtgcccctggacacccggcttgtctggcccctgctccctgtgcttcctggacaccaaacagcatccaccgaggctgggtgaaggcaaaagtgtttattcaagactttctaccacactgtgggaagcatcgataaacagtcataataattatcaattctgagtcactgcaagcgtggggttggatgctggctcttcacagtagccctgggttgggaccatgagcagccatgcgcaccgtccacgcacggccgagctcaacccgaagaccacgcgtgctccctggcaggagcaggaggcctgcacacaaacgctagcagctccccagcctgagcctggggagtgcaccagccaagctcgcagcggagggcccgtttctcctcacaaggctgggagtgaagctcaagagtcctaagaaggttcagaggaccctcaagactaagagctgcaacaagaacggacagccaagaacattcttgggaaacgattgccacagtgaatcattttatactgtcactcacacttgggtgaagggcctcagacatgaaaccctggggagaggcgagtgtgacctccagagtttgggttgggatgcggctgagacagactctgctgctggccgaggagggcagtggctggcgtggccctcatggccagcaggtgctagtactcctctggaggcccaggcgcctgtctaagctggcggctgtggaccacctgcagagctccccccgcagcctggcggagctgggcatccagggcgccaccggaggtggttcacttggacatcaggcagggggttaaggccaatgatgaccccatccctcggggccagcatgaccctctgcatgagggccaaggtcccgccgtcgcctccggaggtcggagccagcctgcagtttcaggtcccggttgggcttggcattgtccggcctctggccccccgggaacaagctcgtttgagccccagctctggctctggcctctgcctgggctccctggacagcagcgtcctccccgcctctcggctgctcgtgggccacaggcacatggtcccccccgcgggcctttctcatctccaggtgaccgccatggtccagccggtggccctgctgtccaccctgctcgccatcagagatgacccgcagttccggctggcgtaacacagcctggggctgtgcagctgctccttccgccccaccgggcaggtccgctgcaaggcccaggtctcggctcacttgcttgggcttcatgcgagggtcccccgtctctgctcctggccctgccacgagccagttggcttcaaacagaaaactggtgccagtggctgccacctccttcccaggttgtttcctgtcttgggaaccgccagtaacgtcctgactttgcccagggaattcctctgcgaggcgctcctctgggcccccggcttccctggcggggtctggcacgggcacctgctccgggcccttggggagctccttcacagtgccagctgccctgggggcggcatccttctggccatctctcagcttgccctgggctgcccgaggctctgtgtcagggccgccgtcaggagggccagcagggtctccgcccacaggcccctcagagtgctccagggagcgctggttaaggtcctgggatggcgcagggcggcccccaggagctctgaggacagggtccaaaggcaggggaggcagattctccaccgtctccctggccttgccttcaggggcctcctggcctctgggcaccgctgccccgggctcttgatgcacctccacctgcctgggtttatcctcctcgtcctcctgcctctgctggtggatctccttgtgctgctcctcgatcaccgccagcagcttctcctgctggtccagcaagcggctttttgctgcacctgcttgttctttgatcaccttgaagcaggacggcggtggtcccagcatctccggccctgccagcttcctccagctggcttggccgcctggtttccacccggctcggctccacggtccctctgctcgcgaggctcgggcgggcagcccaggccctggagccggcttctccgctgggaggggaggcttcccaccgtggtcgctgtcctctgcgggctgccctgtgtccccggcggcg

SEQ ID NO: 157805 - DNA, 412 bp, Homo sapiens
  misc_feature (1)...(412): n = a,t,c or g
nccgccacttgtgcttcaggtccacaacgtcgcggcgacagtagcccagcgcattcncggcctgcaggatgcggctccacacgcggtacctgcgagtgggctcggccttcagcagccccgtgccaaacagcagctggtggtgcttgctcaccttggacaccagcacctcggtctcctgcgggcagaagttgggcttcctcttcttggcccgggtagtgctgggccccgccatccggccatggggcccagcagccgagtccttcctcgggccaatggtgggtgatgaggtgggctccggcatccggctgccttcaggggcaaccccaggccctcgcttcctggcccttgggacaataggcgtgcctgctggccccagatcaccttccccgtccttccccacacagcggttctg

SEQ ID NO: 157806 - DNA, 2015 bp, Homo sapiens
gacaaagacaattctggtcccacagtcttgcatctgactgcccgctttggccaccccaaggtggtgaactggctcttgcatcatggcggtggggatcccaccgcggccacagacatgggcgccctgcctatccactacgctgcagccaaaggagacttcccctccctgaggcttctcgtcaggcactaccctgagggagtgaatgcccaaaccaagaacggtgccacgcccctgtacctggcgtgccaggagggccacctggaggtgacgcagtacctggtgcaggaatgcggcgcggacccgcacgcgcgcgcccacgacggcatgaccccactgcacgccgcggcgcagatgggccacagcccggtcatcgtgtggttggtgagctgcaccgacgtgagcctgtcggagcaggacaaagacggcgccaccgccacgcacttcgcggcgagccgcggccacagcaaggtgctcagctggctgctgctgcacggcggggagatctcggctgacctgtggggcgggaccgcgctgtacgacgccgccgagaacggggagctagagtgctgccagatcctggtagtgaacggcgcggagctggaagtccgcgaccgcgacgggtacgcggccgctgacctgtcggacttcaacggccacagccactgcacccactgcctgcgcacggtggagaacctgagcatggagcactgcgtgctctcccgggatccatccgtggagctggaggcgaagcagccggattcaggcatgtcctcacccaacaccacggtgtcggtccagcctctgaactttgacctcagctcgcccaccagcaccctctccaactacgactcctgctcctccagccactccagcatcaagggccagcaccctccacgtgggctttccagcactagagctgcagacatacagagctacatggacatgctgaacccagagctgggcctgccttggggcacgattgggaagcccatacccccaccacccccacccagcttccccccgccacccccgcccccaggcacccaactgcccccacccccacctagctacccatctcccaagcctcctgtgggaccacaggcagctgacatctacatgcagaccaagaacaaactccgccacgtggagacagaggccctcaagaaggagccgagctcctgcgacggccacgacgggctacggaggcaggactccagccgcaagccccgcgctttcagcaagcagcccagcacgggggactactaccggcagctgggccgctgccccggcgagacgctggtcgcacgcccgggcatggcgcaccgcgaggaggcggaactccctgggaaccacgtgcctaacggctgcgccgcggaccccaaggcgtccagggagcagcagctgccgccgccgccgccgccgccgcccctgcccgaggccgcgagttcgccgccgccggtcccgcctctgcccctcgagggcgctggccctggctgcgggcagcgccgctcctcctcgcccaccggcagcaccaagtctttcaacgtgatgttcccgatgggcgacaactcggagctactggctgagattaaggcaggcaagagcctgaagccgacgccacagagcaaggggctgaccacagtgttctcaggcagcaggcagccggccttccagcccgattggccgctgccgtctgtgtcacctgcactgttaccagtccggagccccacaccgccagctgcggggtttcagccgctgctcaacggaagcttggttccggtgccgcccactactcctgcgccgggggtgcagctggacgtggaggcgctcatccccacgcacgatgagcagggccgtcccaagcccgagtggaagcgccaggtgatggtgggcaagatgcagctgaagatggaggaggaggaggagcagaggtggaaagaggaggaggaggcccggctggccagcatgcccgcctggaggtgggacctcctgcggaagaagctggaagaagagag

SEQ ID NO: 157807 - DNA, 4758 bp, Homo sapiens
ctgtgcagaccatgacaactagtttagattttattgtcagctcattaaaaactcgttctcgttttgtgtttttaaaaaattccactgatacagccgttttctctaccgaaaaagactataaccgcattatttcaccagtggaagctacagacaaagggcccttgagaggcggcatcttcacctacgggaatttttcctgttgacagacattgccagacacacggaatccctcgcagaacaccgatgggcccacaaagcacgcggaggccgcggccgctgacgatgtgagcaaattcggttcacggtgtctggggtatcttattgcagtggtgaccgcattgccttcaaacctgaagtccgagtgcttccaccctggggaatatgcagaccgctgggtcactggaccactccttcaggcattccctgagcccctgggagtcagggctgtggccctgggcctggagccagtctcctgcctcctcccacaggacaaagacaattctggtcccacagtcttgcatctgactgcccgctttggccaccccaaggtggtgaactggctcttgcatcatggcggtggggatcccaccgcggccacagacatgggcgccctgcctatccactacgctgcagccaaaggagacttcccctccctgaggcttctcgtcaggtgtctccgcaggggagtgaatgcccaaaccaagaacggtgccacgcccctgtacctggcgtgccaggagggccacctggaggtgacgcagtacctggtgcaggaatgcggcgcggacccgcacgcgcgcgcccacgacggcatgaccccactgcacgccgcggcgcagatgggccacagcccggtcactcccgcccaggtgagctgcaccgacgtgagcctgtcggagcaggacaaagacggcgccaccgccacgcacttcgcggcgagccgcggccacagcaaggtgctcagctggctgctgctgcacggcggggagatctcggctgacctgtggggcgggaccgcgctgtacgacgccgccgagaacgtgcccccacagtgctgccagatcctggtagtgaacggcgcggagctggaagtccgcgaccgcgacgggtacgcggccgctgacctgtcggacttcaacggccacagccactgcacccactgcctgcgcacgggtccctgccagcacagggggatggtcctggctctgggggctgcagaacacagcaaggcccagaggccagaggctgcaggtgggcctgagggtgaacttccccccgagaaagagtctctggaagagaatgaagctgcctacaggggtcagggcttggtgccctcagcacccactgctccccttcagagcatggagcactgcgtgctctcccgggatccatccgtggagctggaggcgaagcagccggattcaggcatgtcctcacccaacaccacggtgtcggtccagcctctgaactttgacctcagctcgcccaccagcaccctctccaactacgactcctgctcctccagccactccagcatcaagggccagcatgcctccccagggctttccagcactagagctgcagacatacagagctacatggacatgctgaacccagagctgggcctgccttggggcacgattgggaagcccatacccccaccacccccacccagcttccccccgccacccccgcccccaggcacccaactgcccccacccccacctagctacccatctcccaagcctcctgtgggaccacaggcagctgacatctacatgcagaccaagaacaaactccgccacgtggagacagaggccctcttcccgcagccgagctcctgcgacggccacgacgggctacggaggcaggactccagccgcaagccccgcgctttcagcaagcagcccagcacgggggactactaccggcagctgggccgctgccccggcgagacgctggtcgcacgcccgggcatggcgccatccccgcaggcggaactccctgggaaccacgtgcctaacggctgcgccgcggaccccaaggcgtccagggagcagcagctgccgccgccgccgccgccgccgcccctgcccgaggccgcgagttcgccgccgccggtcccgcctctgcccctcgagggcgctggccctggctgcgggcagcgccgctcctcctccctctgcataggcaccaagtctttcaacgtgatgttcccgatgggcgacaactcggagctactggctgagattaaggcaggcaagagcctgaagccgacgccacagagcaaggggctgaccacagtgttctcaggcagcaggcagctctccctgcagcccgattggccgctgccgtctgtgtcacctgcactgttaccagtccggagccccacaccgccagctgcggggtttcagccgctgctcaacggaagcttggttccggtgccgcccactactcctgcgccgggggtgcagctggacgtggaggcgctcatccccacgcacgatgagcagggccgtcccaagcccgagtggaagcgccaggtgatggtgggcaagatgcagctgaagatggaggaggaggaggagcccccgccttagctgacggccgccagctcgtgctgctacccccgcgagggctggaggtacccccgcgagggctggaggtactcccgcgagcacaacgccatcctctggccctttggcgagctcatgaccgaggccgacatcctccgcatcgagcagcaatcgtctccgtgcagcatcaccgcgccacctacgagctgcgcgcactggacgcggcgcccccgcgctgtccgcgccgcaagcccccgcagtccgctggcgccccggtccgcgagcccatcctgtaggaggactacgtggcggccggctctggccagcccagcgccgccgccgcccacggcccgctggccgactgggagcccctggacaccctgggcccgcctgaggcacaggattgccaggcggcgctacttgagcccgagcagctggcgcgccggccgcccctctgcacggaactgcgcggcgtccaggactacctcgacctgcgcaaggagcgcatcgtttacctcttcctggagcactggcgcctctgggccttcctcggaccgggccttccgcggaccaggcgcgcctaggcagactgctccctggcgtgacggccgcccgtgctggccggagctggaggccacggacgccccccggctgccggtgagcaagggcgaggcccacagccccaacgaacggctgcggcagctgctgaggcagcggcaggcagtgggcaagctgctgcaccactggcggagcctgcggcggcacgtgccgccaagcccgggcctggcgcacggcgtgtactggccccagcacttcctgtcgcccctagacggcggcgcacccccgcgctacgaaagcctcacgctcgacctcttcatgctcggctacttccagctaccggagatgggcctgagccgcgaggatcgcaagttccgccacctactgtgctacgagatgttccaccggctggacagccacccgtgggagcgcatccgcctcttccaccgcgtggtgctggaggaggtggaggccggccggcgcggctggagcgacggcttcgaggacctcaggcacaggttcttcggaaacggcctggaggctgggccggcccccgaagaacaggcgaagaaaaaggaagagaaggggaaagaacaggagcggaccgaagaggccgctccggttcagaagggggacccgcccaaggggcagcgcgaggccctggcccctgtgccgcagccgccgccaccgcccgcccgcccgccggcccgccgcgcctccccgccgcgcctccccggatctcttgtgtttcaggaggaggaggaggcccggctggccagcatgcccgcctggaggtgggacctcctgcggaagaagctgtcagcgtttagcccaccagggtccacccagcacctgcgctcccagctgtcacaatgcaaacaacgctatcaagatctccaggagaagctgctgctatcagaagccactgtctttgctcaggcgaacgagctggagaaatacagttcccacgcaggtgaacccttgctgaagcaggacagtaaacaggtccaggtggacctccaggacctgggctatgagacttgtggccaaagcaagaatgaggctgaacaggaggaaacctggcctccagcacctacttggtcccgcgcgctccctcgtgtcgcccctcggagcagcagccgccgcggtcgccgctacccggaaagaagtcagagacgccgcgaggtcgccgccaccgccatgcccaagaataaaggtaaaggaggtaaaaatagacgcaggggtaagaatgagaatgaatctgaaaaaagagaactggtattcaaagaggatggtcaggagtatgctcaggtaatcaaaatgttgggaaatggacggctagaagcaatgtgtttcgatggtgtaaagaggttatgtcacatcagaggaaaattgagaaaaaaggtttggataaatacctcggacattattttggttggtctccgagactaccaggataacaaagctgatgtaattttaaaatacaatgcagacgaagctagaagtctgcaggcatacggcgagcttccagagcatgctaaaatcaatgaaactgatacatttggtcctggagatgatgatgaaattcagtttgatgacattggagatgatgatgaagatattg

SEQ ID NO: 157808 - DNA, 744 bp, Homo sapiens
atgtctgagggatgggagattgaggaagacaaggagaagggcaaggtggtggttgagactgtggttgccaaagagggtctgagtgaacccttgctgaagcaggacagtaaacaggtccaggtggacctccaggacctgggctatgagacttgtggccaaagcaagaatgaggctgaacaggaggaaaccaccagtcccgcacctacttggtcccgcgcgctccctcgtgtcgcccctcggagcagcagccgccgcggtcgccgctacccggaaagaagtcagagacgccgcgaggtcgccgccaccgccatgcccaagaataaaggtaaaggaggtaaaaatagacgcaggggtaagaatgagaatgaatctgaaaaaagagaactggtattcaaagaggatggtcaggagtatgctcaggtaatcaaaatgttgggaaatggacggctagaagcaatgtgtttcgatggtgtaaagaggttatgtcacatcagaggaaaattgagaaaaaaggtttggataaatacctcggacattattttggttggtctccgagactaccaggataacaaagctgatgtaattttaaaatacaatgcagacgaagctagaagtctgcaggcatacggcgagcttccagagcatgctaaaatcaatgaaactgatacatttggtcctggagatgatgatgaaattcagtttgatgacattggagatgatgatgaagatattgatgacatctaa

SEQ ID NO: 157809 - DNA, 5651 bp, Homo sapiens
tgttgcttgagaaacttcgccagcgaatacatgataaagctgttgctctggagcgggctatagatgaaaaattctctgctctagaagagaaagaaaaagaactgcgccagcttcgtcttgctgtgagagagcgagatcatgacttagagagactgcgcgatgtcctctcctccaatgaagctactatgcaaagtatggagagtctcctgagggccaaaggcctggaagtggaacagttatctactacctgtcaaaacctccagtggctgaaagaagaaatggaaaccaaatttagccgttggcagaaggaacaagagagtatcattcagcagttacagacgtctcttcatgataggaacaaagaagtggaggatcttagtgcaacactgctctgcaaacttggaccagggcagagtgagatagcagaggagctgtgccagcgtctacagcgaaaggaaaggatgctgcaggaccttctaagtgatcgaaataaacaagtgctggaacatgaaatggagattcaaggcctgcttcagtctgtgagcaccagggagcaggaaagccaagctgctgcagagaagttggtgcaagccttaatggaaagaaattcagaattacaggccctgcgccaatatttaggagggagagactccctgatgtcccaagcacccatctctaaccaacaagctgaagttacccccactggccgtcttggaaaacagactgatcaaggttcaatgcagataccttccagagatgatagcacttcattgactgccaaagaggatgtcagcatacccagatccacattaggagacttggacacagttgcagggctggaaaaagaactgagtaatgccaaagaggaacttgaactcatggctaaaaaagaaagagaaagtcagatggaactttctgctctacagtccatgatggctgtgcaggaagaagagctgcaggtgcaggctgctgatatggagtctctgaccaggaacatacagattaaagaagatctcataaaggacctgcaaatgcaactggttgatcctgaagacataccagctatggaacgcctgacccaggaagtcttacttcttcgggaaaaagttgcttcagtagaatcccagggtcaagaaatttcaggaaaccgaagacaacagttgctgctgatgctagaaggactagtagatgaacggagtcggctcaatgaggccttacaagcagagagacagctctatagcagtctggtgaagttccatgcccatccagagagctctgagagagaccgaactctgcaggtggaactggaaggggctcaggtgttacgcagtcggctagaagaagttcttggaagaagcttggagcgcttaaacaggctggagaccctggccgccattggaggtgcagctgcaggggatgacaccgaagatacaagcactgagttcactgacagtattgaggaggaggctgcacaccatagtcaccagcaacttgtcaaggtggctttggagaaaagtctggcaactgtggagacccagaacccatctttttcccctccttctccgatgggaggggacagtaacaggtgtcttcaggaagaaatgctccacctgagggctgagttccaccagcacttagaagagaagaggaaagctgaggaggaactgaaggagctaaaggctcaaattgaggaagcaggattctcctcagtgtcccacatcaggaacaccatgctgagcctttgccttgagaatgcggagctgaaagagcagatgggagaagcaatgtctgatggatgggagatcgaggaagacaaggagaagggcgaggtgatggttgagactgtggtaaccaaagagggtctgagtgagagtagccttcaggctgagttcagaaagctccagggaaaactgaagaatgcccacaatatcatcaacctcctcaaagaacaacttgtgctgagtagcaaggaagggaatagtaaacttactccagagctccttgtgcatctgaccagcaccattgaaagaataaacacagaactggttggttcccctgggaagcaccaacaccaagaggaggggaatgtgactgtgaggcctttccccagaccccagagccttgaccttggggctaccttcacagtggatgcccaccaattggataaccagtcccagcctcgtgaccctgggcctcagtcagcgtttagcctaccagggtccacccagcacctgcgctcccagctgtcacaatgcaaacaacgctatcaagatctccaggagaagctgctgctatcagaagccactgtctttgctcaggctaacgagctggagaaatacagagttatgcttacaggtgaatccttggtgaagcaggacagcaagcagatccaggtggacctccaggacctgggctatgagacttgtggccgaagcgagaatgaggctgaacgggaggaaaccaccagtcctgagtgtgaggagcacaacagcctcaaggaaatggtcctgatggaggggctgtgctctgagcagggacgccggggctcaacactggctagttcctctgagaggaagcccttggagaaccagctagggaagcaggaagagttccgggtatatggaaagtcagaaaacatcttggtcctacgaaaggacatcaaagatctgaaggcccagctgcagaatgccaacaaggtcattcaaaacctcaagagccgggtccggtccctctcagttacaagtgattattcgtctagtctggaaagaccccggaagctgagagctgttggcaccttggaggggtcttcacctcatagtgtccctgatgaggatgaggggtggctgtctgatggcactggggctttctactctccagggcttcaggccaaaaaggacctggagagtctcatccagagagtatcccagctggaggcccagctcccaaaaaatggactagaagagaagctggctgaggagctgagatcagcctcgtggcctgggaaatatgattccctgattcaggatcaggcccgggaactgtcttacctacggcaaaaaatacgagaagggagaggtatttgttatcttatcacccggcatgcaaaagatacagtaaaatcttttgaggatctcctaaggagcaatgacattgactactacctgggacagagcttccgggagcaactcgcccagggaagccagctgacagagaggctcaccagcaaactcagcaccaaggatcataaaagtgagaaagatcaagctggacttgagccactggccctcaggctcagcagggagctgcaggagaaggagaaagtgattgaagtcctgcaggccaagctggatgctcggtccctcacaccctccagcagccatgccttgtctgactcccaccgctctcccagcagcacctctttcctgtctgatgaactggaagcctgctctgacatggacatagtcagcgagtacacacactatgaagagaagaaagcttctcccagtcactcagattccatccatcattcgagtcattctgctgtgttgtcttctaaaccatcatcaaccagtgcatctcagggggctaaggccgaatccaacagcaaccccatcagcttgccaactccccagaatacccccaaggaggccaaccaggcccattcaggctttcattttcactccatacccaagctggctagccttcctcaggcaccattgccctcagctccatccagcttcctgcctttcagccccactggccctctcctccttggctgctgtgagacaccagtggtctccttggctgaggctcagcaggagctacagatgctgcagaagcagttgggagaaagtgccagcactgttcctcctgcttccacagctacattgctgagcaacgacttggaagccgactcttcctactacctcaactctgcccagcctcactctcctccaaggggcaccatagaactgggaagaatcctagagcctgggtacctgggcagcagtggcaagtgggatgtgatgaggcctcagaaagggagtgtatctggggacctatcctcaggctcctctgtgtaccagcttaactccaaacccacaggggctgacctgctggaagagcatcttggtgaaatccggaacctgcgccagcgcctggaggagtccatctgcatcaatgaccgcctacgggagcaactggaacaccggctgacctctactgctcgtggaaggggatccacttctaacttctacagtcagggcctggagtccatacctcagctctgcaatgagaacagagtcctcagggaagacaatcgaagacttcaggctcaactgagtcatgtttccagagagcactcccaggaaacagaaagcctgagggaggctctgctgtcctctcgatcccaccttcaagagctggaaaaggagctggagcaccagaaggtggaaaggcagcagcttttggaagacttgagggagaagcagcaagaggtcttgcatttcagggaggaacgtctttccctccaggaaaacgactccagtgggccttgcctctccctggtcagactgcagcacaagctggttctcctgcagcaacagtgtgaagagaaacagcagctctttgagtccctccagtcagagctacaaatctacgaggcactttatggcaattccaagaaggggctgaaagcttacagcctggatgcctgtcaccaaatccctttgagcagtgacctgagccacctggtggcagaggtacgagctctgagagggcagctggagcagagcattcaggggaacaattgtctgcgactgcagctgcaacagcagctggagagcggtgctggcaaagccagcctcagcccctcctccattaaccagaacttcccagccagcactgaccctggaaacaagcagctgctcctccaagattcagctgtgtcccctccagtccgggatgttggtatgaattccccagctctggtcttccccagctctgcttcctctactcctggctcagaaacgcccataatcaacagagcaaatggcttgggtttggatacttctccagtaatgaagacccctcccaagctagagggtgatgctactgatggctcctttgccaataagcatggccgccatgtcattggccacattgatgactacagtgccctaagacagcagattgcggagggcaagctgctggtcaaaaagatagtgtctcttgtgagatcagcgtgcagcttccctggccttgaagcccaaggcacagaggtgctaggcagcaaaggtattcatgagcttcggagcagcaccagtgccctgcaccatgccctagaggagtcggcttccctcctcaccatgttctggagagcagccctgccaagcacccacatccctgtgctgcctggcaaagtgggagaatcaacagaaagggaacttctggaactgagaaccaaagtatccaaacaggagcggctccttcagagcacaactgagcatctgaagaacgccaaccagcagaaggagagcatggagcagttcatcgtcagccagctaaccagaacacatgatgttttaaagaaggcaaggactaacttagaggtgaaatccctaagggctctgccatgtactccagccttgtga

SEQ ID NO: 157810 - DNA, 1134 bp, Homo sapiens
atgaaggtgacatttgcaaacaaacctgaaggaggtggaagactggccaagcagagacctccgggaagaggggctaggcccagacccaagcatgagggtggccagagtgttctgggaacacgaagaccagcgctgctgcaggtgagctgcaccgacgtgagcctgtcggagcaggacaaagacggcgccaccgccacgcacttcgcggcgagccgcggccacagcaaggtgctcagctggctgctgctgcacggcggggagatctcggctgacctgtggggcgggaccgcgctgtacgacgccgccgagaacggggagctagggtgctgccagatcctggtagtgaacggcgcggagctggaagtccgcgaccgcgacgggtacgcggccgctgacctgtcggacttcaacggccacagccactgcacccactgcctgcgcacggtggagaacctgcacagggggatggtcctggctctgggggctgcagaacacagcaaggcccagaggccagaggctgcaggcgggcctgagggtgaacttccccccgagaaagagtctctggaagagaatgaatggcccagcaggggtcagggcttggtgccctcagcacccactgctgttgcccagagcatggagcactgcgtgctctcccgggatccatccgtggagctggaggcgaagcagccggattcaggcatgtcctcacccaacaccacggtgtcggtccagcctctgaactttgacctcagctcgcccaccagcaccctctccaactacgactcctgctcctccagccactccagcatcaagggccagcaccctccacgtgctcccaatccccagattctccagtacaagaagaggttctcggagctggagcagctgttggagagatccggagagctggagcagcagcagctgagggacgcagagcacagccaagacctggagagtgccctcatctggctggaggaggagcagcagggagggccagggctcgcagcatggccccctgggcgagcgcctactgatcccctgtgccccattcaggagtgccagcctggcccaggtgaatgccatgctctgagaacagctggaccaggcaggtttggccagccaggctctgagtga

SEQ ID NO: 157811 - DNA, 945 bp, Homo sapiens
tgaccgggctgtggcccatctgcgccgcggcgtgcagtggggtcatgccgtcgtgggcgcgcgcgtgcgggtccgcgccgcattcctgcaccaggtactgcgtcacctccaggtggccctcctggcacgccaggtacaggggcgtggcaccgttcttggtttgggcattcactcccctgcggagacacctgacgagaagcctcagggaggggaagtctcctttggctgcagcgtagtggataggcagggcgcccatgtctgtggccgcggtgggatccccaccgccatgatgcaagagccagttcaccaccttggggtggccaaagcgggcagtcagatgcaagactgtgggaccagaattgtctttgtcctggttgtcatggcaggagactggctccaggcccagggccacagccctgactcccaggggctcagggaatgccgcggcctggcgtccagtgacccagcggtctgcatattccccagggtggaagcactcggacttcaggtttgaaggcaatgcggtcaccaccgaagaatcatcaggttcctgattcgcgtgctggaccttgggcttactgctgagccgctgtagagaggaccaagaaatgacgctcttggaaggagagaagcccagacaccgtgaaccgaatttgctcacatcgtcagcggccgcggcctccgcgtgctttgtgggcccatcggtgttctgcgagggattccgtgtgtctggcaatgtctgtcaacaggaaaaattcccgtaggtgaagatgccgcctctcaagggccctttgtctgtagcttccactggtgaaataatgcggttatagtctttttcggtagagaaaacggctgtatcagtggaattttttaaaaacacaaaacgagaacgagtttttaatgagctgacaataaaatctaaactagttgtcatggtctgcacag

SEQ ID NO: 157812 - DNA, 5290 bp, Homo sapiens
atggctgtgcgccaggcaccaggcctgtgctcagggctctgcaggcacttctcaggcactctgcacgaggtcaggatgacaactgttgcccccatttcatggatgggtttgggaacacaaagagacaagaagcaagactgtggcacagctcaaaggcacgggactcgagccaggtcctcctgcggggctgtgccccagcagctgtcaaagagtgttcctgagttcccagcagtgaggggagtgaatgcccaaaccaagaacggtgccacgcccctgtacctggcgtgccaggagggccacctggaggtgacgcagtacctggtgcaggaatgcggcgcggacccgcacgcgcgcgcccacgacggcatgaccccactgcacgccgcggcgcagatgggccacagcccggtcatcgtgtggttggtgagctgcaccgacgtgagcctgtcggagcaggacaaagacggcgccaccgccacgcacttcgcggcgagccgcggccacagcaaggtgctcagctggctgctgctgcacggcggggagatctcggctgacctgtggggcgggaccgcgctgtacgacgccgccgagaacggggagctagagtgctgccagatcctggtagtgaacggcgcggagctggaagtccgcgaccgcgacgggtacgcggccgctgacctgtcggacttcaacggccacagccactgcacccactgcctgcgcacggtggagaacctgcacagggggatggtcctggctctgggggctgcagaacacagcaaggcccagaggccagaggctgcaggtgggcctgagggtgaacttccccccgagaaagagtctctggaagagaatgaatggcccagcaggggtcagggcttggtgccctcagcacccactgctgttgcccagagcatggagcactgcgtgctctcccgggatccatccgtggagctggaggcgaagcagccggattcaggcatgtcctcacccaacaccacggtgtcggtccagcctctgaactttgacctcagctcgcccaccagcaccctctccaactacgactcctgctcctccagccactccagcatcaagggccagcaccctccacgtgggctttccagcactagagctgcagacatacagagctacatggacatgctgaacccagagctgggcctgccttggggcacgattgggaagcccatacccccaccacccccacccagcttccccccgccacccccgcccccaggcacccaactgcccccacccccacctagctacccatctcccaagcctcctgtgggaccacaggcagctgacatctacatgcagaccaagaacaaactccgccacgtggagacagaggccctcaagaaggagccgagctcctgcgacggccacgacgggctacggaggcaggactccagccgcaagccccgcgctttcagcaagcagcccagcacgggggactactaccggcagctgggccgctgccccggcgagacgctggtcgcacgcccgggcatggcgcaccgcgaggaggcggaactccctgggaaccacgtgcctaacggctgcgccgcggaccccaaggcgtccagggagcagcagctgccgccgccgccgccgccgccgcccctgcccgaggccgcgagttcgccgccgccggtcccgcctctgcccctcgagggcgctggccctggctgcgggcagcgccgctcctcctcgcccaccggcagcaccaagtctttcaacgtgatgttcccgatgggcgacaactcggagctactggctgagattaaggcaggcaagagcctgaagccgacgccacagagcaaggggctgaccacagtgttctcaggcagcaggcagccggccttccagcccgattggccgctgccgtctgtgtcacctgcactgttaccagtccggagccccacaccgccagctgcggggtttcagccgctgctcaacggaagcttggttccggtgccgcccactactcctgcgccgggggtgcagctggacgtggaggcgctcatccccacgcacgatgagcagggccgtcccaagcccgagtggaagcgccaggtgatggtgggcaagatgcagctgaagatggaggaggaggaggagcagaggtggaaactgacggccgccagctcgtgctgctacccccgcgagggctggaggtacccccgcgagggctggaggtactcccgcgagcacaacgccatcctctggccctttggcgagctcatgaccgaggccgacatcctccgcatcgagcagcaatcgagaacctgcagcatcaccgcgccacctacgagctgcgcgcactggacgcggcgcccccgcgctgtccgcgccgcaagcccccgcagtccgctggcgccccggtccgcgagcccatcctgtaggaggactacgtggcggccggctctggccagcccagcgccgccgccgcccacggcccgctggccgactgggagcccctggacaccctgggcccgcctgaggcacaggattgccaggcggcgctacttgagcccgagcagctggcgcgccggccgcccctctgcacggaactgcgcggcgtccaggactacctcgacctgcgcaaggagcgcatcgtttacctcttcctggagcactggcgcctctgggccttcctcggaccgggccttccgcggaccaggcgcgcctaggcagactgctccctggcgtgacggccgcccgtgctggccggagctggaggccacggacgccccccggctgccggtgagcaagggcgaggcccacagccccaacgaacggctgcggcagctgctgaggcagcggcaggcagtgggcaagctgctgcaccactggcggagcctgcggcggcacgtgccgccaagcccgggcctggcgcacggcgtgtactggccccagcacttcctgtcgcccctagacggcggcgcacccccgcgctacgaaagcctcacgctcgacctcttcatgctcggctacttccagctaccggagatgggcctgagccgcgaggatcgcaagttccgccacctactgtgctacgagatgttccaccggctggacagccacccgtgggagcgcatccgcctcttccaccgcgtggtgctggaggaggtggaggccggccggcgcggctggagcgacggcttcgaggacctcaggcacaggttcttcggaaacggcctggaggctgggccggcccccgaagaacaggcgaagaaaaaggaagagaaggggaaagaacaggagcggaccgaagaggccgctccggttcagaagggggacccgcccaaggggcagcgcgaggccctggcccctgtgccgcagccgccgccaccgcccgcccgcccgccggcccgccgcgcctccccgccgcgcctccccggatctcagactctccgggaggaggaggaggcccggctggccagcatgcccgcctggaggtgggacctcctgcggaagaagctggaagaagagaggggcaccccagggttagagcccttgaagataaggatggtcaaacaaaataatattatatctgcagaaagtcagatcttggtaagatttactagttgggaatccaatgttaatgccaagaagcagctgccagttgggatcaaatgtgagcctatggatcaagaatgcatccctggctcccgtgcgtgcacacttctagttaggtttagcaatggagggcccccgatggatcctggaagtgagaggaagggagccttggaaggagcccgaatcactgatggaattggacagtgcatggagatggttcagcaggacaaggtccctggctccacctcttctgccacaaacgtcagcatggtggtatcagctggcccttggtccagcgagaaggcagagacgaacattttagaaatcaacgagaaattgcgcccccagctggcagagaacaaacagcagttcagaaacctcaaagagaaatgttttgtaactcaactggccggcttcctggccaaccgacagaagaaatacaagtatgaagagtgtaaagacctcataaaatttatgctgaggaatgagcgacagttcaaggaggagaagcttgcagagcagctcaagcaagctgaggagctcaggcaatataaagtcctggttcactctcaggaacgagagctgacccagttaagggagaagttacgggaagggagagatgcctcccgctcattgaatcagcatctccaggccctcctcactccggataagccagacaagtcccaggggcaggacctccaagaacagctggctgaggggtgtagactggcacagcaacttttccagaagctcagcccagaaaatgacgaagatgaggatgaagatgttcaagttgaggaggctgagaaagtactggaatcatctgcccccagggaggtgcagaaggctgaagaaagcaaagtccctgaggactcactggaggaatgtgccatcacttgttcaaatagccacagcccttgtgactccaaccagcctcacaagaacatcaacatcacctttgaggaagacaaagtcaactcaactctggttgtagacagagaatcctctcatgatgaatgtcaggatgctgtaaacattctcccagtccctggccccacctcttctgccacaaacgtcagcatggtggtatcagccggccctttgtccagcgagaaggcagagatgaacattctagaaatcaacgagaaattgcatccccagctggcagagaagaaacagcagttcagaaacctcaaagagaaatgttttgtaactcaactggcctgcttcctggccaaccagcagaacaaatacaaatatgaagagtgcaaagacctcataaaatctatgctgaggaatgagcgacagttcaaggaggagaagcttgcagagcagctcaagcaagctgaggagctcagaatgggaagtgggaaatatctgaacgaacattttgtatttacagaaaatgacgaagatgaggatgaagatgttcaagttgaggaggctgagaaagtactggaatcatctgcccccagggaggtgcagaaggctgaagaaagcaaagtccctgaggactcactggaggaatgtgccatcacttgttcaaatagccacggcccttgtgactccaaccagcctcacaagaacatcaacatcacctttgaggaagacaaagtcaactcagctctggttgtagacagagaatcctctcatgatgaatgtcaggatgctgtaaacattctcccag

SEQ ID NO: 157813 - DNA, 1615 bp, Homo sapiens
tgagtgcggcggaattcctggaagaagagaggtgagccggcggtcaggcagaggctggcctggcagcgggtcttgactgcgcccctgaggtggaggtaccaagtgacactgtttctccttctaggaagcagaagcgttggagaaccagtcccagccttgtgacactgggcccaatcagcatttagcccaccagggtccacccagcacccgcgctcccagctgtcacaatgcaaacaacgctatcaagatctccaggagaagctgctgctatcagaagccactgtctttgctcaggcgaacgagctggagaaatagagagttatacttagtgaacccttgctgaagcaggacagtaaacaggtccaggtggacctccaggacctgggccacgagacttgtggccaaagcaagaatgaggctgaacaggaggaaacctggcctccagcaccctacttggtcccgcgcgctccctcgtgtcgcccctcggagcagcagccgccgcggtcgccgctacccggaaagaagtcagagacgcccgcgaggtcgcccgccaccgccatgcccaagaataaaggtaaaggatggtaaaaacaagacgcaggggtaagaatgagaatgaatctgaaaaaagagaactggtattcaaagaaggatggtcaggagtatgctcaggtaatcaaaatcgttggggaaatggacggctagaagcaatgtagtttcgatggtgtaaagaggttatgtcacatcagaggaaaatttgagaaaaaaaggttttggataaataccctcggacattattttggttggtctccgagactaccaggataacaaagctgaatgtaattttaaaatacaatgcagaccgaagctagaagtctgaaggcatacggcgagcttccagagcatgctaaaatcaatgaaactgatacatttggtcctggggagatgatgatgaaattcagttttgatggacatttggagatgattgatggaaggtatttgatggacatcttaaattgaactcaacattttacattccatcttttctgaagattgtcctacaatttggattttgatcatgacaaagaagattaaaatttcattagcatgaatgcaatttgttaaagcagactgatttgtttctaagataatttggggtttttttaaacctaataataatgctgaattatcttaagtgagaatgttaagcccacttttgttctttaaatgtaatggagcttatggggtagaaagaccatgtctactaattacaaaaaaaaaaaaaaaaaaaaaccatgcattgctgcttttcctaccacttccagtaagaaaatgggtgttttgaagaaatcatttgccttgtcctcacggaatctgattaagccctggcctcttgattgtatagagtcattgtgtatattccagttacctagatattcccttgagattttgatacaatttgagggaggcagaagtctgcatttgaagaaaaaaaaataagtctgtttgtcatatttaagtagcctgtggctatttttatactgattttgatatcatgttcttttcatagtcgtattttgccaccgtaaacataaaaaaaaaaaaaaaaaagcat

SEQ ID NO: 157814 - DNA, 327 bp, Homo sapiens
gaacatttgaaatttattctcttgacaattttgaaagatccaatacactattattaactatagtcactatgctgtgcaatagatctcaaaagcttattcctcttaactgaaacctactaccctgtgacatgtggggaacatctctctattccccagccccagtccctaaatgttgaatacacaatggggaaaaaaaagtcttcaatgaatggtggtgggaaaattgtatatccacatgcagaagaataaaattggacccttacctcctaccatatataaaaaccaactgaaaatcgattaaagacttaaactgtaaaactactaaaa

SEQ ID NO: 157815 - DNA, 327 bp, Homo sapiens; identical to SEQ ID NO: 157814

SEQ ID NO: 157816 - DNA, 642 bp, Homo sapiens; identical to SEQ ID NO: 123731

SEQ ID NO: 157817 - DNA, 3099 bp, Homo sapiens; identical to SEQ ID NO: 123733

SEQ ID NO: 157818 - DNA, 238 bp, Homo sapiens
agtgacctcttcacggaagcctcccaggatcggcaagctggagcctctgttaaggagggagacacggatgtgtttggtgctgcctccgttccatcactgaaggagccacagaagcctgagcagcccactccaaggaaaagcccctatggtccccctcccactggcctctttgatgatgatgatggtgatgatgatgacgactttttctcggcaccccacagcaaaccttctaaaacac

SEQ ID NO: 157819 - DNA, 1374 bp, Homo sapiens
gatgatatatttgctacggaagcaattaaaccctctcagaaaaccagagagaaggagaaaacattggaatctaatttatttgatgataacattgatatctttgctgacttaactgtaaaaccaaaagaaaagtccaaaaagaaagtggaagccaagtctatatttgatgatgatatggatgacatcttctccactggtatccaggctaagacaaccaaaccaaaaagccgatctgcacaggccgcacctgaaccaagatttgaacacaaggtgtccaacatctttgatgatcccctgaatgcctttggaggccagttgagatctccgagtcgctgttgtcaggcagactgctgtcctccagattcaggcctgtgggtctggggagccctggttggtcttggaggagcaagggctgcgcagcacatcacacaagtgagtgatgaggaagaggatgatgatggctgtgacctttttgctgactctgagaaggaggagaaagatattgaggacattgaagaaaatactagacctaaaagaagcagacctacatcgtttgcagatgagctggctgcccgcatcaagggggatgccgtgggccgagtggacgaggagccgacaactgtgagttatgaggatgacagacgtggaaagaaccaggatgcgtatactgagggaggacttagtactattaaaactgtgaactgttcttcaagccttaccctcaggagaagcaaaacttcggaagacactcaagagaagaaggaaaggagaactccttcggacgatgaagaggataacttattcgcaccccccaagctgaccgacgaggacttctcgccatttggctctggaggtggcctgttcagtgggggcaaggggctctttgatgatgaggacgaggagagtgacctcttcacggaagccccccaggatcggcaagctggagcctctgttaaggagggtaagctggggctgggcagctgcgtctccgtgtgcagagttccaaaactgtctttctcactaggagatggaaccctgaggagacacggatgtgctgcctccgttccatcactgaaggagccacagaagcctgagcagcccactccaaggaaaagcccctatggtccccctcccactggcctgtttgatgatgatgatggtgatgatgataacgactttttctcgacaccccacagcaaaccttccaaaacaggcaaagtccaatccactgccgatatctttggtgacgaagaaggagatctgttcaaagaaaaagccgtagcatcgccagaagccactgtgagtcagacagatgaaaataaagcaagagcagaaaagaaggttaccttatcttacagccaaaatgtcaagccg

SEQ ID NO: 157820 - DNA, 417 bp, Homo sapiens
atggactcatcccgctccgtaggcaacggcttcacctatcaggacaagctttcttcttccaagctaacttctgtcctggaggccgttgctggggagtacgccctggtcataaatggtcacagcctggtaggcatcgctatccttagcttgggcagtatctttccagtgagcacttctgtccagggcttttatatcttgttctaatttcccctgatttcagagaagactggtctcaaaggggactgggaggagctgagactcccaggtgtctcctggaaagactggctctctcaggtttctctgtgctccaggcccacgcactggaggcagacatggagctggagtttctggagacagcgtgtgcctgcaaagctgtcatctgctgccgggtgacccccttgcagaaggcacaggtgg

SEQ ID NO: 157821 - DNA, 700 bp, Homo sapiens
ctttggtgaaatcctatttagcacagtttgcagctcgtgccatcatttcagagctggtgagcatttcagaactagctcaaccactagaaaggggcacccattttcctctcttcctactttgtcttcagcagttagctaaattacaagatcgagaatggttaacagaactttttcaacaaagcaaggtcaatatgcagaaaatgctcccaggtaagagaaagctgacttgcttgttttgtttttttaatattatatctagagatttcaggtaccttgagtggatttatgtaggtcagacagtctgattgtcctgctcagataatgataaacattaccacagatctcacctataaagagagatttataatttaactactttcatttgatcccgatgttgagtttttttcatttgctgggttggctctctattatgctacaaggatctaaaatacttgggggacatcatttgtgaagctctgctctctggacaggaccacttggtaaaatgaactattagatgatgcaggtggctttgtctcttcagagagtgatcagaataaggaccgcatgttggagattttggaaggaaagggactgagtttcttattcccaactcctcaattggagaaggacctgtttgagcaaagtaaagttggatccatcccctcaaaccatatataaatggattaaagataacatt

SEQ ID NO: 157822 - DNA, 3825 bp, Homo sapiens
gagcagtgagtcggagctctatggaggtggcagcgggtaccgagtggcggctgcagcagcgactcctctgagctgagtttgaggccgtccccgactccttcctcccccttccctcccccttttttttgttttccgttcccctttcccctcccttccctatccccgacgaccggatcctgaggaggcagctgcggtggcagctgctgagtttctcggtgaaggtatttcatttctactgtcccctcccctccccaccccatctattaatattattcttttgaagattcttcgttgtcaagccgccaaagtggagagtgcgattgcagaagggggtgcttctcgtttcagtgcttcttcgggcggaggaggaagtaggggtgcacctcagcactatcccaagactgctggcaacagcgagttcctggggaaaaccccagggcaaaacgctcagaaatggattcctgcgcgaagcactagacgagatgacaactccgcagcaaacaactccgcaaacgaaaaagaacgacatgatgcaatcttcaggaaagtaagaggcatactaaataagcttactcctgaaaagtttgacaagctatgccttgagctcctcaatgtgggtgtagagtctaaactcatccttaaaggggtcatactgctgattgtggacaaagccctagaggagccaaagtatagctcactgtatgctcagctatgtctgcgattggcagaagatgcaccaaactttgatggcccagcagcagagggtcaaccaggacagaagcaaagcaccacattcagacgcctcctaattcccaaattacaagatgaatttgaaaaccgaactagaaatgttgatgtctatgataagcgtgaaaatcccctcctccccgaggaggaggaacagagagccattgctaagatcaagatgttgggaaacatcaaattcattggagagcttggcaagcttgatcttattcacgaatctatccttcataagtgcatccaaacacttttggaaaagaagaagagagtccaactccaagatatgggagaggatttggagtgcctctgtcagataatgaggacagtgggacctagattagaccatgaacgagccaagtccttaatggatcagtactttgcccgaatgtgctccttgatgttaagtaaggaattgccagcaaggattcgtttcctgctgcaggataccgtagagttgcgagaacaccattgggttcctcgcaaggcttttcttgacaatggaccaaagacgatcaatcaaattcgtcaagatgcagtaaaagatctaggggtgtttattcctgctcctatggctcaagggatgagaagtgacttccttctggagggaccgttcatgccacccaggatgaaaatggatagggacccacttggaggacttgctgatatgtttggacaaatgccaggtagcggaattggtactggtccaggagttatccaggatagattttcacccaccatgggacgtcatcgttcaaatcaactcttcaatggccatgggggacacatcatgcctcccacacaatcgcagtttggagagatgggaggcaagtttatgaaaagccaggggctaagccagctctaccataaccagagtcagggactcttatcccagctgcaaggacagtcgaaggatatgccacctcggttttctaagaaaggacagcttaatgcagatgagattagcctgaggcctgctcagtcgttcctaatgaataaaaatcaagtgccaaagcttcagccccagataactatgattcctcctagtgcacaaccaccacgcactcaaacaccacctctgggacagacacctcagcttggtctcaaaactaatccaccacttatccaggaaaagcctggcaagaccagcaaaaagccaccaccgtcaaaggaagaactccttaaactaactgaaactgttgtgactgaatatctaaatagtggaaatgcaaatgaggctgtcaatggtgtaagagaaatgaggggctcataaacactttcttcgtgagatgttaagcaaagtaatcatcctgtcactagatagaagcgatgaagataaagaaaaagcaagttctttggatcagtttactcaaacaggaagggatagccacaagtgacaacttcatgcaggctttcctgaatgtattggaccagtgtcccaaactggaggttgacatccctttgggtgaaatccctattttagcacagtttgcagctcgtgccatcatttcagagctggtgagcattttcagaacctagctcaaccacctagaaagtggcacccattttcctcctccttcctactttggtcttcagcagttagctaaatttccaagatcgagaatgggttaaccaggaacttttttcaacaaagccaaggtcaaatatgcagaaaatgctcccagaaattgatcagaataaggaccgcatgttggagattttgggaaggaaagggactgagtttcttattcccactcctcaaattggaggaaggaactgtttgaagcaaataaaagttgggatccatcccctcaaaccatatataaatggattaaagataacatctctcccaaacttcatgtagataaaggatttgtggaacatctttaaatgactagcttctttacagttacatttctagtggagttaaacccccccagccgatgaaacagattcatcctctgctcctttccaaaggaacagttaagagcaggaaaaacaactactactatctttcaagccagtaatgcagaaatttcttcatgatcacgttgatctacaagtcagtgccctgtatgctctccaggtgcactgctataacagcaacttcccaaaaggcatgttacttcgcttttttgtgcacttctatgacatggaaattattgaagaagaagctttcttggcttggaaagaagatataacccaagagtttccgggaaaaggcaaggctttgttccaggtgaatcagtggctaacctggttagaaactgctgaagaagaagaatcagaggaagaagctgactaaagaaccagccaaagccttaaattgtgcaaaacatactgttgctatgatgtaactgcatttgacctaaccactgcgaaaattcattccgctgtaatgttttcacaatatttaaagcagaagcacgtcagttaggatttccttctgcataaggtttttttgtagtgtaatgtcttaatcatagtctaccatcaaatattttaggagtatctttaatgtttagatagtatattagcagcatgcaataattacatcataagttctcaagcagaggcagtctattgcaaggaccttctttgctgccagttatcataggctgttttaagttagaaaactgaatagcaacactgaatactgtagaaatgcactttgctcagtaatacttgagttgttgcaatatttgattatccatttggttgttacagaaaaattcttaactgtaattgatggttgttgccgtaatagtatattgcctgtatttctacctctagtaatgggctttatgtgctagattttaatatccttgagcctgggcaagtgcacaagtctttttaaaagaaacatggtttacttgcacaaaactgatcagttttgagagatcgttaatgcccttgaagtggtttttgtgggtgtgaaacaaatggtgagaatttgaattggtccctcctattatagtattgaaattaagtctacttaatttatcaagtcatgttcatgccctgattttatatacttgtatctatcaataaacattgtgatacttg

SEQ ID NO: 157823 - DNA, 1157 bp, Homo sapiens
aaagaattgaaaaaaaaatcaaagcagcaccttaaacaatgagaatgaagcattcattggctgctcaataatctggtacattaaggttgcggtccagaagtccctttaattaacaatggttctgccaaaatgctaccctgagacacttgaccagactggctttccaaggcaagaagatctgaggcgaggagaaccgaaaacaaagcgggctcaaaaagagttaagctccttccttacttaatgccactgcttttctgagaggccaggtggcaggatgtgggacgactccagctgacaaagacagtctaaccgtggggtaggggctggagcaggggccagcgacccacgtctacatgcatacttctcttacactgctgctactggaaaagctgaaccccgcgccaggaccccagccccctgcaaggacccgtgagcgtctgggaagctgtctctgggactgaagccccccacctccgccgggctggcggccactgcggtaccctacgccccgtcgggctggtcctgcacaatttgggaaaaagccgcagcgcttctgcaaggtctacgtggccatgagcatgcaacgcttggctccaaaaaagacacgaaaggagcaaagcgccaacgaccacccgatcggagggcccgaggggcgcctcttcaccagtcagctgcagcttaagttccgtgcattatctgaaaggatcagctggctggaggtatccagggctgtcactccaacctctgcagcagtgacctcaactcccagcacttcaaaacccagacagaaacgtccaacaaactcccagtccaggagcgctgcaaaaccaacgccaggtagacggtgccagcccgggggtcgctgcccaacatgcacccgcagcccttgactgcggtgagcccgaggcagacggcacggggaggcgcggcggttacctctccgggaggcgcggcggttacctctccgggaggcgcggcggttacctctccgggccccgcgatcctttcgcaaagtcccaagtcctggtcaaggcaggagcgcgccgcaggcgggggtcggggcagggaccgggcggaggcgacgctccatggacgcctggggtcgggctcgctcgctggcagggtcggctgggggtgtgatctctcttggcggccgc

SEQ ID NO: 157824 - DNA, 432 bp, Homo sapiens
accatattaagagggtaaagaagaatcacatgatcatatcagttggtacagaaaaggcatttgacaaaattcaacactcattcattattttttttaagttcagaaaaaaataggaatgggggcatttctttaacttgataaagagcttctcttgaaaagttagagctaatattacactcagtggtgatgctttctccctaattttggtaataagacaaggatgtctgctgttaccactcttatttgacaaagtgctgaaagttctagacagtgcagtaaagcaagaaaaggaaataagagacatataggttggaaaggaagaaatcaaactgtccttatttgaagatgacatgattgtctacatagggaataataagtaatttacagaaaactcccagaattcataaatgagttcagcaaggttgcagggta

SEQ ID NO: 157825 - DNA, 682 bp, Homo sapiens
cggccgcgtcgaccggaggtggttgggtttctgagtttgagtctgtcgctcctggctctcccgacacaacagcggcgcccacctgcccgcaacggactcccaggagcctcgagctcctcatttccaaagctgaactggcccgtgtctgaatccgatttctcctgagcgggtttcggagccgggccagaacagagggaagcccagaccacacccataccccggccccaaccagtggccagggccggctgcgggtgctggtccaagcctgggtccaccccggcactgagtgacgatcaagcaaatactcaagtggaccgaaatatttgcaagttgcaagtgaaggtgaaggggcataacccgcggagctatttccgaagaagatgaagaagagacttggggatttaggcccaggctttgaagggaagaatggtttgagcaccgaggacaagaatttaattccccaggcctgggttccagccttgtgcggctatcacgtgctttgaaacctgggctagttccgaagtgagatgcgcttttacgtgtaaaatacaggattccaaagacgtcgtataaaataatttgtatattgtttgcatgttaggtaacatttttaatgtattggattaaataaaatgcattaaaattatttttacattcaaaaaaaaaaaaaaaaaaaaaaatt

SEQ ID NO: 157826 - DNA, 423 bp, Homo sapiens
ttgagtttctcaccattacttatgatgttaactatatgttttgtttgtagatgttcctaagtttaggaagttttcttattttgtcaaattctttttctgcatttattgatatgatcatgtgatttttcttctttaggctatgggtgtgatgattacattaatttgttttctaatgttgaaccaaccccaataccttagctaaatctcacttggccatggtgtataattcttttcatacgttatcggattcaatttgctgatattttgttaaggatttctgcatgtctgtccatgagagattggtctatagggtttattttccttggaatgtctggtttgttttagtattagggtaattctagcctcattgaatgagttaggaagtattccctctgcttttatattctgaaagagatttcagag

SEQ ID NO: 157827 - DNA, 1463 bp, Homo sapiens
caaaactttttttggtttttttgtttgttcattcaacaagtgtttattgagcatctactacatgccagacactattctagaaacctgggaaaggaggggttagggtagcttggagctgtcccagctgtagctctgtctcccagaagtgaggtctgcaggggaacagggtctgggggtcctcctgcctgggagagggaaggctgagtgtataaaaaggtggaagcctctagaaatgagaagggctgggtgtgtgggactcatgctggtgccttcccagacgaaggagagggcccagaggaggcagctttcctgggagcagagacggcagcaggagcgcccgtgcccgggatcaccctccttttaaccacggatatgcaggacttcttgaggggcccgatctgcaagtgggcagtccacactctccaggaagaaggcaggcttgagtctgtgggtgaagagccccgcaaagtgactgtccaggcggctctggaagggggtcaatgggggaggccgggatgccaccccggcggggccgggaggccttcagcctccgcaggagggatcagtctttgcagtcatgtacagcataggaggccaaggcgcggtcaggcgtattccagtcagaccccaaccgtgggcgagaaggggtggggcaggggagcctccagcccatgaaaccagacggagaagctgcgtccattccaactgcaggcagcaggagtgggcgttgcggcccagccggccgcggtcgtagggctcttgtggggagaagtcttcggccatgacccccatgctgacccagccctcgataatctccacctcccagtagtaggtgcctcgagtccagggcaccctcgcccagcacttgctcacaatgggtgaagcgggtgggcgacaaggggtagttgataggacacagcaccctcttgacaccttttggttccaaaacagcttgcaggaacttgtctgctgtgtcgctgtccaaaatccacataataggccaaacttgaggaaatagtccctgggagctttcactctccaagaggttcgtactctcgaggtcttggggctcagcatcagcttccgagtccagcttctgtggcccatcctcgttgccaaccggccccctcagctgcttcccactggttgacgcaggccacggccagcatgtctctcactgcacggacagcttgggatgatttggtgaagctgagctccctcgggggtccaggcccagggccacacccatcctccagggccagacattagtgccgagcgagctcctgcaggaagctgactgagtcagcttcagggacctggctgagattctggcgggctcggctcaggcggctgcgctgttcctcctgtcgccgcaggtcaccctgggagcggcctagcatggcagcttccccctcctcgatgaagcccagcacctgggtctggaagccctgcagggcggccgc

SEQ ID NO: 157828 - DNA, 680 bp, Homo sapiens; identical to SEQ ID NO: 122115

SEQ ID NO: 157829 - DNA, 2970 bp, Homo sapiens
agggagtgagcttgtctggccgcctcgcctcggagccactgcactgctggctgcagacacaggctgcaccatgaaggacaggccctgcacatggggcagccagtccagtacccgccgggccaggccctcagcatcctctcctccagatgcccaagagagctgctccatgcgctgtggcgccctggacgggccatgttcctgccacccgacgtgctctggccttggcacctgctgcttggatttccgggacttctgcctggagatattgccctactcaggatccatgatgggggcccagaccatcgagaggctcagcctgcaatgacccagcccctcccaccaccaccacgcccacaggtttaaggacagcatccagaccctcggccatgtggactcctccgggcaagtgcactgtgtgtcacctctgctctatgagagcgaagcctcagggcctcctccctgcttccctgggcccaggccctcactcacccctcacctcccctgcccagtgcaccccaacaaagtgtcaatgatggagaagagcgagttggtgaacgagacgcgttggcaatactacggcaccgccaacacctcaggcaacctcagcctgtaggtggcaaggcctggggccaggcctcgaaggaaccccagggctaaccaggcatcctctccctcaggaatgccctactcacaggagtggactgcaaagtggtcgtacctgtaccccctggccacacacatccccaactccggctctttcactttcaccccaaaacctgctcggggtggggagagtggggcgaccatggggtggtgtgggctggcccagctccagcatcatcacctccacagggacgtgcaggcgctctggaccaacgaccacgcactggcctggcacctgagcgatgacttccgagaggaccctgtggcctgggcacgaactcagtgccaggcctgggaggagctggaggatcagctgcccaacagggttggcctcagggaggggatgacagaacccgaggccactgggtgacagccacctgctgctctgcagacggactacggctgtgccggtatggggattggggtcaggggtgggctcccaacagtggcctggccctgactcactggctcctgcagcctccggtacggctcaggtcagcagtgctgctacacagcggacgggacgcagctcctgacagctgactccagcggcggcagcactcccgaccgcggccatgactggggcgcacccccgttccgcacgccaccccgagtgcccagcatgtcccactggctctacgatgtcctcagcttctattactgctgcctctgggcagccccagaccctgggaaagatcgggctgggctggggtgcacccccacgtgaccctccactctcaccctagcctccgccttcggagacccacactttgtgaccttcgacggcaccaacttcacattcaatgggcgcggagagtacgttggcatggggtagaaccaaggtgggaggctggagccaagtggctcccgttctgctcccaccaccgcaggcacggagacccgtggcactgggctgaccgcagtggccgtccaggagggcaactcagatgtggtggaagtcaggctggccaacaggaccggacctgaaaggtgagcagtccagccacgcgaggctgcgggctgccctcacctcctccccattcctgcagggagactgaggggaagccctgggccttcatgcctctcccagtcctggctagaggcctgggtggtccgacctcaggccttcacacccaccgaggtgcccccgtcgtacccacctggtcaaaagccgaggcatggcaggggtggcggagggtcatggtcagcagaattggccccgggaacgccctcccttcccctgcaggtgccctcacccacagcccctgggtgccgaccaccctgtcctggggctgcgggaggggacaagatgctcacagcgggtgaccctaatgcatcccccttgagcccaggaatgttcctgtcggtggctgccggggacagggtctccatcatgctggcatcaggggccggcctggaggtcagcgtgcagggcccgttcctgagtgtgtccgtcctgctgcctgagaagttcctcacccacacccacggcctcctcgggacactcaacaacgaccccaccgacgacttccatggcacgggcagggcttggggaccaaagggagccatgcccagccaggccccggtcatgtatcttccagggaccgtgcacaatgcgtcctccctgctcacctacgattcctggttcctggtccacaacttcctgtaccaacccaagcacgaccccaccttcgagcccctcttccccagtgagaccaccctcaaccccagcctggcacaagaggcagccaaactatgtggggacgatcatttctgcaactttgatgtggcagccactgggagcccccgggcactgccagatgtgtgtatgcatggcagctcaggcctgttgtctgcactctgtccccatcccagtggtgtcctgtggctggctggccccacctcccaacggacaaaaggagggcaacaggtacctggcgggttccaccatctacttccactgtgacaacggctacagcctgacacctgcctgcacctgtccccactcaccaccccagagagccccctcactgacactcgctccctcaccaggacgcagctacgcggtgctgttgggcatcatctttgggggcctcgcggtggtggcggcggttgcgctcgtctatgtgctgctgcgccgcaggaagggcaacacgcacgtctggggtgcacagccctgatgggagcagcttggctgtgagcaccaggccaagactcctgagaacaggcagcccagtcctgcgactcccgcatccccaggaccagacacctgggacctgggatacttgatacctgggcatttaaccc

SEQ ID NO: 157830 - DNA, 422 bp, Homo sapiens
aggccaaaacccaaaaattctttttaattggggggggagaaagctaataaaatcccccatcctctcatgataaaaaccctcacaaaactgggcatagaaaaaacatacgtcaacataataaaagtcatacccaacagacccatggcctgtatcataataaatggaacaaaagtgaaagcctttcctgtaagatttgaaagacaaagatgttcaccttccccattgctattcaacataggattgaaagtcccagctagagcaattgaaaaagagaaagaaatgaagggtatatgaattggaaagaaagaaatcaaattatgcttatctggaaatgataatgaccttatatttgaaacaacctaaaaactcccccaaaactattagaactgatacattcagtaaagttgcaggatacaaaaata

SEQ ID NO: 157831 - DNA, 660 bp, Homo sapiens
ttttttttttttcagggaggcatacacatctctttatttacaaaatgcggggaagagaaaatatctagatatttgggtgtaattattccaaacatagaaaacacacaatagaatcaagtgaagggaaagctactgtaacagcttaaatactttttaaggagaactgatagtaaatctgggaatgggaaaaaaaacacagagctagaatttgtttagcactccgtcaaagaaggcaaaagctgataaaactggagtggacggaggctccgaatgtggccctccgctgctctctctcctgcagtctcatccccggccttagccctgacctctcctccgaagcccctggtgaagggccgcgatgggaaaccacctgcaggacggcctccaggccgtgaagggccaggagcgtggcgctgagggcccagtccgcccacaacactagggcctgccaaagcaggaagtgggcagagaggagggcggtgccaaccgtgagggccaggctggcggccagcggcctctcagcctctgtcaggttgcccctggtgcccaggtataaccgaactgcttctagaatccccatcagaaacagcagagcaagatcgaggaccaggtagcggtgaggatagctgaacacctgacttttatacgcccacgcgtccg

SEQ ID NO: 157832 - DNA, 1048 bp, Homo sapiens
  misc_feature (1)...(1048): n = a,t,c or g
acgcttttttttttcttgttttttcagggaggcatacgcgatctttttatttacaaaacgcggtgaagagaaaatatctagatatttgggtgtaattattccaaacatagaaaacacacagtagaatcaagtgaagggaaagctactgtaacagcttacatactttttaaggagaactgatagtaaatctgggaatgggaaaaaaacacagagctagaatttgtttagcactccgtgcaaaaggcaaaagctgataaaactggagtggacggaggctccgaatgtggccctccgctgctctctctcctgcagtctcatccccggccttagccctgacctctccctcaaaaancccctgaaagggaagaagtgtggcctaaagatggaaaattgctagccagcagagctggtgggcttgtttgcatttcattgctttaggaacccagagtccactcttgcaccgggcctggcctgcctgtgaaggcagagctggggttgctcagagcacaaggcctaccccatcctgcgtctccagcccgacttggaaacacaggtggggcctggccacggagtaaactgggatctcagaacacaaattaggaccattggggaactagggggtgatgggggatgcagtgagatgaggcctctgttctgaagggctctgtcctccctctcggccctgggggcccatgggggtctgtggaggcctggctgctaaagccagaccccactgacagggctgagtgtgcgctcctgggactcatcttgaaggcagttctgtctggtccctaccctccccgcagctgttcccaacaccagggcctccagcagtttgttctgccctggctcctgctcccactcctgccagaacagatggaaccatccaaaaccatctatggccagtcactaggaaaagtgcccttcctgtccaggaatggggaggtgacagctgggggactggtcaggcccaggaggagggccccagcgtggggtatcccgggtgtccgtagctacctggtgaaggccgaattccgccactctgaca

SEQ ID NO: 157833 - DNA, 873 bp, Homo sapiens
gcacggcactccggcctgggcaatagagccggactccatcttaaaaaaaaagaaaaaaaaggagggacaagaggcaccagaagctcctgtccaggtctgggcctcccttgggtcactcagttctcccccattcattcattcattcattcactcactcactcactcactcactcattcccacactctgcagccactgacttcagctagccatgctggatgctaagacatagagtcccggccatcaaggccagttccatctcagtgggcatctagacatggcacagagatgaccaggggagccccttaagggacagagaggcacaccctggcctcctggattcccatctggggggcttgcatggaagggaggggggcacaggtgtgggccttgaaggctgggtaaggggctgggagggctttaggggcattccagggggcaggcacagaacttggaggctctgccgggcacacccacaggagagcaatggctggaagggtgacatggactgcagggtgtggccgcggcagcccagctcttaaggggacagcctgggaaaacagacttagggacaatgatcttgagccatgaaatgatgtccaatgccccttgtgccacctgacatcagcctgattaatgaacaaacagaaaaggaagcaggggacctggtgtgtccctctctctgcttttctgtctttctctgtgcccccttttttatgtctctcacgctgtctcttggcccttgtttttaactctgacacgccgtgggaacttggctcacttcctagggggaagctgtctgggactggcccagagatgggcaccacccatttcccaataaacacaagataaaatcagaaaaaaaaaaaaaaaaa

SEQ ID NO: 157834 - DNA, 603 bp, Homo sapiens
gagatggagtctcgctctgtcacctaggctggagtgcagtagcaggatctcagctcactgcaacccttccactgcatcctgggttcaagcaattctccctgcctccagtctccccaagtaagctggggattaccaggcacacggcctatctaaatttttttgtgtttttagtaggagacggggattttgccatgttggccaggctggtctcaaactcctcatctcaagtgatccacccagttctgcctcccaaagtgttgggattacaggcgtgagccactgcgcctgccttacttgttcactttgctgtcaaactatgtgcttcttggtggcttccaggtacttttaattctgggatggtaatcttttctgttataatttacaaataggtgatgtctacttcatctttattatctatttatttattgagaccgtcttactccatcacccaggctagaatgcaatggtgcgatcgttggctcactgccatctccacctcccaggttcaagtgattctcctgcctcagcctcccaagtagctgggattacactcagcatgcgccaccatgcctggctaatttttttgtatttttagcagagatg

SEQ ID NO: 157835 - DNA, 387 bp, Homo sapiens
  misc_feature (1)...(387): n = a,t,c or g
ttgaaatgtacatagcaaaagatcattttacagttcatttaaatgtattgctaatttttcaaggaaaagtggaactaactatagaggaattaaaggaattttacccgttaactgttggatttttaaaatcccaggactttcaggtggtgnnnnnnnnnnnnnnnnnnnaaaagggagtttctttttgccccccaccctggggggctttgacccaatttgggttaattgaaccctccccctcccgggttaaagaatttttcttgcttgggcctcccaagaagtgggaataaaaaggccaatgcttgcccccgggcccagtaaattttggatttttaacaaaactgggggttttcccttgtggcccaggttggttggaaatttataacc

SEQ ID NO: 157836 - DNA, 436 bp, Homo sapiens
  misc_feature (1)...(436): n = a,t,c or g
aactatctggtgtgatgctcagtcctgggtttcctggatactatcttttcagtacataatgcatcatggacaataaagcgacccataggtattgtgtgtacatctccagttcgtaaatttttctacagaaaccatacatgattatttggaagtacgaagaggatcctcagaaactagtactggtattggccggcttaatggacctcaaataccatgtttcttattgagcaccacccatgaaaccagcttatattttcacagcgactattcacaaaacaaacaagggtttcatattgaataccaaggtgagagaagtaataaaaaatgaaaatttatataaccccaaatcagctattagaaatatttaactgagtctaattattttctgtattctgttttagaaagnnnnnnnnnnnnnnnnggnnnnnnnnnnnnn

SEQ ID NO: 157837 - DNA, 553 bp, Homo sapiens
tcagacccacgaacagaaacagaaagtcacaaaatgctaactgattaaagaagttcatatctgagtttaactgctttgccttttctttacccaaatcagaagccataacaagaaaccgggcgtcgagggctgcttctctggttcggctcacgccatcaaagaaggacgttggcttcctccagaagcctcggttaaggagttgttcgccgagctcacgatgtcctcccggttctgccgcacgcagtacatgagctgccggtactgcctgcggatgctgcggcacttctcctcgtcagcggtgagctccaggagctttgggtctacgtcggcctccccagagctgaggtcgtcggagcagcccgcggccctcactgacacatccatcttcatcagcgctccctccgccgccgcctacttcgccgcgtactcgctaccggggatgatcacgagctgctcctctcctttctcttcgtctcccttccgggaagctttttcaaccaacatgccggccacgggtatctctgaggtaacggccctcccagcgtgtggaaag

SEQ ID NO: 157838 - DNA, 377 bp, Homo sapiens
  misc_feature (1)...(377): n = a,t,c or g
aaaaattgtcacctagcaaaccaattttagccagtacattaatgggccctatataccatagcaaagtgaaatttttcctggaatgaaaggacagttcaacatacaaaaatcaatcataatgacataccacattaacataacaaagaataaaaatgacatggtgatttccnnnnnnnnnnnnnnnnnnnnnnnnnnnnnnnnnnnnnnnnnnnnnnnnnnnnnnnnnnnnnnnnnnnnaatagaaggaaattactttccaataacaaaggaaatgaaaagtccatagctaatatcatactcgatagctaaaagctaaaagctttttctcaagatcaggtaaaaggcaaggatacctactgtccctacttttattcaac

SEQ ID NO: 157839 - DNA, 409 bp, Homo sapiens
aataaggtatttcataacaataaaaggtcaattcatcaagaaaacaaaactatcttaaatgtacatgtgcctaataacaaagatcccaaatagctgaagaattgacaaaactaacagaagacacagacagctcaataatcatagttaaagactttaacaaccctcttagcagttaacagaataagtactcaaaatatcagttaagatttagaaaatttgaaaaacactatgaaccaacttgaccaaattaacatttatagaacattatgccaagcaacaccaagatagagcatatgatgggtcataaaataagcttcattaagtttcaaaggatcaaaatcatacagaatacattctctgagaatggtgtgactaaatctaatagatatcttgaaaatcctaaattatc

SEQ ID NO: 157840 - DNA, 414 bp, Homo sapiens
  misc_feature (1)...(414): n = a,t,c or g
gaaaggggcaggacctttatggagaagtttagaaggtcttactgaaggttataaagcaagttctgaacaaatggaaagatatgtcgtgttctaacaattaacatactaatttcatttccaattagaattgcattaaagtttttttttaattggatgaaatctcagctttgtttagtagaataaatgctgaagaatagccaaagaagtattnnnnnnnnnncagtgatgcttgggagggcatttgcctcaccacatatcagaagatcctataacactacttttagccaatcaatatggtgttgctataggaccaaacaaatagattagtggaccagaacacagaatccagaaaaagatctcaggatataaggcgatttaatatatgacctcaggtgctgttccagttctcgtgcc

SEQ ID NO: 157841 - DNA, 440 bp, Homo sapiens
  misc_feature (1)...(440): n = a,t,c or g
aactgatcaaggagggccaaatccagaaactgtcagccaagaacggcaccccccaggaccgccacctcttcctgttcaacagcatgatcctttactgtgtgcccaagctgcggctcatgggccagaagttcagcgtccgggagaagatggacatctcaggcctccaggtgcaggatatcgtcaagccaaacacagcacatacattcatcataacgggaagaaaaaggtccctgggagctgcagacgcgatcatccagggccaccatcgagaagcacaaacagaacagcgaaacctttcaaggcttttggtgggcgccttttagccagggattgagggaccccagcctcttttccagacattgcctattcacggaggcaccagccnttttgggagcntgttggttgaccaccgaaggcagtttcgggttncagcagggttt

SEQ ID NO: 157842 - DNA, 391 bp, Homo sapiens
gggaagaagacattgtcaacccggccaatgatctgatcaaggagggccaaatccagaaacggtcagccaagaacggaaccccccaggaccgccacctcttcctgttcaacagcatgatcctttactgtgggcccaagctgcggctcatgggccaaaaattcagcgtccgggagaacatggacatctcacgcctccaggggcaggatatcgtcaagccaaacacagtccatacattcatcataacgggaacaaaaaggtccctggagctgcaaacgcggacagaggaagagaagaaagactcggattcagatcatcccggccaccatcgggaagcacaatcagaactggggaaacctttaaggcttttgggggcccccttaaccagggatgg

SEQ ID NO: 157843 - DNA, 1868 bp, Homo sapiens
caagatacattgatgtcctaggccggcgatacactgcgcctggactgggataactatggaggcacccagcgcaatctgctgtgcccacagcccactgtggggaccctgtcagcctggctgcagcaggggacggctctccagacataggccccacgggagagctgagtggtagcttaaagatccccaaccgggacagcgggatcgacagtccatcctccagtgtggctggagagaactttccctgcgaggagggcttggaggctggcccaagccccactgtactgggggcgcacgcagagatggccctggacagccaggtcccgaaggtcaccccccaggaggaggcggacagcgacgtgggtgaggaacctgactctgagaacaccccccagaaggctgacaaggatgccggcctggcccagcactctggcccccagaagcttctccacattgcccaggggttccttgccccccgaggagacctattgtgaagcggctgcacctggctggaccagggttttctgcaccaggggctgacggatgcgggggatccctccagaaaggtcatcatggggccataattctctaaacatcttcctcccattccaaccggcttcccacgggcagttcctgctgccggagctgaagacgcggatcacggaggagtgggacacaaacccacggctcggggacatcctgcagaagctggccccattcctgaagatgtacggcgagtatgtcaagaactttgaccgagccgtagggctggtgagcacgtggacccagcgctccccactgtttaaagacgtcgtccacagcatccagaagcaggaggtatgcgggaacctgacgctgcagcaccacatgctggagcccgtgcagagggtcccccggtacgagctgctgctcaaggactatctgaagaggctcccgcaggacgccccagaccggaaggatgcggagaggtccttggagctcatctccacagccgccaaccactccaatgctgccattcggaaagtggagaaaatgcacaagctcttggaggtgtacgagcagctgggtggggaagaagacattgtcaacccggcccatgaactgatcaaggagggccaaatccagaaactgtcagccaagaacggcaccccccaggaccgccacctcttcctgttcaacagcatgatcctttactgtgtgcccaagctgcggctcatgggccagaagttcagcgtccgggagaagatggacatctcaggcctccaggtgcaggatatcgtcaagccaaacacagcacatacattcatcataacgggaagaaaaaggtccctggagctgcagacgcggacagaggaagagaagaaagaatggattcagatcatccaggccaccatcgagaagcacaaacagaacagcgaaaccttcaaggcttttggtggcgccttcagccaggatgaggaccccagcctctctccagacatgcctatcacgagcaccagccctgtggagcctgtggtgaccaccgaaggcagttcgggtgcagcagggctcgagcccagaaaactatcctctaagaccagacgtgacaaggagaagcagagctgtaagagctgtggtgagaccttcaactccatcaccaagaggaggcatcactgcaagctgtgtggggcggtgagtcccgggagagggggacagggacaggaggccaccctgtcctctgctctgacagagcagctgagtcctcaccagcagcacaccagccatgcacaccagccctgcacggaagggcttcctgatcctggctcatggatatagatacccttgagtgcaaaactgtcctgtccgaagtagaatcaaatcacttttctctg

SEQ ID NO: 157844 - DNA, 404 bp, Homo sapiens
  misc_feature (1)...(404): n = a,t,c or g
gatccctaatccaggagccccagtgcctcatgtgcaacagctttgaagtgtgaaggatcctaaaaaattttaggttgggtagggatgattaacagattattttcatcttccctctttacagattattttccatccttccctctttaaacttttgtatatttttcacattttctagaaggaagttttagaaacagaagtgggaaaaaaaacaacttaaaaaaagccccgggccaggcgcagcggctcacacctgtaatcccagcactttgggaggctgaggtgggcggatcacgaggtcaggaaatcgagactatcctgggccaacacagtgaaaccccgtctcttacttaaaatggcaaaaatttaggccggggcatggtgggcgggcgctngttagttcccag

SEQ ID NO: 157845 - DNA, 352 bp, Homo sapiens
ttcacatgctggttgcttaatccgtttctggaggaagagtatgacacccacacacagccttcccttgacgcctacatttctaggcacatgtgaggcatctttcctggagccccgagccagccctgtccctccccagtgcagcatggcactcaggagatacaggctggacatggggcagtcgttctggggaggcctgcctagcagccacccacctgatccctcccggccaggcttcgtgctggggtgggccatgtgccaggacaggagggtcccggcggaaagccagccccggactcatcgtgacattgagatcccactggagggtaggggtggtaataaacttctccaaacg

SEQ ID NO: 157846 - DNA, 1430 bp, Homo sapiens
ctgtctaaaatgacaacgcatcgtttggagaagtttattaccacccctaccctccagtgggatctcaatgtcacgatgagtccggggctggctttccgccgggaccctcctgtcctggcacatggcccaccccagcactgaagcctggccgggagggctcaggtgggtggctgctaggtcaggcctccccagtaacgactgccccttgtccagcctgtatcttctgagtgccatgctgcactggggagggacagggctggctcggggctccagggaaagatgcctcacatgtgcctagaaaatgtaaggcgtcaagggaaggctgtgtgtgggggcacctgaaggggctgggcttcccagggcatctgaagtttctttacggagccctaataggcacatccccaaaatggtttgtatgaggatgagcacaaaaatagcagatggggtcaccctcaccctccactgacaatggaattgggatcggacttcatgatgcaacattccttctcggccgtaggttccacatccatgggttaggtgtgctggcctggagcccgccggccccggtccccaccgcacaaggaccccatcacaagtgggtgtcatactcttcctccagaaacggattaagcaaccagcatgtgaaccttacgctctgtttaccccgctgagtccccacagctcttccagcttcagccaggccagggtcaccttcagattgaatgtgcagggcccctgaggactcatgtcctgagatggcccttcttcctgggatgggacccccgggttcaggtgagaggtgttcccgggccccttcacctggggctcaggtgacaggaggtgttccgggccccttcacctggggctcaggtgagagcaggtgtttccgggccccttcacctggggcctcaggtgaagaagcaaagtgttcccggagccccttcaccgggggctcaggtgagagcaggtgttccggagccccttcacctggggctcaggtgagagcaggtgttccgcgccccatcacctggggttcaggtgagagcaggtgttcccggcccccttctcctggggctcaggtgagaacaggtgttaccgggccccttcacctggggctcaggtgagagcaggtgttctgggcccctgcatctaaggcctgggagttgaccctgtcttcctggccccagaaagaaaagggccaccacagagatcacaggagaagggacacaagcggggagggtcgcaggctgccccaaagcccagctccaggctcaggaaagcccctccccactcaccccttccggagggcctgggtctgcggaggaacggggcttagggggtctccgagggttagagtgctccaggctcgggtggggaggaggaagatgtgttcgggtgctgagggcctcctgcgttgggcccagagggcc

SEQ ID NO: 157847 - DNA, 389 bp, Homo sapiens
catctgaccttttgccaccaccactatgatgatcgggtgcgggggctgtacaaagggcaaaaggaatgccccggcatcccgcgggtctacaggattaggcacatcggggaggggagacacctctacgtgctgcagttcaaggaccaccctggaatccaccaacccttggaaccacaggtcaagtatgtggggaacatgcacagcaacaaagcgtttggccgctagctgatgctgcagctgtcagagtttctgtgcgaggagatccggaacaagaaccagcgcatcgttcagctcatccaggacacgcgcattcacattctgccatccatgaaccccgactgctaccaagggggttgttgccaagggcccaaacaagccctggttatgta

SEQ ID NO: 157848 - DNA, 392 bp, Homo sapiens
  misc_feature (1)...(392): n = a,t,c or g
cacgagcaggttatcccttttttttaataaaaacacaacagggcaagcccccccccgtcataaaaaaaannnnnnnnnnnagtcacaacaaaagggcggtgatacaaaaacaccccacacggatgtcccacagggttagcagcccccatataaacagagggggggggcnnnnnnnnnnnnnnctttttctttcattttttcctattctattgtcttannnnnnnnnngccacccctcacccaggtcccacctctccaaggctccacccctcacccaggtcccacctctccgaggttccacccctcacccaggtcccacctctccaaggccccgtgcctcacccagatcccacctctccatggctctacctgtctcccagctcctacctctac

SEQ ID NO: 157849 - DNA, 704 bp, Homo sapiens
cacggactccaagtgtccctttctagttcaccaagcccatgctgccatgtgaaaggaaaggcacttcctcaccgctaatgggtcttgcattaaattccatcaagacatcaacaggctattatcctcagtgttcctcccatgagaattagtggtcagacattgcagagggcatcagaagcgggtagatgaaatagccaaaggaaacaggctagcagaccaaagagctaagtcagcagtaagaaggccccaaggtcccaaaacacttgaggcccctctgatttgggagggctacataagggaaataaagcctcagtattcccctacagagatagaatgggccacctctcgaggtatacttttcaaccctcaggatggttacaatcagaagattgcaaagtacgcttgccagcctccagccaatggaagattcttaaaatcctccactgagcctttcacttaggaaagcataagacatcagtgcatccaaagattgttctcaggagaaaatctactaaaaatggtcaaataggttgttaatactcgtgaaaccctcttaaaaataatccctttaacagatgacttcttccccaccacaatcaaaggatgggaagttactcaggggaggactggcagatagacttcacccatatgcccaaaataaatggcattcaatgtcttttggagtgggtgcataccttcattaa

SEQ ID NO: 157850 - DNA, 705 bp, Homo sapiens
ttttagtagagatgaggtttcaccatcttggccaggctggtctcaaactcctgacctcgtgatacacccgcctcggcctcccaaagtgctgagattacaggtgtgggccaccgcacctggctgagtccaagttttatttccctataatttaaaaattatatcattccatgctttgtctgtaggctgattctaaaagttgaaaaccaatgtcattatttttattatttttatttttattttttttgacacagaatttcgctcttgtggcccaggctggagtgcaatggcatggttttggctcactgcaacctctgcctcctgggttcaagcgattctcctgcctcagcctcctgagtagctgggattacaggtgcctgccaccacgcctagcctaatttttgtatttttagtacagatgggctttcaccatgttggtcaggctggtctcgaactcctgagctcaggtgatccacacgccttggcctcccaaagtgttgggactataggcataagccactgttcctggcccaatgtcattatttacattattacgacaatgtaaatatttttctctataccacctagtcctttgctaataaggcattcttttttttcttttttttttttttgagacagagtctcgctctgtcgcctaggctggagtgcagtggcacaatcttggctcactgcaacctccacgtctca

SEQ ID NO: 157851 - DNA, 775 bp, Homo sapiens; identical to SEQ ID NO: 108398

SEQ ID NO: 157852 - DNA, 576 bp, Homo sapiens
atgggagaaagaaggaagctagaagactcagcaagcaaggctatcccaccttcttctgcctgctttgttctagctatgctggcagccaattcgatggtggtcacccacattgagggcaaatggacaccaaaagtgaacggggtagctattcttatatcagacaaaacaaacttcaaagcaacagcagttgaaagagacaaagagggacattatataatgctaaaaggccttgtccaacaggaaaatatcacaatcctgaacatatatgcacctaacactggaactctcacatttataaaacgattgctaatagacctaagaaatgagatagacagcaacacaataatagtgggagacttcagtactccactgacagcactagacaggccaccaagacagaaagtcaacaaagaaacaatggatttaaactataccttggaacaaatggacttaatagatatatacagaacatttcatccaacaaccgcagaatacacattctattcaacagcgcatggaactttctccaagatagaccataggataggccacaaaatcagtctcaatacatttaag

SEQ ID NO: 157853 - DNA, 482 bp, Homo sapiens
ccggatttcatcgccgtccagatcaacggtggatttggtgttgacttctctcaagccacggaggacgtgggttcgggggttgccctcgtggcccgaaggatcctgtcgcacggtgtcacctccttctgccccaccctggtcacttcccccgccggaggtttatcacaaggtgaggttgttcctcagatccctgtgaagagtggtggtccccatggggcaggggtcctcgggctgcacctggagggccccttcatcagccgggagaagcggggcgcgcaccccgaggcccacctccgctccttcgaggccgatgccttccaggacttgctggccacccagggtcagggtgagagagagctgggccagggagctgctgcaggatgattttgaggtgtgggggaagcactcttggttggttttggtttgctttttaaaaattgtggtaaaatacataacaaaagtaactttcaacaaaaaaaaac

SEQ ID NO: 157854 - DNA, 1768 bp, Homo sapiens
  misc_feature (1)...(1768): n = a,t,c or g
tttttttttgttacttttgttatgtattttaccacaatttttaaaaagcaaaccaaaaccaacctcaagagtgcttcccccacacctcaaaatcatcctgcagcagctccctggcccagctctctctcaccctgaccctgggcccctctcccacaacccagggctagccctgtgggaccaaccatctctgccagcccctccccgaccctccagccagggaggtggggcgctgtgcggtgaatgggggcaggccaggcccaaaggctggcccagggctcaccagttntgggattggggcgtcccgtctgaggtgggggatgaccaacatgccagctctgggttttagcttgaggatggggcacattcaagcactgacagccagcaagcttgggcacagggcgatgctcaacctctaacacatcggctgagaacctcacctgcctctccctgcctgggagccctggcaagacagctcctctcccaggcccagcacaggcaggcgctggacagccacttcctaaggggtgcgcggccgtcaaggcagaggtgggtatccctgcacctcacacctctcaggaggtcaggatccacatccgtcgcctgctttcctgggctgcccctggggcttgtgggctgagatcaaccccttgtgccctgccccaggccctccctcaggcgaggccctgcccaggcaggtggttcttcccctggctgttccccttccaaacaggtggggccccagaccatcctatctctttggaccctggagacatttcctttaactgggctttgcagcaagagggaaagagaacaagtgcaagagcccaggcgcgtacctcctgtgccccaggacagcacctgtaagcaagggggaagggagccacccaccccagaactcaaatggagagaaagtcaagacaatcacccctgacgtggggctgcaccaatccctgacgtctgaccccactgtggctgtcctcagagccaagagggctccagaagcccacccgcctcgaagctgttccagggggagtcacggcccgtgtttgccacatgggtgtgttccagggccaaggggacacagaagatggcaggatgacactaatggggtgagcaaggcacactggtgcctngccatactgccctccagcaccaggcagggtcaccacagccggcaagcactgggcctggggatgtgtgaagagatagggttattgagaagagaaaacagaacgctggtcatccgtggcactcagggctaggcagtccagggagcagaaaacaggggtcccgggcccagtctccctcctggaggtcagagcggagcccctggcaactgtgccctggcccaagaaccaggctgtgggttcaacgctgcacaccccaaactcaggagcagaaagcaaacccctgactgtccacactccctgtgactggtccccttcctgccggctcttcacccccagcccatggtggcttcaccccatgggcaccagccacttgactgcctgcccctccctcccattagtgacactttcctggggtctgcaggtctccggttccacttcatgcagacaggccctgtcccccactggggcccaaggcccaggctaaactacagcccagccatcccaccccaggccgtgaatgccttctccaggagggcaaccaaggatggtgccacatgtgagcacaagcaaaacccggagccaaggcgagtcctgctgggtgcacgtttatcccagccaccgcctccagggcggcgctc

SEQ ID NO: 157855 - DNA, 778 bp, Homo sapiens
cctagtccagcgtggtggaattccagtgcttttgacaacacctaaaacttttaaacataaaaaatcatactggtgagaaatcctagaaatgtaaagaatgtgacaaggcctttaaatggttgtcacacttcattataggtaagatagttcatactgaagaaaacttctacaagtgtgaacagtgtggcaaaacttttaatgaatgctcacaccttattgcacaggagagcatttatacttgaaaaaaaatgtacaaatataaagaccatgaaaaagccattaatatctattcacatcttaccactggagagttcatacttaataaaaggaatataagtgcaattactgtcaaaagatctttcagaaaatataaacctttaaagcgaagaaggtatttattttgaagatgaacactacaaatgtgaagagggttgtagtacctttatttgtatcacagattttattgtacacattttgtactagaagaaaactctgaagtagttgctcaaactttgttcaacatcagggaatttatattgaagaaaaactttgcaaatttaataaattttaaaaaacactttttcaaaaagtacagcttagaagacaccagagttcatactaaaatatatttttgcagatgcagtaaaaatgaaaatatttaatccaaaattaagtctatgtaaatatcagagaatttactgtagaaatatataaggcactgagacttcagatattatactaaatcagagtgctgagtatagaaaataaaactgaagtt

SEQ ID NO: 157856 - DNA, 317 bp, Homo sapiens
gtccaaaaaaatcaacagaaaaacttctggaagtaataagcaataacagcaagtttacaagacagaaggctaatgtacaaaagtcaatcactttcttacaatataacagcaatgaacaagtaaaatttaaaatgtaaaacacattaccataaaaatgaaatacttaggtataagtgtaacaaaacatatgcaagatccgtatgaggaaaagtacaaaactctaatgaaagataacaaagaagaacaaaacaaatgaagagatattccatgtttatgattaagaagactcgccgggcgcagtggcgaattccacgcac

SEQ ID NO: 157857 - DNA, 456 bp, Homo sapiens
ccccccaacaattgacatgggccccgttttgggaagaagtgtctgtcaaaggcttctttcatgtggaacacacttctcagcctgtttggctacggtgtcctccctctgtgtctgtctcctgtgactggctgattgggcccaccgtgcccccgcctccccacagcggaacggggccgactacgctgtttacatcaacacagcccaggagtttgatggctctgactcaggtgcccgaccagacgaggctgtctcctggggcaagatccgggtggatgcacagcccgtcaaggtaagcgctggctgggtggggcatagggtctctgggacgatgagtgtgggtcccatggcttacccaggttcccccctacccaggtatatgctgccgcctccctggtcttccccctgcttgaggctgaaacctttgcccagaagatggatgccttcacgcatgagaag

SEQ ID NO: 157858 - DNA, 710 bp, Homo sapiens
  misc_feature (1)...(710): n = a,t,c or g
ctcagtgggaaggaggtccgggagaacgggatccatagggatcggaaacctgttgggtgcccaattgagaattactgcaagtttgaggactggctgatgcccattctggaccagatggtgatggagcagaacaagaggggggggtttgggttaaaaaaagtggacgccttctaagatgatcgcccggctgggcaaggagatcaacaacccagagtccgtgtattactgggcccagaagaaccacatccctgtgtttagtcccgcacttacagacggctcgctgggcgacatgatcttcttccattcctacaagaacccgggcctggtcctggacatcgttgaggcggaacggggcccgactacgctgtttacatcaacacagcccaggagtttgatggctctgactcaaggtgcccgaccagacgaggcttgtcnccctggggcaagatccgggtggatgcacagcccgtcaaggtctatgctaacgcctccctggtttttccccctgcttgtggctgaaacctttgcccaagaagatggatgccttcatgcatgagaagaacgaggactgagcggctgcgggtcccaggaaggtctttaccccctcttcttatttattaatttgcagacccagcccctcccctactttttggtcagctacggtcttctagaataagatggtatctgaagtccaaaaaaaaaaaaaaaaa

SEQ ID NO: 157859 - DNA, 390 bp, Homo sapiens; identical to SEQ ID NO: 94186
  misc_feature (1)...(390): n = a,t,c or g

SEQ ID NO: 157860 - DNA, 503 bp, Homo sapiens
  misc_feature (1)...(503): n = a,t,c or g
agagctgggaaattgagcctctgggactgagcnccctagtanccggcncgacccacgcgtccgcggacgcgtggnnnnnnnnnnnnnnnnnnnnnnnnnnnnnnnnnnnnnnnnnnnnnnnnnnnnnnnnnnnnnnnnnnnnnnnnnnnnnnnnnnnnnnnnnnnnnnnnnnnnnnnnnnnnnnnnnnnnnnnnnnnnnnnnnnnnnnnnnnnnnnnnnnnnnnnnnnnnnnnnnnnnnnnnnnnnnnngatgatgagaaaaagtccaagattgaagaagatgtgggtgggttcagatgaagaggaggacaatggtaaggataagaaaaagaaaaccaacaagatcaaggagaaatcattgattgggaagaactaaacaagatcaagaacatttggatcagaaactctgatgacattcacccaggaggagtatagagaattctacaagagcttcaccagtgactaggaagaccatttggcagtcaagcacttctctgtagaag

SEQ ID NO: 157861 - DNA, 540 bp, Homo sapiens
aaaagcggcgcggctcgttcaagatggcggagctttaccagttgcctgacgagagctcttcagcaaaagcccttgtcagtttaaaagaaggaagcttatctaacacgtggaatgaaaagtacagttctttacagaaaacacctgtttggaaaggcaggaatacaagctctgctgtggaaatgcctttcagaaattcaaaacgaagtcgacttttttctgatgaagatgataggcaaataaatacaaggtcacctaaaagaaaccagagggttgcaatggttccacagaaatttacagcaacaatgtcaacaccagataagaaagcttcacagaagattggttttcgattacgtaatctgctcaagctttcttaaagacattaatgggggattttacgaagtggttctattcaaatatagaataaaccactttttgaaggtgataatgacttttgtgtatgtctaaaggaatcttttcctaatttgaaaacaagaaagttaacaagagtagaatggggaaaaattcggcggcttatgggaa

SEQ ID NO: 157862 - DNA, 403 bp, Homo sapiens
ttttttttttgagatggactcttgcactgtcacccggggtggaatacaatggtgcaatctcggctcaccgcaacctccactcccaggttcaagcgattctcctgcctgagcctctcaagtagctgggattacaggcgcccaccaccatgcccagctaattttttgtatttttagtagagacggggtttcactatgctggccaggctggtcttgaacccctgacctcgtgatccgcccgcctcggcctcccaaagtgctgggattacaggtgtgggtcaccgtgcctggccaatgccgatttttgaaaacagatttgatctttagggtaaatgcctgagtcagctgacaaactccatatacatgaatatgtccaagtgaaattacctaaagaataatttttttt

SEQ ID NO: 157863 - DNA, 475 bp, Homo sapiens
  misc_feature (1)...(475): n = a,t,c or g
naatagatnacccctgcggnaccgcgcatgatttcgtgtagacccacgcgtccgcccacgcgtccgtgatcccactctgctccattcagacactttctgcttgtccacccagttaaggctaaatactttctctcagcagttatgaccactcatcatctggcctcagcctcccacttcccaccctttgcagcctaatctgctactttcccagctgcgccccagccaatgtggactagtgacttgcctcaacccccctccacttgtctgcccctgggcacttcccctctgcccagcaggcctctccttccagtctccagctgctcgtttttccagacccaactcaaatgccacctcttccaagcactgttccctggcctgccatttctctgaccccacagctcagctttgtcgctgcctctcttgtgactgcctcatgggttcgctctatcaccatcctctgtgccttttcccacca

SEQ ID NO: 157864 - DNA, 453 bp, Homo sapiens
taacagtagatgacttttttatcagacttttagtaatgtaaattaaaaaacaaacataagatgaataagtaaacagaggatttcaacaacacaatagaacaattagacctaacagtcacatttatatctctccactcaacagtagaatatgcaatacttttaatcacacatgccacaatattccagatagaccacctgttaagttaaaaaacacatcttagcaaatttcagcagatggaattacacaaattattcctaactatgatacaataaaacaagaagttaaaaacactaacatgtcaaagaataagtaaaaattaaacaacaaattctcaaacacactcttgttcaagaggttatagacttaatattgttaaaatgtcactactaccaaaagtggtctacggattcaatgttctttcttttcttttctttctttttcttttgagacgg

SEQ ID NO: 157865 - DNA, 440 bp, Homo sapiens
  misc_feature (1)...(440): n = a,t,c or g
tccccctttccccctaaaaatttttatttttcccttagacctttaatttttttaaggggggttggcccaaaattgccccccccaaaaaaaagggttttttccaaaaatcccccagaagtttttaaatcgccccccctaaagaaaaaaaatttttctttcccccccccggtaaatttgggcccccccaaggatcttttaaaagggccccccccnnnnnnnnnnnnnnnnnnnnnnnnnngnnnnnnnnnnnnnnnnnnnnnnnnnnnnnnnnnnnnnnnnnnnnnnnnnnnnnnnnnnnnnnnnnnnnnnnnnnnnnnnnnnnnnnnnnnnnnnnnnnnnnnnnnnnnnnnnnnnnnnnnnnnnnnnnnnnnnnnnnnnnnnnnnnnnnnnnnnnagatcgcgagcgaccgcccacgatctagaactagcccacgcgtccg

SEQ ID NO: 157866 - DNA, 487 bp, Homo sapiens
attttgagacgaagtttcgcttgtcgcccaggctggagtgcaatggcacaatctcggctcactgcaacctctacttcctgggttcaagcgatcctcctacctcagcctcctgagtagctgggattacaggtgcccaccaccatgcctggctaattttttgtattttcagcagagatggcggtttcaccatgttgggccaggctggttttgaactcctgaccccagttgatctgcccgcctcagcctcccaaagtgttgtgattacaggcgtgagccactgtgcccggccgggccccttccttttaaatgtcagcctctggagtgaccatctgtgttggctgggagctcttcggaatgtcccatccagttgctgaggctaatgatcacctctcaggtgcgctggtcccattctctgcgctgtttatgtcactttatgcctggactcctcccaacaatgttctgtcctccacttagagggtgctcagag

SEQ ID NO: 157867 - DNA, 445 bp, Homo sapiens
attgattgttggcacaagtgccaagataattctatgggaaaggacaatcttttcaactaatcatactgggactattggatatccatatagaagaaaagaacctcaaaccttatttcacctatacacaagattgaatccaatggatcataaacctaaatgtaaacagtaaagctttgtttagaagaaaacaaagaaaaactcttcatgactgtgggttaggcaacagttttgtagaggagacacagaaagcactaaccaactggatattatcaaacttcaaatttttgctcctcaaaatacaccactaagaaactaaaaaggtaagccacagactggggaaaaatacctacactatttgcaaaaaataataatgacaaaatatgtgaacatacacataataaaagaagatacatgtttggccaaatgcatgtgaaatggtgggcaa

SEQ ID NO: 157868 - DNA, 875 bp, Homo sapiens
ttttgccggttatggggcgggaactttttatttgaagcaagtttaatcatagcattgccccccagtaccctggtatcctgctacaaggagcatcacaccatgctggcacatggtgtgccctctccactagcctggcatctcagcagacagcagagggcagcagaagctcagctagtggggcccctcccaccagcccccacccggtccactgaaaggcagtgctcctggggggcctctgtggactggtggggccaggggctgcaaaacacgccctcaggccaagcttccactctggggcaccctcggcaggtaacttagggtgctttgcagcttgggccagctctctaaattccaaccaagggagcccgcccagctcaaagggccacatccccaaagacaggggtgaacccagggggacagttccaagcctgaggaaagcgacagctacaggaaggaaggcagaaaggctttcagatgaggggaggtcttctgtccatgggtgagctgggattcccggccatgaaggaaacgccaaggagaacagagacagacacccctggcagctccccgggattgcttctgctgctgttgttattgcttcgggcagaggggctttgcccccaggaggccaagcaggccctcagaagctggcaccaccattctcatccttatcagttccggggggggcccgctgggggtgagcagagggggccccctccaagcagagaggcaaggtaacaggagagcctggtaggcagtgctgaatctgcttgtatggcgcggtgccccgacatgtttatagatggacaccgggtgcagcggacgcgtggttcggccgggtttttcatgggctcaatgatggtcccattggccac

SEQ ID NO: 157869 - DNA, 402 bp, Homo sapiens
aatctttttttttttttttttttcaaagccaaagggtttattataggtacatacagtgtgcgcccgccacaccgccccacacccccgggccccagcggcttctccaggcggccatggggactgcccacaacccaatcccccgactccccagggaggtgctccagccagaagcatgcaggggtgggcttcccctcgcccctcccctcatgaagtggcatttacaactggaggggggaggagagaggaaaacagttttgagctttgacgcccctcccattaaaagccttcgcggatgcggggcgggggaggaggagatcgacgttttgcaaaaaaaaaaaaagtcaggaattaaccgcatggctctgaggcggcggagtgcagggggctagggccccttcactc

SEQ ID NO: 157870 - DNA, 375 bp, Homo sapiens
caccaccacctggccccgttctcatcacttccattcaacattgtactggagaggttctagccaggccaattaacaaagaagcgaaataaaaggccccctgattagaaagaaaagaagtaaaactacctctatttgcagaagaaatacaagaaatgatctggtatatagacaattcaaaggaatccactaaagaaattattagagctaataaacaagttcatcaaggcaacaagatacaggttccatatacaataattagtttttctttacacttgcaacaatctgaaataaaaattaataaaatacctaagtataaatttaacaaaagtgtaaaacttgtgcactgaaaaccggacgcgtgggcggacgcgtggg

SEQ ID NO: 157871 - DNA, 423 bp, Homo sapiens
ctaataacgctcttctaaataacccctgggtcaaaggagcaatcccaaaggaggtcagaccgtatcttgacaaagagaaaataaagtcacagcatagcaaaatttgtgggatgccctaaaaaagtagttagtggaaaattgatagcgctaaaagaatgatgtcaaatcaacaacctgagcttcccccttaagataccagaaaaataagagcaaataaaatcccctgtaaacattaaaaaaaatgtaatttttaaaaagttaaaaataaaaaaaggtttaaaagtttaaaaaaaatagagaaaaatcagtgaaaccaaaagttggttccttgagaaagtcattaaaatttactaatctcaaggccggcatgccaggaaaaaaaatgagaaaagtggtatcactagagattctcggacgcgtggg

SEQ ID NO: 157872 - DNA, 790 bp, Homo sapiens
tacatctacatctatagctatatcaacatccaatttgttctttttctctgagaacacctactgataaataagtttctaagttttgtctatcagttgatgctaaaacattaaaaaaagagaacaactaatactctttttacactaattagaacaatgtaagcctttttgttttattaccaaataatttgtatttcctatgtaattgctgcagttttattttgcatatagattttttttccgtaacatctttgtctgttagtggttttatttatgtatttttttaatatccttagattcatcccacttctgaggtcagacatcacatcttttcactacatgcctctctttgggaggtttctttcttgctaatccaaacaagaacatctgcacaattgtcaacctggaatttactttattaatctcctggtttggaaacactttttcttggatgttatatttactttagtttactattttgttggcttgcactaattttatatgatttcttaataatgagtgtatgttagacattttacttgagtcttttcatatcacgggatgccttttattttaccctcatatataattaattttcatctgggcatatatttccagattagaaatcatttcttttcatacattttaaggaatttatacatttgcatctgaaattgtattcattatcttctagaaaccaagagtggacttggtatccgtctgattatattttctttgttggtaaagagcctcttttttccctttttatgttcatcttctctttctctagagc

SEQ ID NO: 157873 - DNA, 728 bp, Homo sapiens
ctacgatgcttttattcacacttcaaaacaggtgctggacatcttcccattgccccatgccagcccctgctctgtgccccgggaagctgactgtaggtacaggatccatggggcctcgttgctccctggcctccacctagttcagccaatgcgtagccggtagacaagccaagcggtcaggaggggtgaggtcagtgtacagcagcagctcctccctgccgggtcgctgtgtccctctccaaggtcagggctcctggagacggcctctcctgtggctccagctgccctccaggtctcaggggagaggggtcccctgccctgctgcaggggagaggagagagggcagggaggacttaaaaccacgagaataaataggttcgtgtatcaagaacaagctagggatttcaccagctaaataggactgaaaaaattctcaagacaagagcaaaaagaatcccattggtgacctggacgtcgctggccgtggggactgtcccgcagagcacacgcccccgcgtgccactcggctaccattactgttattaataattattattactttaatgattccacttccccttttataaataaattaggcataaccatgtctcggcaaaacttaaagaaacaaagagaccatcgtcgttcctttaacttgcaagccggataaagtaacagaaatatacacggatgtccttacagggcagcgaggagaatgaatagttaaa

SEQ ID NO: 157874 - DNA, 780 bp, Homo sapiens
tttttttttaagattctgaacttttattttctggcatgaaaagtacaaataattaaacaattccatgtaaaagtctgttaccgcggccaggcctgtgatcccggtaataaatagtctaaacgcaacgcgaagtgttcttgttgggttttttttttttttttgtcttttgttttggcttttttttttttttttttttttacagttttttatcacctccaacatggactcttgtcgggatttgaaaccttccgaataaataacaggatgaagggaggggtggaggggctgagccccctcccccctggcctggcccctgccccccagggacgtggaagccccaagtccccctcgcctgggagccccggcctggccccctgcggggaggggctggcctcccagggagggggcctggctgggctgagttttgtgttttagaaaaagaagtcccctcccagtcttgggggtggcaggggcctaggcctcggtggggggggggtgtgtggggaggtgccccctctctggagcctggccccccccaggggtgggggacaaacccagcccttattgctcggaacgccctgctgcaagcttcccacgcggacgtgcgtgttcccgaatgcagagggcggaggggagagagccccaagagacagcaggggagaggggtccctgccctgctgcaggggagaggagagagggcagggaggacttaaaaccacgagaataaataggttcgtgtatcaagaacaagctagggatttcaccagctaaataggactg

SEQ ID NO: 157875 - DNA, 2721 bp, Homo sapiens
  misc_feature (1)...(2721): n = a,t,c or g
agatttggaagtgattcaaaggctaaactttttccttggccctccttgtgttctaattgcttgcaagtgtaatactaggatgtccaagatgccagtttttgcttctttgttagttgtcagctgcttttatcaaatttcaggccattatccaacaaaccactataaaaatgtttgaacaattggatttcaaacattttcgttttgtggagtggtgctcaccaagtggtacagccctaagcaagtgaacacaaacacatttaagtgtattttgtctgattagatgttagccagttatgctatttcattcaaatgtctgaaaaaatcaattgactattcccttttcctaaagggcagagacagataatctcacttccagagaaatgacttggagaaaaaaaagtgttggtctttttgctctttcgtaattaaatccggatgtacctcaaaagacttaagactgtggtgataagatgctttcctcagcagaaaggagggaaaaaaaacaactggaactcaaagcttgaaattctgtggcaaaacatgagatgtccaggattggaggttgaaaagatttcactacagtgttctgcaatagttggagcagataactttcagtgtagccacagccatggactccagatttccagattttcaagacctggacctggaacccgaaagagcttgtcacgatgcggcaggaacactggaggtagatttttttttatttttgaattttgggactgttgaccttgctgggagaaaagagacaacgactgagcaagcactaccaccagcactgttactgggaattagaagacctgagtttctgtccagaccctcagtgcaaactgaggatgctccatccaaagtgaattatgtcctgtgcctcctgattgctgagtgttcacctggaccttctgactaccttccctgtgctattccatcagcctacagacctggtacctggatttttgcccgagatgattcctaccaccttactactgacgaagacacccattccagtggaccactgtgacccaggaggcattcagccatcatgatgtggcctttacctccactcctgtcttgttctacccagattcagcacagccctttatagtgaagtcagagtcctcaagccaaatagctaaagctgctttatcacagcaaaggcctagtttgatctatgagcgtgcattacatttcttcagttagagccttcagagacacacaatagatttggaccaggggattttttagatattaatgctctctgaagaaaggcagcatctttttgagagcagcattggaccacaccccacaatatcaaaggattgaaattcatgaacatctaggatcccatgaaggtcactggaccactgttttttctacttcaaatcctgtaggtagccctactgaaatgaggaaaccatattctgaccccattgggatccaaatccaaaggcacagtgaacctcctcatagcatcttctttggaattactcaggaaccagaactttttacacaaatgtaaggaaattctaccaaggagtccccttacctaacaggcatctcacaagggtggcaccagattcccagaaaagggcttctcttgatacatcaaggtagaacctctatgcattttgtgaccgacttattcttagatcattggttttccaaaggctttgtggccatgaagccctttgagtgaaaactgggcagaagcccagagtaaaagtgaagctgctctggatgaaataatggaaccagaagtaggggcctgaatcctgctacaactatcttcctttaccaccgtggtgacacctaaggggacttccttacaacaccttgaactcttccgaacacagtttgaaaaccactgccccagacagcaatatgtttgacctgaatggcattccaatcttttctgtacctccactcagcacagttcatgttcagtagatgctgaacattcttagaaataactgtgtgtgaacttagaaaagtgcaagaagacaggcatgtctttgaccccaggaatgatcatttgctgaagatggtgtcaagtgaacctagattaacagccctccactccaggatggatatccagtgattcctagaatgggatatagcccagagaacaattctatgcaccctacactgacagactcccttaagcaacaccagatgctctactggtacttgaagtacatgactttgaagtcttgaccctccaatngattacctgaattatcagcaagcgggttttgaagctggtgcctcattgaggccatattagagcaacttgtacatttgacctcttgttatcagcccatggtactcctacttccgtgtgcaagagataactatgaaaagccaaattcgaaatactggcaacatttcctaaaggggctcaatatcttatcattcgtcttcttttccaaactacacatcactgtatgactcaaccagtagcagttatattgccccttggtttttattcagtttaactactgtttccaagataaatgagctaataagctttaaaaaaaaaaaaaaaaaggctgaattcttttttcttcatcactgcatatctgcctattctccagaattattatgactattcagctcactttaacagttgaacttcaagcgacaatctttgaacacccctgctccccactgccgctgctgcctcaataaatctgctgatttgctgcc

SEQ ID NO: 157876 - DNA, 450 bp, Homo sapiens
  misc_feature (1)...(450): n = a,t,c or g
nnnnnnnnnnnnnnnnnnnnnnnnnnnnnnnnnnnnnnnnnnnnnnnnnnnnnnnnnnnnnnnnnnnnnnnnnnnnnnnnnnnnnnnnnnnnnnnnnnnnnnnnnnnnnnnnnnnnnnnnnnnnnnnnnnnnnnnnnnnnnnnnnnnnnnnnnnnnnnnnnnnnnnnnnnnnnnnnnnnnnnnnnnnnnnnnnnnngggaaaggtccttttcaaaaaaaatgccctaaaacccacccggggggggagagcccccataacctacccttggaatatnnnnnnnnnnccccccacatttgttagggcctaaatttttggaaaagatttttggccttcctggcttaccgggggggaaaatttttcctcagatttgcttttgggccaaacttggggtccggcggtgaaattccaggggggattaacccccgttccctgcccttaggggaaagggg

SEQ ID NO: 157877 - DNA, 695 bp, Homo sapiens
  misc_feature (1)...(695): n = a,t,c or g
aaaaaggtcctttcccaaaatcccccggtgggttttaaaaaccccccccaaaaagaaaaaaaatttattttcccccccccggtaaaatttggcccccccagggatttttttaaagggcccccccccnnnnnnnnnnnnnnnnnnnnnnnnnnnggactactcagcaatttattaatctccatttttttcatcccacccaagaaatccgcccccaaatatcaacataaaatgcatagccaatcttttcatttttattgctttaacacacattttaattttcagttgaacaaattcttaatgagctacagagtgacatgagttgaaattagaataaagtaaaataatactatataaccaaaacaaacccagtgttacatatcgtgaaataatgcaattaagagcacaactaaaaaaaatcattgattcagttaaacacaaaaggacatggcagggtctcaaacaaggagtatttggggcttctatgtcaatgtcatagggaagagctttttctatttctgggataaatatttcatttttattgattgggccaaaaatactttaaggataaatatgggaccagaaaggcctacagtatttttgccaaattttatctatagccaaagcacaaaactggctttgaactgggtcattaatataatggggcagttcattccatcatattctgtctctgcaga

SEQ ID NO: 157878 - DNA, 484 bp, Homo sapiens
  misc_feature (1)...(484): n = a,t,c or g
aaattgagaccaatcgaggaatctggcacggaaccccgggncgacccacgcgtccgatttatttttattttatttttgtatataatgataggcaggtgtctagtctcattcttctgcatgtggatatctaatttttctagcaccatttattgacaatactgtctttccccaatgtgtgttcttgggacctttgacaaaaaatcagttggctgactttgggctggaataagatggcagaatagaaggctctaccagtcaccctcccctctaccaaccctgcaaggataccaatttaactatctgcacacacaaaaaccacctttataagcactaaaaatcaggtaagcactcacaataactggttttaacttcttattgctgaaagaggcattgaagaggtaggaaaaacagttttgaattgcagacaccatccctcccctgtctccaagcagcaagtgcattgcattgaatagctgttttgtgg

SEQ ID NO: 157879 - DNA, 509 bp, Homo sapiens
  misc_feature (1)...(509): n = a,t,c or g
ttgatgacagactctcgctctctcgcctgggcttggagtgcagtggcgcgatctcggctcaccgcaagctctgcctcccgggttcatgccatttctcctgccttaagcttcccaaattagccgggactacaggcgcccggccaaccaatgcccggccntaatttttttatatttcaagcagagacggggttttccaccgtgttagcccnaggatggtgtcgatctccctgacctcgtgatccattccgcctcagcctccccaagtgctgggattacaggcgtgagccaccggtgcccagccaggacattttgaatgttttaaaccaatttgcctgacaggtcaaaaggtaattttttgagatttcgagactgacagatgcaacagagattttaaattttgcataggcttgttaagaacccagactgggtgcagcgactcatgcctgtaatcccagcacttcaggaaggctgaggtgggaggatcacttgaggccaagagttcaacacca

SEQ ID NO: 157880 - DNA, 2616 bp, Homo sapiens
atgaaggtctggctgctgcttggtcttctgctggtgcacgaagcgctggaggatgttactggccaacaccttcccaagaacaagcgtccaaaagaaccaggagagaatagaatcaaacctaccaacaagaaggtgaagcccaaaattcctaaaatgaaggacagggactcagccaattcagcaccaaagacgcagtctatcatgatgcaagtgctggataaaggtcgcttccagaaacccgccgctaccctgagtctgctggcggggcaaactgtagagcttcgatgtaaagggagtagaattgggtggagctaccctgcgtatctggacacctttaaggattctcgcctcagcctgtacaactcgaggggccttttgagggaggggcaggcaggcccaatgggtagtcaacccaaggtgaacccacccaccatggccagggttcctcaggttgagcctccagtgggtgaaacctgggagtcctcaaccttactggcagatggggccgttgacaagaggagttcctttgctctctgttcttccttcatttccacttggaaacttgcgaccctaaatgaccctgttcatctactttctcttgtctgcacatggaccctgaggactgctggaaggagccgtacagctcgccacgtggccgtggctgccagtagatgtggccacctcacgtttgcttggcaaaatcaatacatttctctagaaaggttgagcgtgtatatgtgcaggtttgttacgtgggtaaattgcatgtcacgagggtttggtgtagattatttcattatccaggtgctgaaattgattcaggttttacctccagactcagtccatcccagatcccataaacatctcctgtctttgagatcggaaatagcaaagaccacatcctactgtccaaagcactcctctctctccatcccactgcctagaaaccagatgagatctggtgtctcagttacattggagcagaggtcagaaagcaccagctcaccctttcctgtaacagcactgttgtttgtgaacttgacttcatggctgggaaaagggccgattcttcccaagtatgtggctgtgagcgttcagctgagcagagctggggcatgtttttctgatgttacccacagagaagtgctgatgagcttctgctacatggtggttggaggggattttctgttgggaggatcgctggtgtgtcaggtatggttttggtttgtggtgtcaaggggatatacgcttctcattttctcagagtctagagaatatctgaaggaggaagaggagcttttcctttgtaaaggacctggatatgctggacagagggtcaaaaagaatgatgaccccagcagcgtcaagcagaatgagcgctacggccagttgactctggtcaactccacctcggcagacacaggtgaattcagctgctgggtgcagctctgcagcggctacatctgcaggaaggacgaggccaaaacgggctccacctacatcttttttacagagtcaggaggaaggatctccgtgttagtgaacttggtacttacagcccaagaactcttggctcatgaaccatttgatgatgtgtccaggaattctgcccccaacctaaaacaccatctaactgtgacacaaagaaggcaagtggggaagaaagccaagaaaaattatttatttcaggaacactgtggggaaaacacaagaaagcatgtaatacgtattggggtatcactagctctgaagatttctctttgcaaatactgtaatattccctcacagaatgatccagaaaaacaaaggattcaatgtaccatgccaaaaaagaaaagccaccagcaccaacaaaaatacccccaaaagcccagtccagagtttcttgcctgtcctaaggacagaattgagaaaggagaactctttgtaccttctcccagctacttcgatgttgtctacttgaacccggacagacaggctgtggttccttgtcgggtgaccgtgctgtcggccaaagtcacgctccacagggaattcccagccaaggagatcccagccaatggaacggacattgtttatgacatgaagcggggctttgtgtatctgcaacctcattccgagcaccagggtgtggtttactgcagggcggaggccgggggcagatctcagatctccgtcaagtaccagctgctctacgtggcggtcccaacaattcatccaagcctgctttctgctcttcctgtcacatgcaggctccatggtgagtgcagcagctctgagtcggaggccacagttccctccgctcccctcccctcccctcccctctctgctggggcaccaggttacgggaattcccagtggccctccctcaacaaccatcttggcttcttcaaacaaagtgaaaagtggggacgacatcagtgtgctctgcactgtcctgggggagcccgatgtggaggtggagttcacctggatcttcccagggcagaagccacccagcagagttactgggctctgggctggtacttggtggtgcctgtacagagtcctttgatgtctcaggtctctcagccatggatgccggcagctgctctgatggaggtggcaggggagtga

SEQ ID NO: 157881 - DNA, 2586 bp, Homo sapiens
atgaaggtctggctgctgcttggtcttctgctggtgcacgaagcgctggaggatgttactggccaacaccttcccaagaacaagcgtccaaaagaaccaggagagaatagaatcaaacctaccaacaagaaggtgaagcccaaaattcctaaaatgaaggacagggactcagccaattcagcaccaaagacgcagtctatcatgatgcaagtgctggataaaggttggttccagaaacccgccgctaccctgagtttgctggcggggcaaactgtagagcttcgatgtaaagggagtagaattgggtggagctaccctgcgtatctggacacctttaaggattctcgcctcagcctgtacaactcgaggggccttttgagggaggggcaggcaggcccaatgggtagtcaacccaaggtgaacccacccaccatggccagggttcctcaggttgagcctccagtgggtgaaacctgggagtcctcaaccttactggcagatggggccgttgacaagaggagttcctttgctctctgttcttccttcatttccacttggaaacttgcgaccctaaatgaccctgttcatctactttctcttgtctgcacatggaccctgaggactgctggaaggagccgtacagctcgccacgtggccgtggctgccagtagatgtggccacctcacgtttgcttggcaaaatcaatacatttctctagaaaggttgagcgtgtatatgtgcaggtttgttacgtgggtaaattgcatgtcacgagggtttggtgtagattatttcattatccaggtgctgaaattgattcaggttttacctccagactcagtccatcccagatcccataaacatctcctgtctttgagatcggaaatagcaaagaccacatcctactgtccaaagcactcctctctctccatcccactgcctagaaaccagatgagatctggtgtctcagttacattggagcagaggtcagaaagcaccagctcaccctttcctgtaacagcactgttgtttgtgaacttgacttcatggctgggaaaagagtctagagaatatctgaaggaggaagaggagcttttcctttgtaaaggacctggatatgctggacagagggtcaaaaagaatgatgaccccagcagcgtcaagcagaatgagcgctacggccagttgactctggtcaactccacctcggcagacacaggtgaattcagctgctgggtgcagctctgcagcggctacatctgcaggaaggacgaggccaaaacgggctccacctacatcttttttacagagtcaggaggaaggatctccgtgttagtgaacttggtacttacagcccaagaactcttggctcatgaaccatttgatgatgtgtccaggaattttgcccccaacctaaaacaccatctaactgtgacacaaagaaggcaagtggggaagaaagccaagaaaaattatttatttcaggaacactgtggggaaaacacaagaaagcatgtaatacgtattggggtatcactagctctgaagatttctctttgcaaatactgtaatattccctcacagaatgatccagaaaaacaaaggattcaatgtaccatgccaaaaaagaaaagccaccagcaccaacaaaaatacccccaaaagcccagtccagagtttcttgcctgtcctaaggacagaattgagaaaggagaactctttgtaccttctcccagctacttcgatgttgtctacttgaacccggacagacaggctgtggttccttgtcgggtgaccgtgctgtcggccaaagtcacgctccacagggaattcccagccaaggagatcccagccaatggaacggacattgtttatgacatgaagcggggctttgtgtatttgcaacctcattccgagcaccagggtgtggtttactgcagggcggaggccgggggcagatctcagatctccgtcaagtaccagctgctttacgtggcgggatggatgttctccttccttgttatgaccctgaccgaaaacccctcttctccattccagccaaatccttccatcgttcactctggtgctgcctctgtgttggatcagcagtcccaacaattcatccaagcctgctttctgctcttcctgtcacatgcaggctccatggtgagtgcagcagctctgagtcggaggccacagttccctccgctcccctcccctcccctcccctccctgctggggcaccaggttaggggaattcccagtggccctccctcaacaaccatcttggcttcttcaaacaaagtgaaaagtggggacgacatcagtgtgctttgcactgtcctgggggagcccgatgtggaggtggagttcacctggatcttcccagggcagaaggatgaaaggcctgtgacgatccaagacacttggaggttgatccacagaggactgggacacaccacgagaatctcccagagtgtcattacagtggaagacttcgagacgattgatgcaggatattacatttgcactgctcagaatcttcaaggacagaccacagtagctaccactgttgagttttcctga

SEQ ID NO: 157882 - DNA, 667 bp, Homo sapiens
ctttctagagaaatgtattgattttgccaagcaaacgtgaggtggccacatctactggcagccacggccacgtggcgagctgtacggctccttccagcagtcctcagggtccatgtgcagacaagagaaagtagatgaacagggtcatttagggtcgcaagtttccaagtggaaatgaaggaagaacagagagcaaaggaactcctcttgtcaacggccccatctgccagtaaggttgaggactcccaggtttcacccactggaggctcaacctgaggaaccctggccatggtgggtgggttcaccttgggttgactacccattgggcctgcctgcccctccctcaaaaggcccctcgagttgtacaggctgaggcgagaatccttaaaggtgtccagatacgcagggtagctccacccaattctactccctttacatcgaagctctacagtttgccccgccagcagactcagggtagcggcgggtttctggaagcgacctttatccagcacttgcatcatgatagactgcgtctttggtgctgaattggctgagtccctgtccttcattttaggaattttgggcttcaccttcttgttggtaggtttgattctattctctcctggttcttttggacgcttgttcttgggaaggtgttggccagtaa

SEQ ID NO: 157883 - DNA, 787 bp, Homo sapiens
ctttctgtctgccctggaggtttctcagcctcatgagagctctgctgggccccggtctgggcagaacttgggcctaaacaaacaagagccagggcagccagggtctctgcgtggctgggcccagggcttgccctcagagctcacctgtccaacaaaagaggaatgttcctccactttccattctgtccgcccctttttcagggtcttagggcctctagccctgtggtggggtcctgggtgccacaggtggagctgaactcatgggtctgttgaggagttggtgtccacctggagtctgtacagtgagtttaggtcaacaggtgggcagtctgtccttggagtctgagccacctgccagcagcctgaacaactccaggggccttttgagggaggggcaggcagcctcagtgggtggtcagcccaaggtgacctcacccaccatggccagggttctgtaggttgagcctccagtgtgtgaaacctgggagtcctcacccttcctggcagatggggccattgccaagaggaggtgggcggggcctccccagactccgccctgtggtgtcacacagctggcagccaatggaaagcagccagtcaggaagcccgggagctacccttgatgggtacccttgctgggggacctgggccatcccagtttgtgtagagcggccggaggcagttaggagtccacgttcagtccaaggccgtcctttgagcaccgtgtgactctgacagagctgggggtgtacatgtcctctctggacctcagttcctgtaaaaaggc

SEQ ID NO: 157884 - DNA, 453 bp, Homo sapiens
  misc_feature (1)...(453): n = a,t,c or g
aaatttcccaacccccgaaaaatttgggcccccccaaggaaacttataaaaggccccccccnnnnnnnnnnnnnaaaaaggaattccctttttttttcccgggtgaaagcaaagggggggttttaagtccccgcaaaagnnnnnnnnnnagggtaaaaccattttccgcccccacccccccaaaaaaggggggccccaggggnnnnnnnnnnngggggggaaaannnnnnnnnnnnnggaattttaaaaaaaaagggggtttccccggttaacccagaaggtttttttttcccggccctgggaaacccccgccccggccccccaaaaaggcggggatacagggggaaaccccccggcccgggccctaaaacnnnnnnnnnnnnnnnnnnnnnnnnnnnnnnnnnnnnnnnnnnnnnnnnnnnnnnnnnnnnnnnnnnnnnnnnnnnnnnnnnn

SEQ ID NO: 157885 - DNA, 648 bp, Homo sapiens
ccaaaccctccctttcaagggaagactgccccaggaggatgggcttgggatcagaaggccatccaaaaggccagccctcccctggctctgccagggccctgctgcctgtcccctccccgcctctctccaagttgttcctggacaccaaatggaccccatccaacttgtccctccttttctttcccctgcccgccccctgctggagttgtaagagggcaggcagaaagggaggtgggggaggcccagccaggctgggggacaggagaagcagcctcagttctagctcagcttcccccacagcagagcgtgccaggcccccgagggccgggacctatgggtgatgcctggcactcccttaagtcacaggtggagttgggcctatggccagtactctccctcgtgaccactgggatgggacaagacagtaggggcaacaggtaggaaggtccaggtgtaaggtgagctgggggtgcagccctagagagaggtaggaaggagggacaggggttgctctggaggagagagggttgctccagaggcagagggaaaagacatctggagtgggagtcagtgagccaggttttgtgttccaaaggccagcattgcctggaccttgggtatgtcctcgcctgcataagaggctggcag

SEQ ID NO: 157886 - DNA, 376 bp, Homo sapiens
  misc_feature (1)...(376): n = a,t,c or g
tggttgtagaacttcatacaaatggaaccagccaatatacactcttcattgtctgacttttcacttagtatgtttctgaaatgaatccatgttttgtgtttcagaagttcagaaattatnnnnnnnnnnnnnnnnnnnnnnnnnnnnnnnnnnnnnnnnnnnnnnnnnnnnnnnnnnnnnnnnnnnnnncttcagtttgannnnnnnnnnnnnnnnnnnnnnnnnnnnnnnnnnnnnnnnnnnnnnnnnnnnnnnnnnnnnnnnnnnnnnnnnnnnnnnnnnatcatcagtagtagcaaggctctccctaggagtaagttctgagtttgatgctatccaagtaccagagtttactgactttacattttctcctttt

SEQ ID NO: 157887 - DNA, 864 bp, Homo sapiens
gtatgaatttcagccctttatttccttctaattttggagatttttctcagaatatctctacacccagtgaacagcagcaacccttagcccagaattcttcaggaaaaacagaatatatggcttttccaaaaccttttgaaagcagttcctctattggagcagagaaaccaaggaataaaaaactgcctgaagaggaggtggaaagcagtaggacaccatggttatatgaacaagaaggtgaagtagagaaaccatttatcaagactggattttcagtgtctgtagaaaaatctacaagtagtaaccgcaaaaatcaattagatacaaacggaagaagacgccagtttgatgaagaatcactggaaagctttagcagtatgcctgatccagtagatccaacaacagtgactaaaacattcaagacaagaaaagcgtctgcacaggccagcctggcatcctaaagataaaactcccaagtcaaaaagtaagaagaggaattcttactccagctggaaaagcagagtttaaaaacatcaggtatgaaagtgccagtatggtctagcacatgtgaaccttgcaaaagtaggaacagacattcagcccagactgaagagcctgttcaagcaaaagtattcagcagaaagaatcatgagcaactggaaaaaataataaaatgtaataggtctacagaaatatcttcagaaactgggagtgatttttccatgtttgaagctttgcgagatactatttattctgaagtagctacattaatttctcaaaatgaatctcgtccacattttcttattgaactcttccatcagctgcagctactaaacacagactacttgagacagagggctttat

SEQ ID NO: 157888 - DNA, 1145 bp, Homo sapiens
aaaagcgtctgcacaggccagcctggcatctaaagataaaactcccaagtcaaaaagtaagaagaggaattctactcagctgaaaagcagagttaaaaacatcaggtatgaaagtgccagtatgtctagcacatgtgaaccttgcaaaagtaggaacagacattcagcccagactgaagagcctgttcaagcaaaagtattcagcagaaagaatcatgagcaactggaaaaaataataaaatgtaataggtctacagaaatatcttcagcacatgctaggagaatactacagcagtctaacagaaatgcatgcaatgaagcgccagaaactgggagtgatttttccatgtttgaagctttgcgagatactatttattctgaagtagctacattaatttctcaaaatgaatctcgtccacattttcttatggaactccttccatgagctgcagcttcctaaacacagactacttgagacagagggctttatatgcattgcaggacatagtatccagacatatttctgagagccatgaaaaaggagaaaatgtaaagtcagtaaactctggtacttggatagcatcaaactcagaacttactcctagtgagagccttgctactactgatgatgtattcatccaagagaaatgaaaatatgcatcacaaaaacacttgcacattaatgttcatagcatctttagtcatgatagcctcaaactgaagcatcaagagataaatggataaacaaactgtggtataacctatacagtggaatactgtgcagcccattaaaaaaataatttctgaacttcctgaaacacaaaacatggattcatttcagaaacatactaagtgaaaagtcagacaatgaagagtgtatattggctggttccatttgtatgaagttctacaaccagcagaactgatctacagtgatagaaatcatgagtagggtgtggtggagattgactgtagagggttgtgaagaaacgtcctgggccagtggaaatggtctttatctttagggaatctggttacatgagtgtatacatttgtcaaaactcatcaaactgtacatttaaagtgagtgcattgtatattaattatatttcaataaagtttattttttaaaaatgcaaaaaaaa

SEQ ID NO: 157889 - DNA, 415 bp, Homo sapiens
  misc_feature (1)...(415): n = a,t,c or g
atatatttcccaaccccggaaaaatttgggccccccaaagaaactttaaaaaagggcgcccccnnnnnnnnnnnnnnnaaacaaaaattccctttttttggcccaggtggaaagcaaaaggggggttttgggtccctgcaaaccttgccccccggnnnnnnnnnnntttcccgccccaacccccccaggaaaaggggtttcaaggatgnnnnnnnnnnnnngggtaaatttgtatttttaaaaaaaaagggggttttcccgggtgggcagggggggttcaaaaccccaaccccaagggatttggcccccccggcccccttaaaccctggggcccnnnnnnnnnnnnnnnnnnnnnnnnnnnnnnnnnnnnnnnnnnnnnnnnnnnnnnnnnnnnnnnnnnnnnnnnnnncgtccg

SEQ ID NO: 157890 - DNA, 3353 bp, Homo sapiens
tatcgaattccgggtggagggacctggcaaagcgccaggccccgcgtgggctcccggcgagcggttgatggcgagggggcgcggcgcgggctctgtagcccgagttcccgacgctggaggcccggcccgcctcagccgcattgtcccgggccgcgcgcaccggccctgagctgcgccgccgcagcacccgcccgccgcccgcggggccatgcggagagccgccgggatggaggacttggctccgcggaggaagaggagtcctggtacgaccagcaggacctggagcaggacttgcacctagctgcggagctggggaagactctgctggagaggaacaaggagctggaggggtccctgcagcagatgtactccaccaatgaggaacaggtgcaggagatcgagtacctaaccaagcagctggacacgctgcggcacgtgaacgagcagcacgccaaagtctatgagcagctggacctgacagcccgggacctggagctgaccaaccacaggctggtgctggagagtaaggctgcccagcagaagatccatgggctgacggagaccattgagcgcctccaggctcaggtggaggagctgcaggcccaggtggagcaactgagaggcctggaacagctgcgagtgctccgggagaagcgggaacgcaggcgtaccatccacaccttcccctgcctcaaggagctgtgcaccagcccccggtgcaaggatgctttccgcctacacagttcctccctggagctgcccgcggcccctggagcaggagaacgagcggctgcagaccctggtgggggcgctgcgctcccaggtgagccaggagcggcagcgcaaggagcgggcggagcgcgagtacaccgcggtgctgcaggagtactcggagctggagcgccagctgtgcgagatggaggcctgtcgcctgcgtgtgcaggagctggaggccgagctgctggagctgcagcagatgaagcaggccaagacctacctactgggtccggtacgaccacctggccgaggccctgctcgcacccctcacgcaggcccctgaggccgacgatccccagcccggccgcggggacgacttgggcgcccaggacggggtctcctcaccggcagcctctccaggccacgtggtgcgcaagagctgcagcgacactgcgctcaacgccatcgtggccaaagacccagccagccggcacgcgggcaacctcacactgcacgccaacagcgctgcgcaagcggggcatgtccatcctgcgggaggtggacgagcagtaccacgcgctgctggagaagtacgaggagctgctgagcaagtgccggcagcacggggccggagtgcgcgacgccggcgtgcagacctcgcgccccatctcccgggacagctcgtggagggacctgcgcgggggtgaggagggccagggtgaggtcaaggcaggagagaagagcctgagccagcacgtggaggccgtggacaagcggctggaacagagccagcccgagtacaaggcgctcttcaaagagatcttctccaggatccagaagaccaaggctgacatcaacgccaccaaagtcaagacgcacagcagcaagtgacccttctccggcctgcagcctcccccagggtggaagccgtggggtccctcaggcctgggcggtgcagcttccagagagcgagcgccctttagcggcctgccaccacagcacgcggcctcctgatccggaagcacgcagcatgttccctgctgagcggaggcagcccacctgtcctgcctcccaggagcccttggccacctcgcgccagcccaaaggcgcagctctgagttcaaagccaaatgtccccactaccccagggatcccccagctcccccagcccctggcttcctgaccctgcgcctcaccctcagactcctgaccaggcttctgaaagccattctggatcagttggctttttttttttttttggttaagtttgttttttctaagagatttgcaatgcaaggtctccttgaccccttgccacaactggaaacacttgaaaggggaccccagggccagctgtttcaggggtttcctggaccacccactgcttctccccaaccctgatgcgctgacattcccttagcaccagctgtcccacctccaggagtcctgaccaggtcagagatgtcccctgccatgcagagcaggaaagcctcagctgggcctggagtgtccctgctccagccctgccagggacaggtttctccctggatactcttggcccaccgcagatctgtagccagtcagaggaggaggagaaggagcccctcagcagagtggtgcagtttcgctcagagcttgtctccttggcttccaaccccagaaatgacctgctgggccttaagctttccaggggccggggcagtggggagcccccattcccttcacaccgccaccaactaaaccaaagcttggcctctgactcccgtctctgtgcttgcccccatctcagggaccatgatgtctcagtcactccacgctccccacaggccaaccctggcacaggtcatgtctgcagcccccagaatcttctggacatgcaccaccagccggtggtcccaatgtccacccctgcctccccttcactggggactggggttttcgccccatgctgcatcgtcgttgtattgggatggggctgaggaacatgctccctccctccctcccataaaatgcctgctcttcacctcccacctttgtggggggcttttgaggacccagctgcgtcaggagttttgcttcaagatgtcagaaagtcaagttcagctaagagacacccaggtccccagcttgccctgagcagcccttcagggcttctggttccttctgccgcccttcctgagaccttagaaaccagaagagccatacagtcagtggaaggcgggggggcccctggcctcctgcaccgggatcccaagtgggaacctttcatgccttatttatttcttaatgggtaaaggggttttcttaccaagcatccctgacctccctggagacaccacctgctttccgggcggccacctgtgaatgggagcctggtggccgacctgagtcccttctgtacgtgcaactgggaaacttttgtccctttgaggctaggcagctccctgccctccgtgtgtgtctgttatctgggggagaaggagtgtggaagggttgggggaagagctccagcctgtctgctccccagctctgtagtggcagaccatgcgtcacctttgaagtatacgtgagagaaatatatttacaaatgctttattttttttctttaataaaaaatgccccagtattctaaaagc

SEQ ID NO: 157891 - DNA, 190 bp, Homo sapiens
aagtagtaataaaaaaaaacctcccaacaaaaatcacccagaaccagatagcttcaaaactgaattctaccaaacattcaaaacacaccatgaataccaattcttaaactcttccaaaaaacagaattacaggaaatacttccaaactctttttgtgaggtaagcatcacgaattccagcacacggagaa

SEQ ID NO: 157892 - DNA, 394 bp, Homo sapiens
cagtatggactgtacaatggtggtggtgccattatggccgccttgcatgagagctttacatcgtgtctgaattatggcggccctcaaaagttctccccagaaggtgacctatgttctagcccagaccccaaaatctgttatgtgtgcaagaagagtttcaaaagctcctacagtgtgaaacttcactacaggaacgttcacttgaaagagatgcacgtctgcacagtggctggttgcaatgctgcattcccctctcgccgaagccgagacagcaaaagattagaaagctgatcttattgtcacaagacacagtgccaacataaacctacatcgtaaactgttgaccaaagaactcgatgacatgggcctggactcgtcgcagccctcccttagc

SEQ ID NO: 157893 - DNA, 1106 bp, Homo sapiens
  misc_feature (1)...(1106): n = a,t,c or g
gcccccgctttcttcttaaaaaccctgcagcttggctgacagtgggacctgcctccctactcccgcctgcaggagctcagaagcctcagctcaagaggagcccttgccagagacgtgggaccaggaatgggccccacagagccctgccgtgtgttttccataccagccttgatttcaggtgcccccaccacagatgtagccgggttgcaataaacagcaagaaacggacccatgggacaggagagacgcaggagccccaggggacaagagagacgcagaagccccaggtgcctttggtggccagtgctgaatttcgcaagcaacattagtaaactttttatttctgcttttctcttaacccaagggtgaaaatggaaacctgtggtgtggggccagtctgctgaacgctaggatgagggccgggaacaagagcccacccctcccccgcttgccacctggggccacaaagagccttccccagggggctctccagtttcagcccctccttgccgagccagacagcgctgctggccttggaacgggaggtacacccaggctgactgaagtggggggagcactttttaataaagatcaggatcagggtttcctgaaaaccaaaaaggccccccagatcctgcgagcggctatttagacttgatgcacactccaccattttcacaggtatcccatttccccagcgtcacacatgcccatccccagctggagcacactcttcagtgtggaggacagaaggagcaggcagaagacgaccccggggcgctgggggagcaggtgcgggctcccacacacctgctctattctggttggaggtgtcacaagggaaggcgtggagatgctgccaatggggacatgcggcaaatgcgcccccttcgccccacacctgtcagcagctagcagcaactcagtcctgactgctggagacccagccccaggggcaggcaggttgggatccgctgctcaggaggcagctctgggccagggtggaggccggagaagccaggcacctccccgcagagctctgcagaggccgcacgcgtgggtcgagacgacatctcagtggcgatccgcaggcngtcagttcaaac

SEQ ID NO: 157894 - DNA, 488 bp, Homo sapiens
  misc_feature (1)...(488): n = a,t,c or g
ncttgatcgccatncgttggggcaattcagagggctcctccggcgccgccgagctgcgcccgctgccttcacaccccggacatccgcgccacactgacccagaccccaggaggcctcaccccacagcaagagaaagaccacgagcatggacatgatggtcgcgctcactccggtgcagtgagtgtctgggtgttggatcctggaacctgttctagaaggagacgctgagttctccccactctacctggagctgctgaggtcaagtggagagtgccggggctgaagcccagcgagcccctccctgtcacaccacactgcacatgtgacaccaaaggcatttattgagcatctactgtgtgccagatgcaaagaagacagtgggataactgggcaaggagcattctaggcagagggaacagccagtgcaaacatgggagatgcgggtgcagtgagaagcagcagaggagaccaggagttgaggcgactgc

SEQ ID NO: 157895 - DNA, 331 bp, Homo sapiens
actgcaccggagtgagcgcgaccatcatgtccatgctcgtggtctttctcttgctgtggggtgtcacctggggcccagtgacagaagcagccatattttatgagacgcagcccagcctgtgggcagagtccgaatcactgctgaaacccttggccaaattaatgacatatttcaaaaactcaacatatttgatcaggctttttatgatctatcgctgcaaaccagtgaaatcaaagaagaagaaaaggaactgagaagaactacatataaactaccagtcaaaaatgaagaggtaaagaatatgtcacttgaactcaactcataacttgag

SEQ ID NO: 157896 - DNA, 1026 bp, Homo sapiens; identical to SEQ ID NO: 144626

SEQ ID NO: 157897 - DNA, 2711 bp, Homo sapiens
tttttttttttttttcaggaaataaaaaccacactaggtatttcaaacagaggggatataagttagggactgattgtgcaggttttgcaaggctcaaagagcaaaagtggatgttgcaaaatctcaaagttggatacttgcaggaagctgctaccacccttagggctggagaacccagggaagctaaaaggagggtgcaacgaggctggtgttgggactgccaaaggaaacacagaatgacagctccatctctgcagacctcaaatttgaccagggcctctggctgcctgggcagcctcattgccaatgggctggaaaggttctgtcactgttcagtggttctgacttctgagttctgtgcacaacccctgagctctgctcctctgggcctgggccaccagtccttgtctgagtgccccaggtctggttatgacttcaggcctcaagcacctggttgtctcttctgcaaagaatgcattctcccccagtccacccagaacacacagccttccattccaggtacttggctctgagcaggacagagagcatgcagcaggtgctcagcaatatgggaaatggggaccaaacagagggagtctccacagctccccgtccctcacagcagaagccagagccgctgcagtgcccagctagtttttcatcacgtctatgagctctgcaatcgctctgcagtcgcctcaactcctggtctcctctgctgcttctcactgcacccgcatctcccatgtttgcactggctgtttccctctgcctggaatgctccttgcccagttatcccactgtcttctttgcatctggcacacagtagatgctcaataaatgcctttggtgtcacatgtgcagtgtggtgtgacagggaggggctcgctgggcttcagccccggcactctccacttgacctcagcagctccaggtagaggggggagaactcagcgtctccttctagaacaggttccaggatccaacactgaaatgagggtgaggtggttttagcatcattttatcactcttgatttagtttattaatcatacatgattattgattataattgttgctgggcatcctgaggcctcagaagttcaccctttgccctgaccccatgggggccctgcccccgccttccgggaaggacaaacacgggaagaggtcagtgcccgagccacccccaccgccctccctcggggcctcattgctgcagacgctcaccccagacactcactgcaccggagtgagcgcgaccatcatgtccatgctcgtggtctttctcttgctgtggggtgtcacctggggcccagtgacagaagcagccatattttatgaaacgcagcccagcctgtgggcagagtccgaatcactgctgaaacccttggccaatgtgacgctgacgtgccaggcccgcctggagactccagacttccagctgctcaagaatggggtggcccaggagcctgtgcaccttgactcacctgccatcaagcaccagttcctgctgacgggtgacacccaggggccgctaccgctgccgctcgggcttgtccacaggatggacccagctgagcaagctccttggagttgacaagggccaaaagcactcttcaactccaccccacccacagagtccttgcctgctccctggctctcgatggcgccagtgtcctggatcacccccgggccggaaaccaccagcagtgtgccgaggtgtgctgcggggtgtgacttttctgctgaggcgggagggcgaccatgagtttctggaggtgcctgaggcccaggaggatgtggaggccacctttccagtccatcagcctggcaactacagctgcagctaccggaccgatggggaaggcgccctctctgagcccagcgctactgtgaccattgaggagctcgctgcaccaccaccgcctgtgctgatgcaccatggagagtcctcccaggtcctgcaccctgggcaacaaggtgaccctcacctggcgtggctcccctgagtgggagtgggatttccagcttacggcgcgggggagaaagagctgctggtaacccaggaggcagcaccagcccagatcgcatcttctttcacctgaacgcggtggccctgggggatggaggtcactacacctgccgctaccggctgcatgacaaccaaaacggctggtccggggacagcgcgccggtcgagctgattctgagcgatgagacgctgcccgcgccggagttctccccggagccggagtccggcagggccttgcggctgcggtgcctggcgcccctggagggcgcgcgcttcgccctggtgcgcgaggacaggggcgggcgccgcgtgcaccgtttccagagccccgctgggaccgaggcgctcttcgagctgcacaacatttccgtggctgactccgccaactacagctgcgtctacgtggacctgaagccgcctttcgggggctccgcgcccagcgagcgcttggagctgcacgtggacggtgagctggcggggcaccagcgagggcgggcgcgggttcagtgcccctcggggcctcctgtctttcccctctttccttgggcgtccgacggcggcgctctgggccttggttcagcccccatcgcctaccccggcggggagcaggcgatcggtggtcgagggtctggggacgcctggaatttcggcttatttcccacggacgcaagcccgtag

SEQ ID NO: 157898 - DNA, 1334 bp, Homo sapiens
atggggaagccgggcgtggaggcagcaccgggctcggagctggccagggttgtgctacgagccaaggactggctgccaggagctcctgggggcaccgcagtgtgggccaccagcttggaagcagaggtcccaccagatctagcgctcaataaggagcagcagctgcagatctccaaggagctggtcgacattcagatcacaacccaccacctacatgagcagcatgaggctgaaatcttccagctgaagagtgaggtggcccgcgggcaggtgcacctgctcatgccagttgtcccacagatccttcggctggagagccgggtactggagctggagctgcgaggagatggcaccagccagggctgtgcagtcccagtggagtctgaccccaggcatccccgggcagcagcccaagagctcagacacaaagcccaggtgcagcccaagaacaccatgaaccccgagaatgagcagcacaggctggggagcggcctgcagggggaagtgaagtgggcgctggagcatcaggaggcccggcagcaggcactggtgacgcgtgtggcaaccctgggccggcagctgcagggagcccgagaggaggccagggcagccgggcagcgactggccacacaggctgtggtgctgtgcagctgccaaggccagctccgtcaggcagaggctgaaaatgcccggctgcagctgcagctcaagaaactgaaggatgagtacgtcctacggctgcaacactgcgcctggcaggcagtggagcacgcagatggtgcaggccaagcgccagccaccacggccctccggacattcctggaggcgactctggaggacatccgggcagcgcaccgcagccgtgagcagcagctggcccgggctgcccgcagctaccacaagaggctggtggatctgagccgcaggcatgaagagctactggttgcctacaggggcctggacgctgcatcctgggcccagatccaccagaagctccgggacttctcccgcagcacccaggcagagctggaacgggagcgggcacagctgctggtccgggccacgatggctgaagagcaactttctgagctacaggagtacgtggaccagcacctgggcaggtacaagcacgaaatcctgaggctgaggaagctggcaggtgcaggggacccctggaaagtgggggctgtgcctccagccaagccccagcatccaaggaccggcagccactaggccgtctcccaaggagcagagcagagcagagctcctcagccagcacagaaccctcccacccagccccccgtaaaacatgagtcaggatagaacccaaaaaa

SEQ ID NO: 157899 - DNA, 1987 bp, Homo sapiens
atgtgggagccctgtggatctcaaggtgacactgtgtctttggatgcagagatcgttaaggaggctgaggtgccgcaggctgcgctgggcgtcccagcccaggggacaggggacaatggccacacgcctgtggaggaggaggtcgggggcatcccagtaccagcaccggggctcctgcaggtcacggagaggaggcagcctctgagcagcgtctcctctctggaggtccacttcgacctcctggacctcactgagctcaccgacatgtcggaccaggagctggccgaggtctttgctgactcggacgacgagaacctcaacaccgagtccccagcaggtctgcacccgctgccccgggccggctacctgcgctccccttcctggacgaggacaagggctgagcagagccacgagaagcagcccctaggcgaccccgagcggcaggccacagtcctggacacgtttctcactgtggagaggccccaggaggactagaccatctccacctgccccagctcctgcagggatggggtccgaacacgatggcagatctgggcagtgctgacccagcagacacacttcacccgcccacgaggctccagccgtcacctcctgacacacaccctgggggcagctctctgccagccccgagaccggccttgtcttgctgggcacgggtcttcgcctcacttggagaccagccggctttcctggggggacacacggggcccccggatgcctctggggagccccagcacaagcattagcccagtggcctttaagttccagttcgtttcctggggccccgattcagggaagacagcgtcacggagtcactgccaggaacgtgctgaggaatggagtggcccacggcggccttggggtgaaggggacccaggcctgtgacagccactccaggaactcctgggggtgctccaacctccgcgttttcctgtgctgccaagctcagaagccagaggcgggtttggtagtggctaatgggacaatgtgctgtccagcaaagcacacatggagaagcggccccaaaattcccaccttgatttccatcctgccccttcttctactccacggaggcgctgtctcactagggtcccctccccaaggctcagctctaagacctgcacctgcttctcttggcccctgcgtgacagacaagtccattccctccttagctcagaacaccaaatattcaccagacttgccttaagagacttgatgacacctcccggaatgctctcgggggtggggttcacctctccttgtcctgcacccactgctaggccacattctcgtttctgctcacatcccattgcccggctacaaggcctgcccacggcccttaaacttgctgggcaggtttggagcccatgggaccccgtgggtctctgtccaggagcagcagaggaggctgacaggccctgctccctctgctctgggggtgtctgggagccccagctcacaccctcccaatgcttatatgctgaagctcacagaatgggcttcttgcctgacagcaagtcaaagaatgagtttaatatcaaagtgtaagcttactttccatccacaaaccagcaagccccctgcccccatttccccatgaagcaaaacttctgggggaaggaaaaacaggctccctggccttcactctcagcagagctttggaagaatgcccccaggcatgccctgagctccttctgtgtacctgctcccacttctgagccacccgctgccccttcgcactgctggcaaacccagttccctgcctcagcccaggtctccttccctggtttccagtcacacaagagcccagcagctttctctttcagtcccataagggcagccttgtgtccctggccacacttccacccgccagggtcttcctccccatctttccatccttcctgctgagcttccacagagctcgtttgcaaacagggggattaaagcatccctgcgcattcgaaaa

SEQ ID NO: 157900 - DNA, 371 bp, Homo sapiens
  misc_feature (1)...(371): n = a,t,c or g
ggaccggaaggaggagcggctgaggagcccaaggagcggggcggcggccactaggagctcaggaggcaagggcgtggccgagtgggacccacttccctgcctggacccagaactctgggatcagtttgacaacttaaaaaatcgatagtcttgagaaattcatcatatctgccaaggaaaggactgagattgaactcagctatacaaaacaactcaggaatcttttaaagacatgccaacctaaaaggaactggaaggagaaagaatacattacgtaaaactctccttccctccctgtgaacaaaatgagtgatcacgctaggcagcattaagttatcttctttgaggtcttgaactttcagatcaccgng

SEQ ID NO: 157901 - DNA, 393 bp, Homo sapiens
  misc_feature (1)...(393): n = a,t,c or g
cccactggacccccagagggtcaagatcgaggataaagttaacaagtccaggtcatcctgaaagaacccggcctcgaggatttgggcacctactcagtcatagtcactgatgccgatgaagacatctccgcaagccacacgctaaccgaggaagagctggagaagctgaagaagctgagtcatgagatcaaaaacccagtgatcaaactgatctccggctggaacattgacatcctggagcgaggggaggtgcggctttggctggaagtanaaaagttatctccagccgctgagctacatctaatcttcaacaacaaggagatcttcagctcgccgaaccgcaaaatcaattttgaccgagagaagggcctggtggaagtgatcatccacaan

SEQ ID NO: 157902 - DNA, 378 bp, Homo sapiens
  misc_feature (1)...(378): n = a,t,c or g
cggacgcgtgggtgacttcaacaaatgctgataaagaatttgaaaaaattcaacatcccttaatgataaaactgtcatcaaaatgagtatacatatatgtcatatatatacccattattcaaaataataaagggtatatatgacaaatccttggttaatatcatattgaatgtggaaaaattgaaggcctttttttctaaggacgggtacaagagaaagacannnnnnnnnnnnnnnnnnnnnnnnnnnnnnnnnnnnnnnnnnnnnnnnnnnnnnnnnnnnnnnnnnnnnnnnnnnnnnnnnnnnnnnnnnnnnnnnnnnnnnnnnnnnatacttttccaaagacaatataatgttatacctagaaaaacctagact

SEQ ID NO: 157903 - DNA, 1033 bp, Homo sapiens
cttgcccccttccttttagcctgtgatattccacttgcggggaaaagcaaccccagatgagctggagagcaagtgctgcctccccaggccaatctgcccccagcagcagcgccgtgggatgctggaaggcatcgtgcaaacaatacgtctggggaacgccaagttacagctacaccaatcgctttccccgcaggactcctcacagtccaggtgtgtggaaagcctgcataagccgagctggctgaccagccagaaagaattctttgatttgtggacttgctggcaagactggggctctgaaagatactctctggaaaggctcctgttttccccttgtgtcacaggcacagtgatcctgggggtgggtttcactgtgcagagctgggaacaggaaacagcccccttggacgcaggctgctcaagggacttccatgacctgcagctgtcccatgtccgccgggagccccacatcctaccccagcgtcggccggcagggaggcccacctgattcccaccagctcaaagcagtcctcctcaaagtgtttggagcagaagtagatgtactcggatgccgggtcccacaggccctggccgctggggtccagccgctggcagttggccagccacaagcctcgcctcgggttgtccttcttgggaagtctgtggagccacaaacccgtgagctccacggctgtccacagccctgggctcatgctgcccaagccccccagaggggaagcgcagacccaacacgcgccgccacgagacctccatgtgtccccgccgggtaagcacccccgcccgggcacagcagaggcaacggaggcctcgagaagaaaagcagtttcctcagcgtcatgtggcaggtaacagagtggggcgggtccaagccggctagacttcccgtcctccccttcccgattgcattcagtcccgccggggccgttccgcttcacctcccacccacaggttcaagcctcctcagtatctgagaaaggcgagaagcctctacgcagttacgaccccaggcgag

SEQ ID NO: 157904 - DNA, 389 bp, Homo sapiens
  misc_feature (1)...(389): n = a,t,c or g
gggaggcctcaggaggctttcaaccatggcaaaaggaaagggggagtagacatgtcacatgaaaaaatcaggagcaagaaagtgaggagacacttccaaacttattctacaaggccagtattacactgataccaaaactggacacannnnnnnnnnnnnnnnnnnnnnnnnnnnnnnnnnnnnnnnnnnnnnnnnnnctagaagccaataacacatagaaatatttnnnnnnnnnnnnnnnnnnnnnnnnnnnnncaccaaattcaacaatacattggaaagatcattcatcatgaccaagtaggatgtatcccagagcatttgataaaattcaatatcgctgcatgataagaaccttcaaaaaatggggatagaaggaacacacctca

SEQ ID NO: 157905 - DNA, 378 bp, Homo sapiens
  misc_feature (1)...(378): n = a,t,c or g
cccacgcgtccgggaaagacagacacacagatcaacggaatagaataaagaacccagaaacagacacataaatatactcaactttttgacaaaagtgccactcatttaatggaggaaggatagtcttgtcaataaatggtgctaaagtaattgggcattcaccaatgaaaaaaataaaacttgatttaagtnnnnnnnnnnnnnnnnnnnnnnnnnnnnnnnnnnnnnnnnnnnnngtgtaaaatgtaaaacttttgggaaataatgtaggaggaaatcttcagtatcgagggctaagagttcatacagtagatgtcaaagcacaacacatannannnnnnnnnnnnnnnnnnnnnnnnnnnnnnnnnnnnncctttg

SEQ ID NO: 157906 - DNA, 378 bp, Homo sapiens
ggacgcgtgggttgcaaactgctgcactcaaatgtgacggaactattgactggaggcctgggctgggctatctcaggttcagaccccctcaaaattcctggagaaccccagccagagctaccgactaacagttccattgcggaaacatgtgaggcccaagaagcaacatgagatccggaggctggcataggtggggaataacctgagcgacttcacaggctgaacccagggtgtatacgtgggcttaggccagggccatctttcccgcttaatggatcttggcctggggttgatggtgaagagcatggaacgggatcaaagactggtggagagagcccagcgcctggaccaggagcttctgcaggctctggagaaaga

SEQ ID NO: 157907 - DNA, 389 bp, Homo sapiens
  misc_feature (1)...(389): n = a,t,c or g
cccacgcgtccgcccacgcgtncggttagatcgcgaggcggcggcccnnnnnnnnnnnnnnaaaagagacccccggaaaacttttatcaccccgccccctgtttcgggggaaaggcaaatccggaggggacctacttgtaagtgggggtttttgggcctggtggggcggggcggcccacctgagggagaaaaatcgaatttgttgttatggaacccgggcccccccttggggccaaatataaaaaaagggccccggttaacaacctnnnnnnnnnnnnnnnnnaacttccaaagggaaaaatttcacccgggagggggggctcccccctgaaaccccaccttttggggaggccgggggggccaaataaattggggtggggagttccccc

SEQ ID NO: 157908 - DNA, 373 bp, Homo sapiens
  misc_feature (1)...(373): n = a,t,c or g
ccaaaggcgggggttaaaggggggagccccccagcccggccccaattggtatttttaaatcccccaaaagggggtttcccgggcccaaaactttccctgggggatttttaccaaaggggaaaaaaaaaccaggccccatttttccccccgggtttttagaaaccaaagagggggggacccctcccaacccctttaaaaaagaagggtttttttggtttttaaacccaaggccgggccnnnnnnnnnnnnnnnnnnnncaaactataaaccaatatacctcaataacacagatacaaaattctttaacaatatgttagcaaatagaatttagcaatgtataaaagaagttatgcaatatgaccggacgcgtggg

SEQ ID NO: 157909 - DNA, 1288 bp, Homo sapiens
tttttttttttttttttcctgttacgccgtcaatgcagcaggcaatgaggggaatgacacagccctctcattcccggaacgtagtcaatctcggctctgcggattttcacagaacacactttgcctattgccggctccaacaagaagtaactttccaggaagctgccggccccggcagccgccaggatcgctgcctgcgcttgcgctggccgccggggattcacccggggaggcggggccgcctggggaaggctcgcggggaatacagcacactttcccctaaatccctcgtccgcgccgagtgcagggctctcagagttcacctagtcccacctctcacccacaacagtttataaatggggaaggtcagacaagttagtagcagaacttgggtctaagaacccaggagttcgaatgcaatccgaggctcatatcgagactttaagttgtccgattccgaagtttatttgcttttttccctctttttgccttccattctccctcacccccgttcttttaggggaatgtttgagcgagacttcaaggtcaaaagatggagtccctaggggctgagggtctccatcataggcgccccaggcaaggttggagaaaaactaaacagaaagccccttccgcctacgttggcaagaacgggaacccagctccacttggtttccgcccaaagtctttagaacaggagctgccaagccgtaaggatttccgaatccgatttccccgaaaccgtagagacacagcttggacttggcaaaaggccggggccccgacccctgcgcgcgcactggcactctccaaagttgcctcgccttcctgtggccctcccgggaattaataacccccgggtgccatgtcctaattggtctcggtagcaggctccggggtgcgcttttcgggggctaggggacagcgaaaagactcagccacaaaggccggcagtctggtccttaaaactagccagtggcgtcacactgcgccgctcatcccttctgcggcaagcggaagggtcagagtcggtctgcaaagaaacgaacctttggcctcaaaatcctacattgaggctttcctcaccccttctgcccggtgggataaaggtgaaagagacggttgggatttaataaggggtagggatgagaatctgggaagttaaaatgaagtaagtgcatttattggaaattaggagtcccgtggttccgggagctcaaaccgaatggtgtttttaccgctgcctaacgctagagagagccctccatcaaggtttgaaaccgtcaac

SEQ ID NO: 157910 - DNA, 439 bp, Homo sapiens
  misc_feature (1)...(439): n = a,t,c or g
cgcaattttcaatagagtaaaagaagcgtaaaatctttccaactcaagcgtaagataagcaacgcctcaatgttcaaaaatataaaatcctattggtaacccgtaaagaaggcccaaatggaaagagaggtaaaccatgttcatgaatcagaaaactcaatattgtaaagacgtcaattttcccaaaactgattgatagctataataaattccccaactatcaagtgcatcattgttgttggaattgacaagctgtattttaaaacttatatgggagaaaaccctttcatgaaaatgcaaagagccagaacagtcaagacactctcaaagaagaaaaataaggtggaaaagncgtnccagnaccaagctgtcttcataattgataataatcgaacgcgtgcgtctctcngacgatccatcggtcctgcatgcgctcatc

SEQ ID NO: 157911 - DNA, 388 bp, Homo sapiens
  misc_feature (1)...(388): n = a,t,c or g
atccatgaagaaagtagaaagatctaaaatcagtattctaagcttccacataagaaaattagaaaataattaaatccaaagtaagcagaagaagagaaataaaaattggagcagaaatcaatgaaattgaaaacaggaaataaatagagaaaatcaatgaaaccaagagttatttttgagaagatcagtaagcctctagccaagctaataaaagagaagacccaaattactaataccagaaacagggcatatnnnnnnnnnnnnnnnnnnnnnnnnnnnnnnnnnnnnnnnnnnnnnnnnnnnnnnnnnnnnnnnnnnnnnnnnnnnnnnnnnnnnnnnnnnnnnnnnnnnnnnnnnnnnnnnnnnnnnnnnnnnnnnnnnnnnnnnn

SEQ ID NO: 157912 - DNA, 1735 bp, Homo sapiens
atggagccacagggactggatttgccctgccagtggttttcagatgttgaatgtaggcagtgtaggacagattcttcggaaaaaactaatgacatacgccctgtgattgctgcagcttactgtctggagagattcaagactgctgtgcagagagggagcacccaaatagagcctggcagtcttcctgagtcacggagacagagttcagaatttgagaaggccaagacctgccagctttttataaatgctgcagttgactctcctgcaattgattaccacatatctttagcccagagtgctttgcaaatctgcctgacacatcctgagctgcagaatgaaatttgctgtcagcttattaaacagacaagacgaagacagccacagaatcaaccaggaccattgcagggctggcagctcttggcactctgcgttgggctcttccttccccatcatcctttcctgtggctcctcaggcttcacctaaagaggaatgcagattccaggacagaatttggaaaatatgccatttactgccagcgttgtgtagaaagaacgcaacaaaatggtgacagagaagcaagaccctcaaggatggaaattctttcaactcttctccgaaacccttatcaccattctttgccctttagtatacctgtgcacttcatgaatgggatataccaggtagttggttttgacgcatctaccacagtggaagaatttttgaatactttgaaccaggacacaggaatgaggaaaccagcgcagtctggatttgcgttgttcactgacgatccttctggcagagatttagagcattgtcttcaaggaaacatcaaggtgaaaccaagtccttttcaggagccaagcccaacgaacagcaaagaagctactctttacaagaagagtaaactttgcaagaagtttaattcaggagttttccaaaactttaaccaatctaatctccacgataagaaaaaaaaaatgcaggactttgttaaacccatagaattcttaatacacaatctctacatatacacattccatattaaagagaggaaaggtgttagtaatggaaatgatactctaagtattaggataataagggtagatatgtaaaagggctaataaaagggctttccatttttttccatttattcagcaatacttactaagctattttattgtatcccaggggctggctggactctgtggggaatacaaaaggaccagaaatagtccctgcccacagtgaacttaaaatttgcttacggaagagcagctttatacacagataaccttgaactagggttgaaagtgatgaaagttttgagagtgctgtgaactttggcacagaaagagagagtttaagttcagcattgggaagtttagggaaaggccctgagctggaaatgaaaaatggtttaggaaacagaccctgtgtcccgggtgcagtggcttacgcctgtaatccaagcactttgggaggccgggtcaggtggatcatttgaggccaggagtttgagaccagcctgggcagcatggcaaaaacccatctctactaaaaatacaaaaattagccaggcatggtgccacacacctgtagtcccagctactctggaagctgaggcactagaatctcttgagcccatgaggtcgaggctgcagtgagccgtgatcacgccactgcactccagcctgggtgacagagcaagactgtctcacaaaaaaaaaaaaa

SEQ ID NO: 157913 - DNA, 252 bp, Homo sapiens
tgaggtgatgtggaatacatttcaaagttgttccatccagggggtgaacatattgaagcatttatagcctggctcccatccgtcactggctgaggaatggtcccagggcatcaactctctggcttttttttttctttttctttttcttttttagacacagtcttgctctgtcacccaggctggattgcaatggcatgatctctgctcactgtcacctccgcctcccgggttcaagcgattgtcctgcctcag

SEQ ID NO: 157914 - DNA, 670 bp, Homo sapiens
  misc_feature (1)...(670): n = a,t,c or g
ctttccgttaagcaaaatttccaaccggcaaggtattgcggttggttttcccccttttccccttaaaannnnnnnnnncccctaaaggctttaatttttggagggaggttgggcccattttttcccccccccaaaaaaaggttcctttccaaaaattcccaaggagggttttaaaacgccccccaaaaggaaaaaaatttttccttcccatcccccgttaaatttgggccccccaagggatcttttaaaagggcccccccnnnnnnnnnnnnnnnnnnnnnnnnggaggtaattaacatttattgttcccctttcagggaaggtcatgggcgtagatgatcaaaggtcagttcctggtcaacagaagtaaacaagcctgtttaagataaattcccccacactccctcgtacctactccttgccctctgcctcagggttatagaacagctgtctttagctattctcctccaaagctatgcagagccttccaacctttcagaaggcctgctcctttccctatagcttctcccaccactctgaccaatctcctacacttgtggccccctttttcttcccttgcctcatgaggagctctgacaagttgatgaatgatgtccctgctcctgtgtttctacccagcttcaagggaaaccatgcttgctcttctaga

SEQ ID NO: 157915 - DNA, 338 bp, Homo sapiens
ggaaaatggatggtgctggatagctacatatggaagaacgaaaactggattcctatctctcactacatgcaagagttaactcaagagggacttggatctaggaactgaaaccatggaaattctggaggaaaacctgggggaggttcttctggacattggcctaggtaagaatttatgactaagacccccaaagcagattcaacggaaataaaaataaatagataagacctaattaagctaaagagctagtgcacagcaaagaaatcctgaacatagtaaacagacaatccacagaatggaagaaaatatttggcaactatgcctctgacaggactagt

SEQ ID NO: 157916 - DNA, 345 bp, Homo sapiens
  misc_feature (1)...(345): n = a,t,c or g
tnnnnnnnnnnnnnnnnnnnnnnnnnnnnnnnnnnnnnnnnnnnnnnnnnnnnnnnnnnnnnnnnnnnnnnnnnnnnnnnnnnnnnnnnnnnnnnnnnnnnnnnnnnnnnngataactctatgcccacaaatttaataatttagatgaaatggaccaattccttcaaagacataatacgccaaaactcatacaagaagaaacagacttactgttattaaataaattaaatcaatagttattaaccttccaaaacagaaagcatgaggtccagatggattcagtggtgaaatgtaccaactattaaaggaagaaattatctataatgtattttagaggacagatgt

SEQ ID NO: 157917 - DNA, 353 bp, Homo sapiens
  misc_feature (1)...(353): n = a,t,c or g
tnnnnnnnnnnnnnnnnnnnnnnnnnnnnnnnnnnnnnnnnnnnnnnnnnnnnnnnnnnnnnnnnnnnnnnnnnnnnnnnnnnnnnnnnnnnnnnnnnnnnnnnnnnnnnngataactctatgcccacaaatttaataatttagatgaaatggaccaattccttcaaagacataatacgccaaaactcatacaagaagaaacagacttactgttattaaataaattaaatcaatagttattaaccttccaaaacagaaagcatgaggtccagatggattcagtggtgaaatgtaccaactattaaaggaagaaattatctataatgtattttaaaggacagatgtagagggaa

SEQ ID NO: 157918 - DNA, 458 bp, Homo sapiens
cgaagagtcgagagatcaccacactggccaacaaccagtgcatggctacagagagcgtggaccatgaattgggccggtgcacaaacagcgtggttcaagtatgagctgatgcgcccctccaacaaggccccgctcctcgtgctgtgtgaagaccaccggggccgcatggtgaagcaccagtgctgtcctggctgtggctacttctgcacagcgggtaattttatggagtgtcagcccgagagcagcatctctcaccgtttccacaaagactgtgcctctcgagttcaataaacgccagctattgtccccactgtggggagggagagctccaaggccaaagaggtgacgattagcttaaagcagacaccacctcgaccgtggacaccagtccccgggcaagaataaggctcgtccctggtaggcagggccgacaccacaccgggcagtggtgcccggcg

SEQ ID NO: 157919 - DNA, 476 bp, Homo sapiens
agagtgtccccctgtagacctgttagagtgctggaattcctgcagtaaatgcacaacccggacggaagtgcctctccgacagcagatccaggctcggagctccagacgctgggacaggccgcccgcagaccacccccgccgcgcgcgggacacgacgccccccgcaggacacgcccatcagcccggaaacccctgagctgcttctcccggaggccgatgcccacccgggagcccccaaagactcgcggctcccgggggcacctgcatactcacccgcctgggcctgggcccccgctgcagggactggcgccccgaggcctcaaaaccagcgccccccgccctccgtgccagccccagccgggaccccacaaggcaaagaccaagaagattgtgtttgaggatgagttgctctcccaggccctcctgggcgccaagaagcctattggagccatccctaaggggcataagcctaggcc

SEQ ID NO: 157920 - DNA, 819 bp, Homo sapiens
atggacgaggcccagccccaggaggccctaggagcctccgactggcagacttgtagccgaacacagtgccttcagcgatgtaaggccaggtcacagtctgatcacttcaaaggagaactgggcgtgtcctctccgcgtgtccacccacaggccgcccgcagaccacccccgccgcgcgcgggacacgacgccccccgcaggacccgcccatcagcccggaaacccctgagctgcttctcccggaggccgatgcccacccgggagcccccaaagactcgcggctcccgggggcacctgcatactcacccgcctgggcctgggcccccgccccagccgggaccccacaaggcaaagaccaagaagattgtgtttgaggatgagttgctctcccaggccctcctgggcgccaagaagcctattggagccatccctaaggggcataagcctaggccccacccagtgcccgactatgagcttaagtacccgccagtgagcagtgagagggaacggagccgctatgtcgcagtgttccaggaccagtacggagagttcttggagctccagcacgaggtggggtgtgcacaggcaaagctcaggcagctggaggccctgctgagctccctgcccccaccccaaagccagaaggaggcccaagttgcagcccgggtttggagggagtttgagatgaagcgaatggatcctggcttcctggacaagcaggctcgctgccactacctgaagggtaaactgaggcatctcaagactcagatccagaaattcgatgaccaaggagacagcgagggctccgtgtacttctaa

SEQ ID NO: 157921 - DNA, 445 bp, Homo sapiens
ccgggtcgacccacgcgtccgagtaaatgcacaacccggacggaagtgcctctccgacagcagatccaggctcggagctccagacgctgggacaggccgcccgcagaccacccccgccgcgcgcgggacacgacgccccccgcaggacccgcccatcagcccggaaacccctgagctgcttctcccggaggccgatgcccacccgggagcccccaaagactcgcggctcccgggggcacctgcatactcacccgcctgggcctgggcccccggtgagccttgaccgggagggggtccccaggccgggcctctaggcaaaagatttagcccctgcagtttgagggactccggttttcccgacaccccgatttaactccagaccacgatttcctgtggcagctgcagggactggcgccccgaggcctcaaaaccagcgccccccgcc

SEQ ID NO: 157922 - DNA, 380 bp, Homo sapiens
tttcaacagaatctcacactgatctcggctcactgcaacctctgcctcaggttcaagtgattctcctgcctcagctgggatgacaggcatgtgccaacatgcctggataattttttgtatttttggtagagatggggggggttttaccatgttgaccaggctggtctcaaactcctggactcaagcactccatctgcctcatgttcccaaagtgctggggattacaggcatgagccatgcacctggccctaaaaatattcttttcttactgaacattagctgcttccagtgtactagaagtagattgccaaaccttttggcccaaagcaaattgtaaagacatttagctagggatgcaaaaacatctaagactcaaggtc

SEQ ID NO: 157923 - DNA, 504 bp, Homo sapiens
cttgattgagaaggggacaaaggaacaccagtgttaagaggattttccagtgtttctggcagttggtccagaaggatgcctccattcctgcttctcacctgcctcttcatcacaggcacctccgtgtcacccgtggccctagatccttgttctgcttacatcagcctgaatgagccctgggagggaacaattgaccaccagttggatgagtctcaaggtcctcctctatgtgacaaccatgtgaatgggggagtggtaccactttcacgggcatgggcggggagatgccatgccttacctttctttctttaccagaaaaccactgtgggaacccacggcacctgtctggctcaatggcagccaccccctataaggcgacggcattgtgcaacgccaggcttgtgccagcttcaatgggaactgctgtctctggaacaccacggtggaagtcaaggcttgccctggaggctactatgtgtatcgtctgaccaagcccagcgtttg

SEQ ID NO: 157924 - DNA, 375 bp, Homo sapiens
  misc_feature (1)...(375): n = a,t,c or g
gggtcatgcccaccagccccagtaggtttaaattccagatgaataatttttccaacgttcagtcaaattnnnnnnnnnnnntcaatagaatcgagaacccagaaataaagcttaacactgacagtcaactaattctgccaagataattcaactgggaaagaatagtcttttcaacaaatgttggtggaactggatattcaaatgcaaaacaatgaagttggaccctttccccataccagacaaaaattaactcattaagaannnnnnnnnnnnnnnnnnnnnnnnnnnnnnnnnnnnnnnnnnnnnnnnnnnnnnnnnnnnnnnnnnnnnnnnnnnnnnnnnnnnnnnnnnnnnnnnnnnnnnnnnnnnnnnnnn

SEQ ID NO: 157925 - DNA, 1094 bp, Homo sapiens
gctcctgcctctaatggcctggttaggctcatctcatccctcaaggtggccaccccagatgaagctcctgccttttggcagcctttagaggcccagctcatgcatctcattgcctcttgaagcccagctcattcctcaaaacggcctatccacgcccagcttttccctttggtggcttctccaggcccagaaattcctcagttcggcttcgcaaggtgaagttgctgcctccctgtgccttctccaggcccagttcttcctcccagctgggtctacagtcccatctcctgactcaaaacaacctattttggctcggctcctgcccagcacctggcggcctttgtaggcctaaagcttcctcaagtcaagcgttccaggcccagatcatgctgcccaggggccttcacaggcccagctactgcctgacgatggcttccccaggcccaggtcttgccttcccccagcctcccgaggcccagcccttgcctcacagttgctttcccagtccacgttacagcctgttacccgacggccttgacagaccaaactcttccttcacactggacagtttaggacaagctcatacgtcttccagcctctccaggtcaaagctcctgcctaacacttgcctctataggcccaggtgctgaatcggcaatggtctgtttaggtccatctcatgcctttctcaagactctccaagcgacgatctggcctgacacttgcttctgtgggcccatgtgatcactcacactggcctctttaggaatcaaggggatgcctctccacaaggccgaagatcctgcctgttgtaggcccccttcaggatgcgccgctgcctgacaagtggacccttccaggcctagatgttacgtgatcatggcctctgcaggtcaagaatttaaattttcgcagcctctataggccgagctactgcctcctgataatggcttctgcaggcccaaatcgtcctgaaataagcctcgccaggaacagcgcatgtgtgttggatgcccgaacaaccatagcttctcccgcacagtggcccatgggggccgggctcttgcctcgagcctggccacctcaggcccagt

SEQ ID NO: 157926 - DNA, 412 bp, Homo sapiens
  misc_feature (1)...(412): n = a,t,c or g
attaagaattaaacacttcacatgtaaaatctaattataatanaattaaaagcccatttaccttaattatctgttcaaatgctaaggcagattgtaacatcattggcctctgactttgaatcatttgttgatcaatagaattataaaaatgtgccacctacaaagtaaaagtccaattagtaataattaataacnnnnnnnnnnnnnnnnnnnnnnnnnnnnnnngaatgaaaatgttaacttttctcaatcctaaaatttaaacagaaaattggtttttcatctccaatagggcatttgttcatgtattaatacacacaatcaacaagtaagtgttgagttcctacaatttgccaagtcatgtcctgaggtctgattaaacatagactagaaaacgttgtccggaatcaag

SEQ ID NO: 157927 - DNA, 826 bp, Homo sapiens
cctcgtgaagaagacctgcgaagtccctctccaggctggaagattatatctggatcaccaccagagcaagccctttctgaagcttcattccaagacccatgtgtagagatgccccctggggattcagaccacgggaccagtgaccttgagaagagcttcaatctgagaccagtcctctctccgcaacagagagtgcccgtggaagcgagacctcgcaaatgtgagacacacaccgagagcttcaagaactcggaaatcctgaaacctcacagagcaaaaccatatgcatgtaatgaatgtggcaaagccttcagttactgttcttccctttctcagcatcagaagagccacactcggagagaagccctatgagtgcagtgaatgtgggaaggccttcagccaggagctcatctctcattcagcaccagaggattcacactggagagaagccttacaagtgcagtgaatgtgggaagagcctttcagccaggaatgccaacctcaccaaacaccaggcgaacccacaccgggaggaggaagcccttacaggttgcagcgagtgtgagaaagccttcagttgactgctcagctcttgttcagcatcagagaattcataccggagagaagccctacgaatgcagcgactgtgggaaggccttccgtcacagtgcaaacctcacgaaccatcagaggactcacaccggggagaagccctacaagtgcagcgagtgtgggaaggccttcagttactgcgcagcgttcattcagcaccagaggattcacaccggggagaagccctacagatgtgccgcgtgtgggaaggcct

SEQ ID NO: 157928 - DNA, 391 bp, Homo sapiens
taaaagtgaggaggtgtgtatgaagagaactcgattaagaggaatcataaagtgactatatgaaagttaagttttttccatcgtgaaagcgtaaatgaaattaagaaaaaaacaatagattgggaaaatatttgtaacacatacgaatgaaagcctgtaacatataaatagtttctacaaattaattagaaagaaattaatgacaaatagaaaaatggacaaaggctacaaataggcaaattgcagaagaggaaattcaaatagttaataaacatataaaaagatactgctcagcctcattcaggaaaaagcaaattaaaacaaaaaagagatgccacttttcaataactggcaaaaattataaagagtaaccatatctgcgccaggcacg

SEQ ID NO: 157929 - DNA, 414 bp, Homo sapiens
gagacagggtcttgttctgttactcaagctagagtgcagtggagtgatcaagctcactgcagcctcgatctcctgggcttgagcgatcctcccacctcagcctcctaagtagctggtaatttgaaatttctttcaggactttgcagcagcttgtgatcactggaaatatcttaggacaccaaaaaatcacaggtacaaatcacagatgatttatgctatacagtagttctttgtttgttttttgagatggagtctcactctgttgtccaggctggagtgcaatggcatgatctcagctcactgcaacctccacctcttgggttcaagcgattctcctgcctcagcctatggagtagctgggattataggcacccatcatcatgcctggcttacttttgtatttttgggtcgacg

SEQ ID NO: 157930 - DNA, 361 bp, Homo sapiens
gcaaaactggtgcctgaagctatcctggggctgcagtcagcccagccccctggagccccggggcctccccactgaggtccagtccagaactccaccttcgcctcagctcctccgcttcttccttggctctggctaaaaatgccctgtccagagcctcgcccagcccagcagcacaagactgccctctccttcacccctgctctggcccctcacctcttccccagggaggcaagcaagcccagtggctccaccatctgccagcaatgggacctgatgggggacatgctaacctctttgcgcttcagtttccccatcttgaaaatgaggaccacaacagtgcctcctcacgggatggatccgg

SEQ ID NO: 157931 - DNA, 363 bp, Homo sapiens
caaaaactgcatctccagtacaagtcaagttttgtgcaggagtggcgctgccaaatctaaagcagcgtcctttgagagaaaaggcacagcaatgcatttagcctctgctaatggccttcctgcaatacaggaagaattccttgtttctcatgtaacatacctgtcttgccaggacaaaaacatggaactgaggattattggtttgtacaggatttgagggctactaggcaaattttcaaagccatttatctggtgatacctgatgcttatacattattcatgactttaaccagtgagttgtactggtgtcagtcttgaatctgaaggatgccttcatctgtattcccctgagtccagagtccc

SEQ ID NO: 157932 - DNA, 368 bp, Homo sapiens
gatcctgcttgtttccaaactgtccttggctccttgagtgcactgaaattgttcatctgtgttctgttttccagggtcacaaagagtcggcagcattcttgggaaatcttggtagggttgggtagttgccactggtgtctggcttctgaaccccctgaaagctgtaggacaggaggaatatagtttaaagatggagggcccacggccagaggtaacttgtaggcatttgtaaactctcttgaagtggcccataaagacatgcgctcttcctgttccttctgtttcatctcgacttcatctaatatctgctcgatattcctcagcctatcatcattctcgtgcattattgtctgcataatctttagatc

SEQ ID NO: 157933 - DNA, 3102 bp, Homo sapiens
  misc_feature (1)...(3102): n = a,t,c or g
atggggtcttgtagtggaggagaaagactgggcacaagtccaaagtacagcatgggcaaatgggaatttgtagccaaggagcagtgtggagtcccctgtcctgttcaacttggtaccttaagaaatgactccctggaagctcagcttcatgagtatgtcaaacaagggaactatgtgaaagtgaagaaaattcttaagaaaggcagtcaacctcattcaccaagggttcactctttattcactgaggggacactagatcctcaggccccagatccatgtctgatggccagggagactcagaatcaagatgctccttgccctgctccatttatggcagaagaggccagcagccccagcacaggtcagccaagcctctgcagtttcgaaatcaacgagatctactcaggctgcttgattttggaagatgacatagaagagcctccaggagctgcttcatctttggaggcagacggacctaaccaggtagatgaactgaaatccatggaagaagagctggataagatggagagagaggcgtgttgttttggcagtgaggatgagagctcttcaaaagctgagacagagtactcttttgatgactgggactggcaaaacggttcactcagttcactcagccttcctgagtcaaccagagaagccaagagcaatttgaacaacatgtccacgactgaggagtatctcatcagtaagtgtgtgctggatctaaagattatgcagacaataatgcacgagaatgatgataggctgaggaatatcgagcagatattagatgaagtcgagatgaaacagaaggaacaggaagagcgcatgtctttatgggccacttcaagagagtttacaaatgcctacaagttacctctggccgtgggccctccatctttaaactatattcctcctgtcctacagctttcagggggtcagaagccagacaccagtggcaactacccaaccctaccaagatttccaagaatggtaagagactttcaagggggacattttggcaaaagatccaggaaaagaaatggttgtggctggaaacctttcacccaagtctccaaagtaaacactggggatcagtcagagataagccatcagctgccgactctttgtgaccctggaaaacagaacacagatgaacaatttcagtgcactcaaggagccaaggacagtttggaaacaagcaggatccaaaataccagtagatcattgacggatattcaagacctgtctagtatctcctatgaaccagacagctcttttaaggaagcttcatgcaaaacacccaaaataaaccatgcacctaccagtgtcagcactccactcagcccagagctcttgaaacagcagcagggctcatccacggtgttgcatgagaacacagcaagtgatggaggaggcactgcaaatgatcaaaggcacttagaagaacaagaaactgacagtaaaaaagaagatagtagtatgcttttgtccaaagaaactgaagatcttggagaggacacagagagagctcactctactctggatgaggacctggaaagatggctgcagccacctgaggagagcgtggagctacaagaccttcccaagggctctgaaagttgctgtcagggcagcagttccagttcttcaggacctggacactatgcagtacccactcctcggggacccgagactggaccaagaacagaatcatcccgccattcctctccccatctaaagagccagaagactcagacactggcttcccatgcttcaagcagacaatggaaagttagtccacccagagaggaaagcagcaccgaagaggcagtgagagcaagtcagggcgccgaggtcgggccntcatgcttcatcaatcccagatgccaaatctactcatcagttgagttttcaagaccagaagaataacttacaatcacaaatcttagaagatgacccaccatccaaggtccagaacccccaaggagtcagagttccccgtaggattttgtcttacccaaaggatgaagcagtacaaactgagcccatccaaagaattacgactactagtgagatcagatctccaaggagtccctctctcctagagcacggaagcagctgtgtctcctgcagactatcagacagccccagagaagggtccctgtagaagaatcagaaacaggtccttacggtccaattccttcaaaacccaaggccttgtataggaatatgaacttggactcattgctcaaactctctgtccttaaagattctgatggtgtacaccgagtttctgcacgggtagaccctgagtctcttcataagtattctgcctatcctgaaaccaagccctccgcaaaggtcttagtatcatcacaggtggagtccaacgtgaggaccccaatccgaggaaacagcgaggttggccgcagggtcaccatctccccaggggtacagtcagtagagccaactcaccatgtgacagttccatcagtgtctgagggctcccacaagtcatccatgtttgttactccagagcccatctataaacagcaaacccaaaaacccccagaaattacttacatgtcccaaggacctacacccaggtatccagaactctcgcaaaagccctccatccatgcagaactggaactgacccctaggcccttgcctcctcggtccttacctaggtacggacctgactcctcatggtggcccttgctgaatcctgaagttgaaacaccccaaagccagctgacaacaccggattttgagcctaagtgctctccttccctagatcttttattgtccggttttaaaatagactctagccctttctgtgaggatctgaagttccagagagagaaggcaagcctatcaccaccatcaccaccaaaggagtttccaagttgggcaccactgagtgaagtgccacagacccccaagcacacctgcaaacaacccattcaaaggtttactgctttcttcctggcctggggcattccagaaaggggtcgcttttttgggttacacactatttgggtcctcaacttggaaaaactcaaggtggactctgctgtcagcagtcccgtgtcctga

SEQ ID NO: 157934 - DNA, 707 bp, Homo sapiens
cctcactacacattagataattcatgctggagagaaaccctacaaatgtgaaaaatgtggcaaagcttttaaccaattttcaaaccttactaaacataagataactcatactggagaaaaatcttacaaatgtgaagaatgtggcaaagcctttatccagtcctcaactcctagtaaacataattaatgatggagagaaaccatacaactgtgaagaatgtggcaaagcttttaaccaggcctcaaacttatattgaacaaaataattcatacaggagagaaaccctacaaatgtgaagaatgtgacaaagcctttaaccagtcctcaatttttactaaacataagaaaattcatactggagagaaaccctatgattgtgaaaaatatggcaaaggctttaactagtcctcagttcttaacacacatacgataattcttactgcagagaaactctacaaaccagtaagatgtgacagtgcttctgacaacatctcaaacttttctaatcataaaagaaatcatattggtgagaaatcctagaaatgtggagaatgtaacaaagtatttaaatggttgtcacacttgattataggtaatattcatattggaaaaatttcctacaagtaagaacaatgtggcaaagtttttaactaatacaccttattgcacagaaaatcatttatatttgagaaaaattgtagaaata

SEQ ID NO: 157935 - DNA, 681 bp, Homo sapiens
  misc_feature (1)...(681): n = a,t,c or g
attgttacagccgaccaattactgggaatgggccagtgggctgcaattcgaaaccaaactatgctaaatgatgaggttattgaacaactgtggaaatgctgcttagatgcttgggacaagattcaagatgatgacaaactatgcccatgtttttaacagccgtcagacggggnacaaacatgaaaccgtatcccacactttaattgccccatcttcaaagacgcagcagaaaaaagctatccctgaatagccagggccaatgacttgttatagaacttaatggcttatgaacaagtaaatcccagactgttcaggtggctatttgccccattaaaggcaaaattccaccagggggtgatgtactcacctcatacattaaagtctgtgaaggcgtgaggggaactctgcgtacagcaatggtcatggcacaagccatggtctctattcgaatgcctggacaattccctggcaaatgcttcctatgcagccaatcgggacattctaaaagaaattgtccttggcatacagaccgctgttcttttcaacaccaacaaccaaaattttttcaacaacaagccccactttctactatatgcccacgatgccaaaaaggaaatcactgggtggctcaatgccattcaaaatttgatattgatggcaatcccttacggtcacttccag

SEQ ID NO: 157936 - DNA, 352 bp, Homo sapiens
cagtactgtaaaaggaccatgcagcatgtgtaggacaatacatcatgtgccacacatcatgggattcatctttggggtgcaaggatggcatgacatgtgaatcaattaatgtgaaccattccgttaacagaatgaagaataaaaatcacatgatcattttaatgatgcagaaaaagcgtttgacaaaacgtaatagtctgtcagtataaaaactcaaaaaactagaggtaaaaggaatgtacctgtacataataaaggtcgcatatgataggctcccagctcgcattatagcagatgattaaagagctgaaagttttcctctaagattaggaaaaagatgaagagtctcccc

SEQ ID NO: 157937 - DNA, 358 bp, Homo sapiens
gtctttcagtcattctttaaacatagaaaccagaaggtaccagaacctcctcctttatcaaaaacagaaaaaacctatttgctcagctggctgaaaacattgctagctgcctagatgattcttcatgttatggttataaaaaggctaacataagagaccaatggccttgagaagcaaaagagctaatgcctcaagataactttaactagctctttccccaaacagatgccacaaggtcaagcatctggctcttaaaacttctatcattaaaaaataccatgttactcactatgaaaaagctctgaagacacatgaaaaagaactaacctgcttaaggcatgacagagttggtacatgt

SEQ ID NO: 157938 - DNA, 812 bp, Homo sapiens
gtgggaggccctgtgccagcagaaagctgcagaggcagctcccccaacccaggaggcacaaggggaaacggagcctactgaacaggcacctgatgccttggagcaagcagcagacacttctagacggaacgcagaaactccagaggccaccacacagcaggaaacggacactgatctcccagaggcccctccaccccccctagaacctgctgtcatcgcacgccctggctgtgtaaacctgtccctccatgggattgtggaggatcggaggccaaaggaaaggatctcttttgaggtgatggtgctggccgagctgtttctggagatgctccagagggattttggctatagagtttataagatgctactgagccttcctgaaaaggtcgtgtccccacctgaacctgagaaggaggaggcggccaaggaagaagccaccaaggaggaagaagccatcaaagaggaggtggtcaaggagcccaaggatgaggcacagaatgagggcccggctacagagtcaaaggccccgctgaaggaggatgggcttttgcccaaaccactctcttctgggggagaggaagaagaaaaaccccggggcgaggcttctgaggacctgtgtgagatggccctggacccagaactgttgcttctgagggatgatggagaggaggagtttgcatgagcaaagctggaggattcggaggtccggtccgttgcctcaaaccagtcagagatggagttctcttcacttcaggacatgcccaaggagctggatccctctgctgtgctccccttagactgtctgcttgctt

SEQ ID NO: 157939 - DNA, 1826 bp, Homo sapiens
cgccacgtttataaacgaatgtcatctatagtgggggctagtgttagcacctactcagtattcattgaatggatgcacatgatttatttacccagttctccatctgcactctatcctaaattttcttggaatgaacatccttctacctacacctgtgtgtttgttgcgatcaatttctagaaatggagcagctggctcaaaggctttgctttaagcttccatagctattgccagttctcctgaagaggctgtgcccgttctgctataaccagtggggtgtggagaccttatttcgccgtgccgttgccaacactgttagccgactttttcatctttgtctgtctagttggtgacacatgataatgtgggtttgcaatttctttaattgtaagtgaggattgagcatattttcctggcctctaattcttatgtatttctcttaagaacctattgatgtcaattttccgttttaggcttttgaactttttgttactgatttgtgagttcctttatattaaggcaatgacccatttctctgtcatgtgttataagtgttttcttttttccctttcccagtttgacttttgccatctagagtttgtaaattaagtggtcagatctgatctagcttccttgagaggtgccttacttcaaaagttctcagactgaaaaaaaattcgcccattttttcaaatctttgatggtttcatttcgaatgttttagtctttgctcagtctggattcccttgctgtcttcctgtagccccatctgtgacttcctagtaactcaaggcggcggttaccgcaggcctcgaggtcccctcagatgtttcagaccgggcatttgagtaggctatcagccttccccctgagacagcccttattccatccatcatccaaggcggatccaggtctcttctgaaaagggagggcagctccagacgctgggtgctggagcccatcactgcagacagtgaccccgcttatagttcaaaggtactgctgctctcttccccggggttggaggaattgtatcgttgttgcatgctctttgtggatgacatggctgagccaagggagacgccagagcatcctctgaagcagattaagtttttgctgggcaggaaagaagaggaggcagtgctggttgggggtgaatggtctccttccctggatggcctcgacccccaggctgaccccgcaggtgctgggtgcgtaccgccatccggctgtgcgcaggcccagaactgggcattgatttgagcggctgttaccaagtggtggcgctttgccgaagtttcagtacctgcagccggggacccccccggcgggcttcagacagtggtggtgtacctgccgggatgtctggaccatcatgcctactttgggaggaagtgggaaggccctggtgccaagcagaaagctgcaagaggcagctcccccaacccagggaggcacaaggggtgatggtgctggccgagctgtttctggagatgctccagagggattttggctatagagtttataagatgctactgagccttcctgaaaaggtcgtgtccccacctgaacctgagaaggaggaggcggccaaggaagaagccaccaaggaggaagaagccatcaaagaggaggtggtcaaggagcccaaggatgaggcacagaatgagggcccggctacagagtcagaggccccgctggtgagtaccctgccacctcgggctgtcatagtgcttaccgtgaccgcgcacctttaccccgggctctgttccgagcgcttcctgtgccttagctcattccctgcacccttgctcggcatggactga

SEQ ID NO: 157940 - DNA, 359 bp, Homo sapiens
  misc_feature (1)...(359): n = a,t,c or g
ggaaatggaaaaaccggtccttatattcatatgaagctacaggagaccctaaatagccatacaatcttgannnnnnnnnnnnnnnnnnnnnnnnnnnnnnnnnnnnnnnnnnnnnnnnnnnnnnnnnnnnnnnnnnnnnnnnnnnnnnnnnnncgttaacagtagccatagagaccaatggaatagaattgggggtccaaaacaaatgcatacatctatggccagttggtttttggcaaggaggccaagtttatttaatggagaaagaatagtctcttcaataaatgttgctgggaaacaggatttccttacaaaaaagaatggagttggattcctacctcacagcatatgtaaaaatt

SEQ ID NO: 157941 - DNA, 495 bp, Homo sapiens
  misc_feature (1)...(495): n = a,t,c or g
aagaaaagatattctgtattcatgggcaagaagatttaatattgttaagatgttaatgctactacccaaagcaatctacagattcactgtaattcctatatttcttttgcagaatgattaaacagcattttttgcagaaatggaaaaacctgtccttaaattcatatgaagctacaggagaccctaaatagccaaacaatcttgannnnnnnnnnnnnnnnnnnnnnnnnnnnnnnnnnnnnnnnnnnnnnnnnnnnnnnnnnnnnnnnnnnnnnnnnnnnnnnnnnncgttaacagtagccatagagaccaatggaatagaattgggggtccaaaacaaatgcatacatctatggccagttggtttttgacaaggaggccaagtttatttaatggagaaagaatagtctcttcaataaatgttgctgggaaacaggatttccttacaaaaaagaatgaagtgtggattcctacctcacagcatatgtaaaaatt

SEQ ID NO: 157942 - DNA, 359 bp, Homo sapiens; identical to SEQ ID NO: 157940
  misc_feature (1)...(359): n = a,t,c or g

SEQ ID NO: 157943 - DNA, 495 bp, Homo sapiens; identical to SEQ ID NO: 157941
  misc_feature (1)...(495): n = a,t,c or g

SEQ ID NO: 157944 - DNA, 399 bp, Homo sapiens
aatgtactcatttgggaagattgcattgcaggacaggcagaggtgctgcatgattcctatggaatcattattgattggtcccctaaggggatgtttagcatgaattgcacctctcagtctgtgtccatggccacactatgttcagcttgtctgaacagaacgatcagatagcagaaatgataagaagtacggcaagagttcctattatctggaaacatggcagtatagtggcacctcaacctcaaatgatatggcctgctgtaggagctaaacataaggatttgtggaaactattaatagcttttgataagatcaagatttgggaaggaaaatatactatgccatcacaatataatcctaattacattttagaacttgttgaaaacaatacaatttgga

SEQ ID NO: 157945 - DNA, 358 bp, Homo sapiens
  misc_feature (1)...(358): n = a,t,c or g
cattattagtattgcaatacaataatagtaggggacttcaacaccccactctcaggaatggacagatcatccagatagaaaaccataaagaaacatcagagttaaactacacagtagaccaaagaagcctaactgacatttacagaacatttcacccaaataatctaatgatacacctcaaggaactagaaaagcaaggacagaccaaatccaacattaatannnnnnnnnnnnnnnnnnnnnnnnnnnnnnnnnnnnnnnnnnnnnnnnnnnnnnnnnnnnnnnnnnnnnnnnnnnnnnnnnnnnnnnnnnnnnnnnnnnnnnnnnnnnnnnnnnnnnnnnnnnnnnnnnnnnnnnn

SEQ ID NO: 157946 - DNA, 348 bp, Homo sapiens
  misc_feature (1)...(348): n = a,t,c or g
caattttggttttattaattggccactttaatgtaatggaaaatgggccaattgcctggaagaccccaacttccccagctttcacaagaaaaaatacttagcctaaatagccctaatgttttcnnnnnnnnnnngttgaaatagtagtaaaatatcttgccaaagaaaaaaagaccagattgcttcactcataaattctaccaaacatttaaggaagaaataatcccatttctcaaaactcacctaggaatttgaaaagaaagaaattctacttaagtcattcttatgagggcagtgttgtctaggcagcaaaactaaatgcagacattaacaagaaaactacacacc

SEQ ID NO: 157947 - DNA, 358 bp, Homo sapiens
ggtgcaggctgggaggtctcaaaggcaggtctcgtgagcagggggctgtgatcagggagggagaggacacactaggattgagactgaggcagggaggccagcggggagtctaagacagcaacagaggagaggacgtccgtggctgaatccggtccctggaaagcatggggtgccgactggggaggagcactgggctggagagccagcagggtgggggggctctgtgtcagggcaggctggctgagcagagtccaggctgagcagctctgggcacagtgggcagaaaggaggggcagtcatgcttctggctgcagacagaagaaggggacagagaaggagaggagggagcgggtaggag

SEQ ID NO: 157948 - DNA, 380 bp, Homo sapiens
  misc_feature (1)...(380): n = a,t,c or g
ctgtctcaaaacaaacccaacccaaccnnnnnnnnnnccaaaaaaaggcctaaaaccataaaactccagaagaaaacataggagaaaagctttatgacattggtttgacaatgattttctggatatgacaccaaaagcacaggcaatgaaagcaaaagtagacagatggtatggcatcaaactttaaaacttgtgcacatcaaaggaaacaattaacagaataaaaataggcaacctatggaattaaagaaactaatggcaaatcatatatctgataagcggtgnnnnnnnnnnnnnnnnnnnnnnnnnnnnnnnnnnnnnnnnnnnnnnnnnnnnnnnnnnnnnnnnnnnnnnnnnnnnnnnnnnnnnnnnnnnnnnnn

SEQ ID NO: 157949 - DNA, 355 bp, Homo sapiens
  misc_feature (1)...(355): n = a,t,c or g
ccnnnnnnnnnnncaaaaaaaggcctagaaccataaaactccagaagaaaacataggagaaaagctttatgacattggtttgacaatgattttctggatatgacaccaaaagcacaggcaatgaaagcaaaagtagacagatggtatggcatcaaactttaaaacttgtgcacatcaaaggaaacaattaacagaataaaaataggcaacctatggaattaaagaaactaatggcaaatcatatatctgataagcggtgnnnnnnnnnnnnnnnnnnnnnnnnnnnnnnnnnnnnnnnnnnnnnnnnnnnnnnnnnnnnnnnnnnnnnnnnnnnnnnnnnnnnnnnnnnnnnnnn

SEQ ID NO: 157950 - DNA, 2088 bp, Homo sapiens
ctaactctcttccccatcccagggacggggggccgactctgctctggcgagttttcgggcactcagcttcctcctcagggaggagaacttgtcccccagcaccttgcgcagccccacgctgtccctgctgctgggtgggtcctgcctggtggccgggagctggcccgtgaacatctcccagcggtcgagggcgtccacggctctgtccacctgcaccaggtcctcctctgccacttcccgctgcagggcctggatgcacatggccagccaccgttcatgctccttgatggcctccgcagggcccccaggtggcagcggagcctctgaggctgccaggtagctcagcccttcctctggccccgaggcgaaggtgtgactcccggcatcaggggtgaggggctccgacacactggtgccgggctccgagtcactctcacagcacatgcccgagtcggcgctggcaggcggggtgtcctcccacactgacggctcccccgcctcctggctgggccacgtccccaccaccgcctgagtccaggtgtagagtctctggtacctctcgatgagcctgaaacccaggacatgctgcagcttcctcaggcagatgggacagaggtccaggggccgccgcagggcctcgtccaggctgagcgcaccctgcatgaggcagcggagccagcggcagttccccaggcccagaaggtggcagagctcgtggcacgtgaccttgcagcactgaaccatccccagggcactgaagcacagggcccagcccctgtcctgcaggggggcctcggggccgtctgctgctgcctctaccagggccagatcaggggcgctgggccccgacttcgggaattcccctgagaaccgggcgaagctgcagacgcccacttcgtgccctggaaggaacttgctgaaggtgaagctccaggcctcatgggggtacaggtcagacagtgtgaggcccagcacacacagcgcgtcccctggcttgttgttcttcaagaaggacaggatgccgtctgtgtggagctggagcctgtcagagtcccggctgggccgcgaggagcagcggatggacgcggctgccaccgacggcaggcacttgacgcgcaggcccaggaagaaggcctctgtgcagctgcacagctggtgcagcagggagcttcccaccggctcctcgctcaggtcagggacagggacttctagggttagcgccaggcactgcagctgagcaggcagcacacagagccgagccacctcgctgcaaaatgccagcctgaccggcccctgtgtttcaacaacatgcccatgtgtcagtgcgtcagagcttgggacaccaggctctgagccattagcagggaggtggagggaagcgggtagctcccaagctgttggattggctgctgtggggtggtggatgctgagaccaacggacacccgcaggatttgggtcctgaggggcaggaaaggggctgcgtggaccaccagggctggtgacaagcctatcggctgtaggtagatgtgcttccgagccaggcggggcttccggtgctgcagggaggcgtggaaggtctggaagtcctcgggagcctcgggtcggctcaggagccagtcgaagcccgtgcggatgagcagggtgcagaagagcgtcctctgcgggttgtaggcctcggccaggaagagccgctcggcaggggagaaggcggacacatacagctgctgcagggctgcgtcagtggagaccagagcgtccttcaaggcccggggcccgaagctgaactcctgtgcgggtctacactgcagcatggtgggcgggcagggcctggccactcctgggagcccctgctgctgtccatgggccacccgggggacggccacggtctcgtccagaatcttccctcgggctgatccgagtggctaccgggggctccctgcagacagacactggtccaagggcccttaaggcccagctctgcctggtcctggacgctctcaggcatgggcgcttctgggcccacagcaccctcgcagtcccgcgcccgccggagccggcagaggccgcgccgggcaccgagcacgaaa

SEQ ID NO: 157951 - DNA, 301 bp, Homo sapiens
gatatggctggcatctcggaggagcttcctttgccctgttatgagcaggccatcaccactggagaaaaggcccagaagcaccaaggcatgagatgtgcccagggagcagtaagaatcaggggctggtgcagggcctggcaggaggctggggcacaaaggggaagattctgaagggctctgagcaccagtcctggggagccggggtcagggcagatccacctgaagaaagctggcacatgctgtggtgggagctcaaaagacagaggggtaagaaactactcagggaggctcctacgaaggc

SEQ ID NO: 157952 - DNA, 1146 bp, Homo sapiens
atgcaaagcccgattgcaagaaagaattttgctgaaaatatttctgcgctggctgatgcggaaaatatttcacgtaagattattacccgctgtatcaacaccgccaaattgcctaaatcagttgttgctcttttttctcaccccggtgaactatctgcccggtcaggtgatgcacttcaaaaagcctttacagataaagaggaattacttaagcagcaggcatctaaccttcatgagcagaaaaaagctggggtgatatttgaagctgaagaagttatcactcttttaacttctgtgcttaaaacgtcatctgcatcaagaactagtttaagctcacgacatcagtttgctcctggagcgacagtattgtataagggcgataaaatggggctacaggataactatgaagatatggctggcatctcggaggagcttcctttgccctgttatgagcaggccatcaccactggagaaaaggcccagaagcaccaaggcatgagatgtgcccagggagcagatctggctctgaaggggctacgtgttttgctcgtggaaggtaacgacccccagggaacagcctcaatgtatcacggatgggtaccagatcttcatattcatgcagaagacactctcctgcctttctatcttggggaaaaggacgatgtcacttatgcaataaagcccacttgctggccggggcttgacattattccttcctgtctggctctgcaccgtattgaaactgagttaatgggcaaatttgatgaaggtaaactgcccaccgatccacacctgatgctccgactggccattgaaactgttgctcatgactatgatgtcatagttattgacagcgcgcctaacctgggtatcggcacgattaatgtcgtatgtgctgctgatgtgctgattgttcccacgcctgctgagttgtttgactacacctccgcactgcagtttttcgatatgcttcgtgatctgctcaagaacgttgatcttaaagggttcgagcctgatagtgccctcaccaagtcttggcccttgtgtgaattcctgcctttcccagaaatgagtccagggtgtctgaccgcagcttcagatcccatgaaggattcttctaacatctgcgatctaaccttccagtga

SEQ ID NO: 157953 - DNA, 786 bp, Homo sapiens
tcacatgctgcattcaggctgctggcacagggggttctggagctccaggcctggcaagcgtggtgggaggagcagcacctttgtggtcttctttttgaaactctctgccttgacaaataagatttgccctggttccccttcctggctgcagagccccaggaacttttccagcttcctctctattcgcagtggcccttcccggggccgcagcgctgggctcgcagcctggccaggggagaagagggcgtcggcgtcctcgccccacacccccagccgcccacctggccggggcgccacggggaacagagcccccgccggcaccatggagtaggtcatcatcatcagcatgtcatggctctcggcgcggatatgcggcgcgggctcgccgctgtggctgcgcttgttgcgagctgagctggccgggtcttggggtggtgcggacgccccgcgcggcgcgcggctcaactcggccaggaaggagcgcagggcactgtcctcgcgctgaatggcctttttttcttcccttccaggcgtcatggttgctaaatcaaaacattgtcctaatccctgtaagacgtctacatatccatcaggattatctaataattttcctaggtccggtttgatctgttttaagtaatgcccctggttatgatttttggtgtggagtttggctgtgacagttgagatagacagatatgcagatatacactgattcgtctttttcagggattccataaatgcatactcggttaggacaacaggcttcataatgggagggaccat

SEQ ID NO: 157954 - DNA, 1482 bp, Homo sapiens
atggcccgaggcgctgagggaggccgtggggacgcgggttggggcctgcgtggcgccctggcggccgtggcgctgctctcggcgctcaacgctgcgggcacggtgttcgcgctgtgccagtggcgcgggctgagctcggcgctgcgggctttggaggcgcagcggggccgggagcagcgcgaggacagtgccctgcgctccttcctggccgagttgagccgcgcgccgcgcggggcgtccgcaccaccccaagacccggccagctcagctcgcaacaagcgcagccacagcggcgagcccgcgccgcatatccgcgccgagagccatgacatgctgatgatgatgacctactccatggtgccgacaggtcatcgaggtttggagaggttgaacatcctgtgcaaggtcacacagccaatccgagtgatggtggacctgtgcaacagcaccaagggcatctgcctcacagataccatctacacctcctggtttgacattcaagaccttctggaccaccaggggctacaggataactatgaagatatggctggcatctcggaggagcttcctttgccctgttatgagcaggccatcaccactggagaaaaggcccagaagcaccaaggcacgagatgtgcccagggagcaatgcatgctcgagcggccgccagtgtgatggatatctgcagaattcgcccttcaggacagagtggggtggaacaagattacatcacactacttagagcaacatgcaaattaaatcttatgaatcatttctggaagtttccactcatatcaaatgcctatgtcattcactcacttcgtctcatcacacaggcattttatcaactcacatcatcacaagaagggcattttatcaactcacatcatcacaagaagggtgttctccgatttgtccccatgggctgttttgaggaacggctctattgttcgaaacaccatggcatgtgccacggtacttgcgaccatcgatgtgctcatggaccaaggatgatcggccctacttccggctcgctgatttatgccggttttaccctggggatgacggttggacgcttcaccggcggttggttcatcgaccgttacagtcgcgttgccgtggttcgggccagtgcactaatgggggcgttgggtattgggctgattatttttgtcgatagcgcgtgggtcgctggggtgtctgttgtactctggggactgggtgcctcgctgggcttcccgctgaccatttctgccgccagcgataccggccccgatgcaccaacccgcgtcagtgtggtagcaacgaccggttatctggctttcctcgtcgggccgccgctgctgggctatctcggcgaacattatggattacgtagtgcaatgctggttgtactggcgctggttattctcgcggctattgtcgcgaaagccgtcgccaaacccgataccaaaacgcagacggcgatggagaatagttga

SEQ ID NO: 157955 - DNA, 1431 bp, Homo sapiens
atggcccgaggcgctgagggaggccgtggggacgcgggttggggcctgcgtggcgccctggcggccgtggcgctgctctcggcgctcaacgctgcgggcacggtgttcgcgctgtgccagtggcgcgggctgagctcggcgctgcgggctttggaggcgcagcggggccgggagcagcgcgaggacagtgccctgcgctccttcctggccgagttgagccgcgcgccgcgcggggcgtccgcaccaccccaagacccggccagctcagctcgcaacaagcgcagccacagcggcgagcccgcgccgcatatccgcgccgagagccatgacatgctgatgatgatgacctactccatggtgccggcggggtctctgttccccgtggcgccccggccaggtgggcggctgggggtgtggggcgaggacgccgacgccctcttctcccctggccaggctgcgagagatctttcagtagcagcctatgaatttagcacagtcagatttgttttttctgaagctcgctggagcagtgtggagaatgggaaggggtatacggtggatccgagtgatggtggacctgtgcaacagcaccaagggcatctgcctcacagcccctaccagagtggaaggtggcagaagttactgatggggcaaggagtacagaggacacatcatggggcaagggagcaggtggcagttcctaggaaggtggaccttctggaccaccaggacctccgggagccggcgggttgccaggacacaacggattggatggacagcctggtcctcagggcccaaaaggagaaaaaggagcaaatggaaaaagaggaaaaatgggggctacaggataactatgaagatatggctggcatctcggaggagcttcctttgccctgttatgagcaggccatcaccactggagaaaaggcccagaagcaccaaggcacgagatgtgcccagggagcaagggcagcttcagagaaaacgggcacacaccgtccaagccagctcaatcctcagaaggccagtaattaccattggaattacacagcagcaatggatcgttcatataggataataattataattatacatgagcatcgctgtagaataatgatgcctattggcttatcctgggaagtactccaaaaatgtgattcagtcctgaggcctcggcaatgggcatgatgagggcaggctcaggggcaggagggcaccctgctagagctgggtgtggggcacgtaggaaaggggtggttttcaaaaaggcttgagacagatccctggccttgaggacgtgcttcgcatgcagcctgcaacccagggagtgcagaaaagaaaaagtgcatttgtttatggagcacatatttgtgtggcaggtaccattctagatgctggagattcagaaataagcccccctcctccaccttc

SEQ ID NO: 157956 - DNA, 440 bp, Homo sapiens
  misc_feature (1)...(440): n = a,t,c or g
ctcggcaagtaccaggacgggtcttggcagccgaatgnacgattcgagaggccgctntccgggggcccgcacgtaccgggagagccccggcccctcnacncgcatgtngggacggagccgggagatcgcgcgctggccgcgccgaagacccctcgctcctctcctccatcggctcttaccgagtccccgccccggaatctgtggaggggccgcttagccttgggagaggaagcagcccggggntcgccggttctccagcccggactgctgccagacttccctggaggtggcagctttcttcaaaggcaccatcccggagcgcaacccctgatggcgcagaaaattcgggacagaccacgtagaggtgggctcccaaagcaaggtgcggaacggcacaaggcnccccaaaggaatcgcttgccacctgagctccaagccgt

SEQ ID NO: 157957 - DNA, 397 bp, Homo sapiens
tcgcgcgctgccgccgccgaaggacccctcgctcctctcctccatcggctcttaccgagtccccgccccggaatctgtggaggggccgcttagccttgggagaggaagcagcccggtgaacggccactttcctgcatgagtggctgccccaactgcgtgtgggtggagtacgtggctgatgagaacctcaaggccttcctcaggatggagatccggctcacaccaggtgcggagctgagccatccctgctggactccctaccgcaggacggagtccaggacgcagccgcagcctccttccttcacaccccctcacagactccttgtgtccaacgggaataggaagaattagttactgacttcacctgagaaaaaaataaattctctatggtggtttc

SEQ ID NO: 157958 - DNA, 440 bp, Homo sapiens
cccacgcgtccgcccacgcgtccgacagagcagccatcttagctggaggtgtcgagtgcctcccccaccccccaccatgtgcttgagtgcacacccggcgccaggccctgatcctggcacttcttgtgaatcacaccgtgtcatacccatgacttccattgcacagtggggaaactgagtctagagaggtgaaataacatgtctaaagtcacaggaagtgaaaaagctgaggacatggagccagttgcccaatgacaggagagctgaaatgtcctcactgctgggggtagaccgggcctcaccagcttcctgggagagtcacatgtttgtctgcatcctcagggggctcgccggttctccagcccggactgctgccagaggcttcctggaggtggcagctttcttcaaaggcaccatcccggagcgcaagcccctgatgg

SEQ ID NO: 157959 - DNA, 471 bp, Homo sapiens
atcgcgcgctggccgccgccgaaagacccctcgctcctctcctccatcggctcttaccgagtccccgccccggaatctgtggaggggccgcttagccttgggagaggaagcagcccggtgaacggccactttcctgtttctcagtatctgccgagcgcctgtgtgcgagccctcctgggctctggggactggccgtggacatggagcggatgatgcccctcgcaggactagttaaataagtgaagttggtagcgtgtcagtccgtgatcctgggtagatagagcagggcagcgacggaagactgcctataggacattcacgctgggatgagaggggcctgagaggcctgggctttgtgacagggaaacttggataaagggtggtgcgattcttccggttggtccctcaaaggtggtggggcttggttatactggtagaggtgctgggctggccaggagcttacagggttac

SEQ ID NO: 157960 - DNA, 1021 bp, Homo sapiens
tttttttttttttttttcctgtgaaaccaccatagagaatttaatttttttctcaggtgaagtcagtaacctaattcttcctattcccgtgggacacaaggagtctgtgagggggtgtaaaggaagaaggctgcggttgcgtcctgggactccgtcctgcggtagggagtccagcagggatggctcagccgtccgcacctggtgtgcaagccggatcttccatccttgaggaaggccttgaggttctcagtcagccacgtgctccttccaggggcagccaggggcccgtttccccaccgtcctggaaagtgctgcagcagcctgtccgccgtactcccaccccacacgcaagttggggcaagccaactcatgcaagcagttttgtgggcgggctgggagctcaaggtggcaagcgaatgcctttgggcgggcctgggtgccgtcccgcacctggcttgggagcccacctctacgtggtctgtcccgaattttctgcgcccatcaggggcttgcgctccgggatggtgcctttgaagaaagctgccacctcctaggacacctctggcagcagtccggggcttggagaaccggcgagcccccaacttcacttatttaactagtccttgcgaggggcatcatccgttccattgtccacggccagtcgccccagagccaggagggcttcgcacacaggcgctcggcagatactgagaaacaggaaagtggccgttcaccgggctgcttcctctcccaaggctaagcggcccctccacagattccggggcggggactcggtaagagccgatggaggagaggagcgaggggtctctcggcggcggccagcgcgcgatcctcccggctccgtccccacatgcgggtggaggggccggggctctcccggtacgtgcgggcccccggacagcggcctctcggacgtgcccttcgcgctgccaagacccgtcctggtacttgccgagccacggaccgcggcgtaccgcccggcctcccgcgcctgtgccga

SEQ ID NO: 157961 - DNA, 403 bp, Homo sapiens; identical to SEQ ID NO: 131456

SEQ ID NO: 157962 - DNA, 290 bp, Homo sapiens
  misc_feature (1)...(290): n = a,t,c or g
ccccactgtgggtcttgcctgccctccatcaactagaaggcgacgtagcattgagttaatccaccattactttaaatggcatggataccactcatatagtattgagaaaagnnnnnnnnnnnnnnnnnnnnnnnnnnnnnnnnnnnnnnnnnnnnnnnnnnnnnnnnnnnnnnnngttagtatgagggctagaagagtggtgattttaaacctccgggcctttgtacacgctgttccatctaccaagggtgccctttcctcgcaccatgtaaacgcaaacgtatggatca

SEQ ID NO: 157963 - DNA, 459 bp, Homo sapiens
  misc_feature (1)...(459): n = a,t,c or g
gacctaacgtttgtcgttacatggagcgaggaaagggcacccttggtagatggaacagctgtgtacaaaggttcggaggtttaaaatcaccactcttctagccctcatactaacnnnnnnnnnnnnnnnnnnnnnnnnnnnnnnnnnnnnnnnnnnnnnnnnnnnnnnnnnnnnnnnncttttctcaatactatatgagtggtatccatgccatttaaagtaatggtggattaactcaatgctacgtcgccttctagttgatggagggcaggcaagacccacagtggggctgagcccctcgagggttcctggctttgcccaggaaacaattcaagggcaagctggaagtgaaagtaaacaggccaggcatggtgggagatactacccctttccatggcaatgaccccacgacccaaaagttactaccccttccctagaaacttttgcctgggctgcccc

SEQ ID NO: 157964 - DNA, 398 bp, Homo sapiens; identical to SEQ ID NO: 131458

SEQ ID NO: 157965 - DNA, 573 bp, Homo sapiens
agaggagacggggagtcacatttcagaagcacctatgctttaaataccatatatcttttcttcctcacaactcctcggagccagaacttatggtccccattttctaccaatggaaaatgaagccctaaaagagtcagtctcctcctgcacccaaaggcagggcatgaagggtgctgctggggcctgactgccagccctgggcctgcccctaggtggaagagcagctgatccgctacgtgcatgacgggagcgagacactgacagacagttttgtcctgatggctaatgcctccgagatggatcgccagagccatcctgtggccttcactgtcactgtcctgcctgtcaatgaccaaccccccatcctcactacaaacacaggcctgcaggtgagagcatccctgggaacacccccatgtctgcttcgagaaagaggccagcgtcccctacttcgcggctcagagctcccccagctctgatcctcagtttcctcctctgcaaaatggggacgctgccacatgcctcacggggttgttggaaggagagaagtgagattgtgctgaaatagaaaaa

SEQ ID NO: 157966 - DNA, 1266 bp, Homo sapiens
  misc_feature (1)...(1266): n = a,t,c or g
tattcaaactggaagnnnnnnnnnnnnnnnnnnnnnnnnnnnnnnnnnacaaaccagcttgaagcggcagggttacagctctgcgacggcccctgcaggcggggtgtgctgggcagagtgtgctgagagcagcagctcaggacagttctgcagccacatttacacccacttttaatttcatgtagattaaggggcagcccaggcaaaagtttctagggaaggggtagtaacttttgggtcgtggggtcattgccatggaaaggggtagtaactcccaccatgcctggcctgtttactttcacttccagcttgcccttgaattgtttcctgggcaaagccaggaaccctcgaggggctcagccccactgtgggtcttgcctgccctccatcaactagaaggcgacgtagcattgagttaatccaccattactttaaatggcatggataccactcatatagtatcgagaaaagttagtcacattcaaaagagtgcatgcaatcttgtcccctgtggctatagcatcgcataactcaagctaggcgtcagccgtgagcttcaggatcttctcataatcaatcccctgtcccagcagctcctttagtacctggctgcagagcagccgcaacttcacagaggacatcttggccagcgtgctgatctctgccagcacccagtcggcacagtccagatcaccacagaaccagaacctctgcaagggagggagtcaggctgcgccccctgcatcctcccatcccatctctagccatggatggggcctgtgcctggacgaccctcctgccaaggacatcatcgacttccccttggtgctgcctggcatcccctatgctgtgagccaccagtgccgcctccagtacggggcctactctgccttctgcgaggacatggatggtgattccagcctcatttctccatgggccaaatatcctaaacaaaggcctggacagggggtctttatccgagtgcccaaaaagcacatgcagaaaggctctgcatgccccctgtggcctgtcagaggtaagagcctgcccgtcaaaatgcacaatcctggttcttgcagggaggtggaagagcagctgatccacatggaccaccagagccatcctgtggccttcactgtcactgtcctgcctgtcaatgaccaacccccggtcctcaccacaaacacaggcctgcaggtgagagtattcctgggaccacccccaatttctgcttcgagaaagaggcctgcgtcccctacttcatga

SEQ ID NO: 157967 - DNA, 785 bp, Homo sapiens
aacagacagctcagttgtgggactgctctctcaaccacaggaggaatttatattggagaaagaagtgttcgtgtgtggggacacaggtttcattgcttagggaatgagtcacttctggataactgtcaaatgacagttcttggagcacctccctgtatccatggaaatactgtctctgtgatctgcacaggaagcctgacccagccactgtttccatgcctcgcaaatgtatctgacccatatttgtctgcagttccagagggcagtgctttgatctgcttagaggacaaacggctccgcctagtggatggggacagccgctgtgccgggagagtagagatctatcacgacggcttctggggcaccatctgtgatgacggctgggacctgagcgatgcccacgtggtgtgtcaaaagctgggctgtggagtggccttcaatgccacggtctctgctcactttggggaggggtcagggcccatctggctggatgacctgaactgcacaggaatggagtcccacttgtggcagtgcccttcccgcggctgggggcagcacgactgcaggcacaaggaggacgcaggggtcatctgctcaaaattcacagcctttaggctttacagtgaaactgaaacagagagctgtgctgggagaattgaagtcttttataacgggacctggggcagcgtcggcaggaggaacattaccacagccatagcaaggattgtgttgcaggccaccttggctgtgggggaagaaatggatgctaacccttcccccctttg

SEQ ID NO: 157968 - DNA, 1116 bp, Homo sapiens
ggtttggtattttcctggggtgatggtgactttggaaaattgggccggggcggaagtgaaggctgcaacattccccagaacattgagagactaaatggacagggggtgtgccagattgagtgtggagctcagttcctactggcgctcaccaagtctggagtggtgtggacatggggaaagggggattacttcaggttgggccaccgctctgacgtgcacgttcggaagccgcaggtggtggaagggctgagagggaagaagatcgtgcatgtggctgtcggggcccagcattgcctggcggtcatggactcagggcaggtgtatgcttggggtgacaatgaccacggccagcagggcaatggcacgaccacggttaacaggaagcccatgctcgtgcaaggcttagaaggccagaagatcatgtgtgtggcttgcgggtcgtcccacagtgtggcgtggacaactatggatgtggccacgccctctgtccacgagcccgtcctcttccagactgcaagggaccctttaggtgcttcctatttaggtggccgcgtttattctcacaaattcagcccgatgactcagtccttccaggaatggtggtacgtgaatctcaacagcctaatggaccaggctttgaccccacagtgtggcagtggggaagacctatatatcctcacaggcacagtgccctcagactacaaagttaaagacaaaagttttacaggtagtgctcttgctgctttggtgaaaggtcttccagaagctttgcaaaggcagtttgaatatgaagatcctattgtgaggggtggcaaacagctgctccacagcccattctttaaggtactggtagctcttgcttgtgacctggagctggacactctgccttgctgtgccgagacgcacaagtgggcctggttccggaggcgaccagatgattggaatctgtctgctggtggcagtggaacaatttatggttggggacatgatcataggggccagctcgggggcattgaaggtgcaaaagtcaaaattccctctccctgtgaagccctcacaactctcagacccatgcagttaatcggaggggaacagaccctctgctgtgacagctga

SEQ ID NO: 157969 - DNA, 214 bp, Homo sapiens
gtggcatttttcaagtccgctggagctagtgtccaggagaagcaggcacagttacaagagcaggtgaaagagcagagggtgtgctgccagcgcctggctcacccggtggcctcggcccagaaggagccagaggcagccagaggccctggagccccagggcctgggggcgagtctagcagctttatggaccacctgaaggagaaggcagacctga

SEQ ID NO: 157970 - DNA, 141 bp, Homo sapiens
cagggggaggcagagatggcacagcaagagacatgcccccagaatgccaccaatgccccaggacaggcccacccatgggaccaggttatcaggggccgttacttcttccagctgatgttccacttgtttcttctgttgttt

SEQ ID NO: 157971 - DNA, 210 bp, Homo sapiens
catggcctccctgctctccaggtcctgtgggatgctaggaatgggccgaggtgcctcctccccctcactgtccagatgtcctcctccataggtcagctgctgataggcggccacctgctgctgataggtggccacgtactgctgcaggtgacccaggtaatggtctggctgctgctgcagactctgagcctcttggctcttcagctccac

SEQ ID NO: 157972 - DNA, 1125 bp, Homo sapiens
aagcaagccttgaatacagattaccttgattctgattaccaaagaggacagctttacccattctcccttagcagcgatgtccaggtggccacatttactctcacaaattcagccccaatgactcagtccttccaggaacggtggtatgtgaatctccacagcctaatggaccgggctttgaccccacagtgtggcagtggggaagacctatatatcctcacaggcacagtgccctcagactacagagttaaagacaaagtggcagtccctgagtttgtttggctggcagcctgttgtgctgtccctggaggaggctgggccatgggctttgtcaagcacacccgggacagtgacatcatagaagatgtgatggtaaaagatcttcagaaactgcttccatttaaccctcagctgtttcagaacaactgtggtgaaactgagcaagacacagagaaaatgaaaaaaatcctggaagtggttaaccaaatccaggatgaagaacgaatggtacaatctcaaaagagttctagtcccctttctagcaccaggagcaagaggtctactctgttgcctccagaggcatctgagggaagtagtagctttttgggaaaactcatgggcttcattgctaccccattcatcaagctttttcaattaatttattaccttgtggtagcaatcctgaagaacattgtctatttcctgtggtgtgttaccaagcaggtgattaatggcatagaaagttgcctttaccgcctgggctcagccaccatctcatacttcatggccattggggaagagttggtgagcattccctggaaggtgctcaaggtcgtggccaaagtcatcagggctctcctccggatcctttgttgtctgctgaaggccatttgccgagttctgagcatccctgtccgtgtccttgtggatgtggccactttccctgtgtacaccatgggcgctattccaattgtttgcaaggacattgcactgggccttggtggcactgtctcactgctctttgacactgcttttggtaccctgggtggcctatttcaggtggtttttagtgtctgcaagcggattggctacaaggttacttttgacaattctggggagttataa

SEQ ID NO: 157973 - DNA, 726 bp, Homo sapiens
gtgagctgccatcctctatagcggccgcctctcttctcagcctgtggtggtggagagtatccacccttacacctacgacacctccaccagtggcacagtgaagataccaggtgcagaaggactcagggtggaatttgaccggcagtgcatacacagagaggcgccacgaccctctcacagtcatggacggcgtcaacaggatcgtctccgtgcggtcaggccgagagtggtccgactggtccagcgagctgcgcatcccaggggatgagttaaagtggaagttcatcagcgatgggtctgtgaatggctggggctggcgcttcaccgtctatcccatcatgccagctgctggccctaaagaactcctctctgaccgctgcgtcctctcctgtccatccatggacttggtgacgtgtctgttagacttccgactcaaccttgcctctaacagaagcatcgtccctcgccttgcggcctcgctggcagcttgtgcacagctgagtgccctagctgccagtcacagaatgtgggcccttcagagactgaggaagctgcttacaactgaatttgggcagtcaattaacataaataggctgcttggagaaaatgatggggaaacaagagctttgagttttacaggtagtgctcttgctgctttggtgaaaggtcttccagaagctttgcaaaggcagtttgaatatgaagatcctattgtgaagggggcaa

SEQ ID NO: 157974 - DNA, 1191 bp, Homo sapiens
ctattgctctggcagtattgtggaggactgcatgtggaatttgcaagtagggctagtcccatccggcttcttcttctgtgtggcggcgacagcacagagagaccactctaactctcctatacgctgcgatgaacgttgcaggcggccggccagatccttggactcttctgtaatgacagagttgacatggggctcaaaggactccgccttacagacctctagctccctttcagctttctgtttctcattgtttgctttcttttccagggggaggcagagaaggcacagcaagagatatgcccccagaatgccaccaatgccccaggacaggcccacccatgggaccaggttatcagggaccctttgatactcactacctcctctggaaacacgagcccaaaaaggagaggtggcttgtccagaatcaaagagcaaattagggactgagtcatggcagaaatacggggcccctgacaaccagtcaggccagcacttccccaagaggcaacaaccccagggcgtgtgtagcaaggactcgagtaggggtgccagccactgagttactatggatggaggagatgagatgtgtgcaactgttctgctacagtaaagcacgcagtcagtgcagtcaccagggttaggatgtgtgagtgttttaccaacctgcctgctgggtttcagacacctggcactacctccagcctctaactgattctggctagtacgcgtgaaagctgtcagctgagtgatgagtgggccgattttggccacaggtccctgcacttcccacctggcctgactgctagattctgagcccctggagaggagcgtgtcatcgttttgcaagtgggatgtgcggttgttggggaagacgtctttgtgctgtgttgggttggaagctctctccagctctgaaatctttaactgtctactgggtgtatttgtctggaaccttgcctcctgtctctgtggttctgcatgttgccgggtgtttctcagggacacctgactttcctgagggtccccagccgcatttgcagtgacacctccatcctcactgcagtgacccgtgagtgcaggcctgtgcccgtgacctggctggaccctggggttttcctgcgccgctggccctgagctgcttgtgagtgttgtgcagccatcaccaccatccatctccagaactttcttcat

SEQ ID NO: 157975 - DNA, 557 bp, Homo sapiens
caaaggaagtaaatgaattgtgtaggagattaaccccataacttggtttcttatttaaaaatttcttgagcagctgtttgatgatggtgatgtttatctccttcttcttggcagccaagcccaacaaaataatggcacacagcagttgctgcccaagcctgggtgctcctggtggtcctgcacgatcggctgtgcagtaggcttgtcaaggagaggatcctccctggcctcttcttgggcagaggaggtgaggctcacctcacgaagatcaccatgcttgtctgcagccccaagctcctggggggctggggctcctggaccgggctcatcagcagggttgtgggcagcggccaggaattttctgtgcccattgttgtagttgctgtaagccgcaataccatctgctgcagctccagcagcttcaccttcatctcctccctgagctccagcctgatggtgtcctcctcccagtgctgcatctttggcacggcccccctggttctgataaaaggtgatggattttctgatggcatctctcttgccagtattgaatgaag

SEQ ID NO: 157976 - DNA, 985 bp, Homo sapiens
agaacagtcacttggcacaggagtcactgaaagggccgcagggtgctgtggtggggagataagaaccatgagagaagttggcacaaaggagttatgggacaaagggtccaagataggcagaaaagaaaattgtgccagttgatggggaagaaaagaagtcagagggcttagatactgagtgggacagaacatcttcatgtgcactctcatctcttgtagtcagcaacaggtatccacggggagagccctacatcatctgctaccctgaaggatctggagagcccgtgccaagaacgagcagtagtcctggattcaaggtccgtagaaatcagtcaactgaagaacaccatcaaatctctgaaacaacagaagaaacaagtggaacatcagctggaagaagtaacatgatttctttgtttgctcgcgacatgactgctcggttttggggacactcagatgtagaggccccgagtctcgtctcacccactcccagcctggggaagaaggctcaccccccagagtccaccccatcccccacagggtccctgataacccggtcccatgggtgggcctgtcctgggcaggggcagtggtggcattctggggacatgtctcttgcagtaccatctctgcctccccctggtaagagctctgtcttcctcttccttttcagtgcctctttcagcgacatgaagttaaacccaggtactgtgagtcctcgcctaatttttggttcttatgatgatggttttctggtggaaacagttgttaaatttgattttcaattatggcagaagacacctcttcacagggcagcaggagagagaaggagagccgagcaaaggggaaagctgtctttcgtaatgccttaaatccgtcctcagttaaaccggcggttggcgctggttttttccagggcaggattctgggagacggaggagcagacgccagcatttcgccccggcacctccagcgggctgcggtc

SEQ ID NO: 157977 - DNA, 1731 bp, Homo sapiens
cgggtcgacgatttcgtggtgaagctgctggagctgcagcagatggtgtttcggcttatagcaactacaacaatgggcacagaaaattcctggccactgcccagaaccctgctgatgagcccggtccaggagccccagccccccaggagcttggggctgcaggcaagcatggtgctatgaaacccacgtagtcggacaccctgatgcttctcctgcagggcgtgtgatgaggaggtgagcttggctttggagtgctgggaacctgaggaattgccaaggacccagagcccagccctgaccacccagagagcccaaaacacaatgaacaaattgaatttccacaacagagtcatgcaagaccgccgcagcgtgtgcattttccttcccaatgatgaatctctgaacatcatcataaatgtttggtattttcctggggtgatggtgactttggaaaattgggccggggcggaagtgaaggctgcaacattccccagaacattgagagactaaatggacagggggtgtgccagattgagtgtggagctcagttctccctggcgctcaccaagtctggagtggtgtggacatggggaaagggggattacttcagattgggccacggctctgacgtgcacgtgcggaaaccacaggtggtggaagggctgagagggaagaagatcgtgcatgtggctgtcggggccctgcactgcctggcggtcacggactcggggcaggtgtatgcttggggtgacaacgaccacggccagcagggcaatggcacgaccacggttaacaggaagcccacactcgtgcaaggcttataaggccagaagatcacacgcgtggcttgtgggtcgtcccacagtgtggcgtggacaactgtggatgtggccacgccctctgtccacgagcccgtcctcttccagactgcaagagaccctttaggtgcttcctatttaggcgtgccttcagatgctgattcttctgctgccagcaataaaataagtggtgcaagtaattctaagccaaatcgcccttctcttgccaagattctcttgtcattggatggaaatctggccaaacagcaggccttatcgcatattcttacagcattgcaaatcatgtatgccacagatgctgctgtcggggccctgatgccggccgccatgatcgccccggtggagtgcccctcgttctccctcgggggccccttccgacgcatcttgcgatgggctagtccccatgaatgggagaaaaatggcctgctggcctgttgatattccgaaaacagactggagtccaaatccatggcaagaaaagagagagattgtttcctctgaggacgcagtgaccccctctgcagtgactccgtcggccccctcagcctccgctcggccttttatcccagtgacggatgacctgggagccgcaagcatcattgcagaaaccatgaccaaaaccaaagaggatgttgaaagccaaaataaagcagcaggtccggagcctcaggccttggatgagttcaccagtctgctgattgcggatgacactcgtgtggtggtagacctgctcaagctgtcagtgtgcagccgggccggggacaggggcagggatgtgctctccgcggtgctttccggcatggggaccgcctacccacaggtggcagatatgctgttggagctctgtgtcaccgagttggaggatgtggccacagactcgcagagcggccgc

SEQ ID NO: 157978 - DNA, 5399 bp, Homo sapiens
atggtgccagcatctgcttctggtgagggcttcaggctgcttccactcatggcagaagcagaagaaactcgacagagcaaattggctgtagccaatacaaaggtcgacctccctgggctctttgcgctggcgtctccaaggagctgggtcccaaccctgtgtttccctcccccatcatggagcagcaactcagacatcgtgctgatgtccctccccatgaccagaagggtggaatgtagtgatgtcacaatccacctgggaactgtcattactgcaagaccagcctttgatcttatgacccagtcccctaagcgttgtcaccccatttctgattcctctggtcacagcacaaatttccagctgcaaagggaatggagattatgggacctaggagcaagaggtttcaggctgccttactcccttaacatagacactgacagtgggaaaagcctacacttcccccatgagctcaaaacgttaacagtgtctctgggtggcaatgggagaattggtttgttaaaagaatattggcagaaaaacagccctagagttccagaaggagccaagaggaacaggaaaacaaatggcagtatccctgagacagccacttctggtggttgccagtcacctggggatgtgagtcttggctggccaggcttctggggacagggggcccaaggggcaatagaagtcagcaacaggtatccacggggagggccctacatcatctgctaccctgaaggatctggagagcccgtgccaagagccagcagtagtcctgaacccaaggtccgtaaaaatcagtcaactgaagaacaccatcaaatctttgaaacaacagaagaaacaagtggaacatcagctggaagaagtaacgtgatttctttatttgctcgcgacacgactgctggggtccctgataacctggtcccatgggtgggcctgtcctggggcattggtggcattctgggggcatgtctcttgctgtgccgtctctgcgtctccctggtaagagctctgtcttcctcttcctataggaaaagcaaacgagaaacaaaaagccaaaagggagctagagttctcgagccgcagcagagcacatacggagtgggagttagagcagtccctacaggagaaggcacggctgaaggcatagctaacacaggtgaggttttgcagagggagggatgtggaaggaagatgaccccaggtggccaggagcagttgaaggagtcgtttcaacaagtccaattacagagagataactatgctcaacaaataaaaggagagagggcccggtggcagcagaggatgagaaaaatgtcgcaggaggtttacacactgaagacagagaaggagcattatacacatcgggtagaggggctggagaggagcttgtccaaactcaaaaaccagatggctgaacccctgcctccagagcccccagcagtgccctctgaggtggagccgcagcacctgaggaaggaactagatagagtggcaggagagctccaggtccaggtcaaaaacaatcagcgcataagtctcctgaactggggacaagacgagaggattcgagagcaggaagagaggcttcggaagcaggaggagagggtcttcctgcaggtggagctgaagagccaagaggctcagagtctgcagcagcagccagaccattacctgggtcacctgcagcagtacgtggccacctatcagcagcaggtggccgcctatcagcagctgacctgtgagaaggaggcgctgtacaggcagtgcctgcaacagacccagctaatgaaacagctgcagcagcaggaagagcacctggaagcggccagccagcagaaccagcagctaacggcccagctgagcctcatggctctccctggggaaggacacggaggagaacatctggacagtgacggggaggaggcacctcggcccatgccgagtgtcccagaggacctggagagcagggaggccatggtggcatttttcaagtccgctggagctagtgcccaggagaagcaggcacagttacaagagcaggtgaaagagcagagggtgtgctgccagcgcctggctcacccggtggcctcggcccagaaggagccagaggcagccagaggccctggagccccagggcctgggggcgagtctgtgagtggggagacccactgggccctgcaggaagtcacggagaagctggcccatgccaggactcacctccgccttctccatgacttgaaaatgccacctgagggcaggtcgctgccgagatgtgactgcaatattttggctccagagcagctttatggaccaactggaggagaaggcagacctgagaaaatccatcaccttttatcagaaccaggggggccgtgccaaagatgcagcactgggaggaggacaccatcaggctggagctcagggaggagatgaaggtgaagctgctggagctgcagcagatggtgttgcggcttatagcaactacaacaatgggcacagaaaattcctggccactgcccagaaccctgctgatgagcccggtccaggagccccagccccccaggagcttggggctgcaggcaagcatggtggactgcccaatttaagattaagttttaaactggcgcttattagagatatggccattttgccatttcagtggaaccttttaatcagctttaatgctgtcttaggtttggtattttcctggggtgatggtgactttggaaaattgggccggggcggaagtgaaggctgcaacattccccagaacattgagagactaaatggacagggggtgtgccagattgagtgtggagctcagttcctactggcgctcaccaagtctggagtggtgtggacatggggaaagggggattacttcaggttgggccaccgctctgacgtgcacgttcggaagccgcaggtggtggaagggctgagagggaagaagatcgtgcatgtggctgtcggggcccagcattgcctggcggtcatggactcagggcaggtgtatgcttggggtgacaatgaccacggccagcagggcaatggcacgaccacggttaacaggaagcccatgctcgtgcaaggcttagaaggccagaagatcatgtgtgtggcttgcgggtcgtcccacagtgtggcgtggacaactatggatgtggccacgccctctgtccacgagcccgtcctcttccagactgcaagggaccctttaggtgcttcctatttaggcgtgccttcagatgtcaattcttctgctgccagtaataaaataagtggtgcaagtaattctaagccatatcacccttctcttgccaagattctcttgtcattggatggaaacctggccaaacagcaggccttatcgcatattcttacagcattgcaaatcatgtatgccagagatgccgtagtgggggccctgatgccggccgccatgatcgccccggtggagtgcccctctgcggctgcttcggacgcatttgcgatggctagtcccatgaatggagaagaatgcatgctggctgttgatatcgaagacagactgagtccaaatccgtggcaagaaaagagagagattgttttcctctgaggacgtggtgaccccctctgcagtgactccatcggccctctcagcctccgctgggccatttatcacagtgacggatgacccgggagctgcaagcatctttgcagaaaccatgaccaaaactgaagaggtaaagaggcattcttttttcgctttgtattgtgaaattaccaaatggcaggtggagccgcagatcgatgaccccaacagcaaccttgaggaggtgattaatgaggcagaggccatcacctctgagaacagcctgggattgatctccaggtggccgcgtttattctcacaaattcagcccgatgactcagtccttccaggaatggtggtacgtgaatctcaacagcctaatggaccaggctttgaccccacagtgtggcagtggcagatatgctgttggagctctgtgtcaccgagttggaggatgtggccacaagacttgcagagcggccgcctctcttctcagcctgtggtggtggagagtagccacccttacaccgacgacacctccaccagtggcacagtgaagataccagtgccatcctctgctagatcttccagcctgaaggaaaactcttgtgcctctgctcgcacacctctcacaccagatgtgcgggttctccacaccaagcggttctccagttctctggacacgccagaagttgaggtgctcctcacctccaatgccgctcactccccaggtgcagaaggactcagggtggaatttgaccggcagtgctcctcagagtggcaccacgaccctctcacaatcatggatggcgtcaacaggatcgtctccgtgtggtcaggccccgttgaggcgtggaacagaacacagagaactgtcccagccgtccaactatcaggctcacactcctcctcacctggtgtggaaggagttgttgctggtgtcattcttaggcttttggtttacagtggaagtgtgagtgtgaagagcaaggctcaccgactcgcagtggcatgcgtgggcacaccagctgttgccttctggtgggtggggctgggtggagccacccttgtttgttggcttcttatgggttggtccctagcttgtgaaacacaggggtgtttacagtgctcattcacaggccctaaagaactcctctctgactgctgcgtcctctcttgtccatccacggacttggtgacgtgtctgttagacttccgactcaaccttgcctctaacagaagtgtcgtcccttgccttgtggccttgctggcagcttgtgcacagctgagtggcctagccaccagtcacagaatgtgggcccttcagaaattgaggaagctgcttacaactgaatttgggcaatcaattaacataaataggctgcttggagaaaatgatggggaagcaagagctttgagttttacaggtagtgctcttgctgctttggtgaaaggtcttccagaagctttgcaaaggcagtttgaatatgaagatcctattgtgaggggtggcaaacagctgctccacagcccattctttaaggtactggtagctcttgcttgtgacctggagctggacactctgccttgctgtgccgagacgcacaagtgggcctggttccggaggcgaccagatgattggaatctgtctgctggtggcagtggaacaatttatggttggggacatgatcataggggccagctcgggggcattgaaggtgcaaaagtcaaaattccctctccctgtgaagccctcacaactctcagacccatgcagttaatcggaggggaacagaccctctgctgtgacagctga

SEQ ID NO: 157979 - DNA, 767 bp, Homo sapiens
gcggccgctactactactactaaattggcggccgctcgacaaccgctccctggaggaggaggagagtcagctgtaggggcgggggcgggcagggaggtatttatttatttattcgcaacagccagcgctaaaagagggggaggccgagccaagaggaccccaggagcccagagcagcgggagagggtccttcctagcctcggcccgccgggtcggttcctggctggtgtctgctgagggagtggggggcccagccccttctcttctcccccgcctaaccacagtgggagctggggcagggggagagccaggcaatcgggggcccaagatgggggtgctcgcctacagtctgcatctgtaagtgccttgtggggtatccaggaacaccctcccagcaggggatgggaaccctgtcccatgaagccctttcctcagctttacttggtcccccgcccttagccttggggagaaatggcccgtggtgggctgaccccccaccctccacacacacagttccatgacccagcgggcccccaggggcatcaggtgctggtcctcctccctcctggcctcgacccgctaagggcttcgcccctcccaggggcctgtaactaagtcgggtcctgccaggcagggggcctgtgttctgtgccccttgggagacaggaactggcgagttcaggtggggtggggacagcacagactgttccaccgttgtgcatattgttgcttctgaaccacaaactgtataaatggatggttttttgc

SEQ ID NO: 157980 - DNA, 395 bp, Homo sapiens
  misc_feature (1)...(395): n = a,t,c or g
agcttccgccttctccttgcccttcttcttcagnnnnnnnnnnnnnnnnnnnnnnnnnctcctcttgtccngggacttcccccgcttcttccggccatcactggannnnnnnnnnnnnnnnnnnnnnnnnnnnnnggagctagaagaactgcaagaagaggaggaggagctggatcttgttctcctccgggccttctgcttgcttctctcctccgccccaggggccgtgctggccttgcgaccttgggatgtggaggccgagcagttcctcgaggtgtctttcctgctcttcttctttctcttttccgacccccgtccccgggaccggctgcgactcctcgagcgcttgcgggagccgacgtgagccatggcgccgcgggctcgaccgccctgcg

SEQ ID NO: 157981 - DNA, 601 bp, Homo sapiens
agagacacctcgaggaactgctcggcctccacatcccaatgtcgcaaggccagcacggcccctggggcggagggtgaggaccacaggcatcggggagaggaggcgcagttactacccggggaagtcgggcgagcagtggtcggggacgctcagtcatgcctctgtgcagccgggcctgagatgtgagggccaggcgccgcaggagccaggcaaggggctcctctgggaagctccatctctgttctggaaagcccctcaggaagcgctcaccctgtagccggtctgtgcctgccccaggccagagcaggggacgaaggtttacctcttcccctcctggctttccagcctcaccttctccctgcatcacagagagaagcaggcagaaggcccggaggagaacaagatccagctcctcctcctcttcttccagttcttctagctcctcttcttcctcctcgtcctcctcctcttcctccagtgatggccggaagaagcgggggaagtacaaggacaagaggaggaagaagaagaagaagaggaagaagctgaagaagaagggcaaggagaaggcggaacacagcaggcagagcatcatccgcaa

SEQ ID NO: 157982 - DNA, 523 bp, Homo sapiens
  misc_feature (1)...(523): n = a,t,c or g
tttttttttttttttttgactatccagggggcctttaatagctgaaaagtgctgctctttcacatgggggtgccaagcaggccggtgaccccaacctccaccccctgcccctgagaagagactgggctgggccagagaccaatccacgggggaaaggccaccagcacccatcaggcttcccactggcaccctgaaacctgcccaggctgggccgccagcggtcgtccacaggccttggccagcgggggccctcagggaagcaacccagctcgcatctggaaggccaggcagtcccctcgggtaggcttgctggggaagaaagcacacaggatggacggggtacatcacaaacagatgctgggggctggatggcaggcatganggggccacacccaccttgttgatctctctgtgtcgttctttggttacgatttcctcctaggacctcgccatctcccttaataagcctggtgcgccccgtctcagggtccaccaccttgcggatgatgctctgccgggcatc

SEQ ID NO: 157983 - DNA, 895 bp, Homo sapiens
gcgaagggcgcggggctggaggcccgcggcgccatggctcacgtcggctcccgcaagcgctcgaggagtcgcagccggtcccggggacgggggtcggaaaagagaaagaagaagagcaggaaagacacctcgaggaactgctcggcctccacatcccaaggtcgcaaggccagcacggcccctggggcggaggcctcaccttctccctgcatcacagagagaagcaagcagaaggcccggaggagaacaagatccagctcctcctcctcttcttccagttcttctagctcctcttcttcctcctcgtcctcctcctcttcctccagtgatggccggaagaagcgggggaagtacaaggacaagaggaggaagaagaagaagaaagaggaagaaagcttgaaagaagaagggcaaaggaagaaggcggaagcacagcaggcagagcatcatccgcaagtgtggtggacccctgagacggggcgcaccaggcttattaaagggagatggcgaaggtcctaagaggaaatcgtaaccaaagaacgacacagagagatcaacaagtcaagccacccagagggggactgccgatggccattgccagatgcagagcgatgggtatgcttcccgtgaggggcccccgcatggccaagggcctgatggacgacagctggcggcccagcctgggcaggtttcagggtgccagtgggaagcctgatgggtgctggtggcctttcccccgtggattggtctctggcccagcccagtctcttctcaggggcagggggtggaggttggggtcaccggcctgcttggcacccccaatctgaaagagcagcacttctcagctattaaaggccccctgggatagacaaaaaaaaaaaaaaaaaaaagcatt

SEQ ID NO: 157984 - DNA, 642 bp, Homo sapiens
gcatgctctcactactgctttcaacattgtactcgaagtcctagttagtgcagtaagacaagaaaaggaaataaagagccatagtgattgggaagaaagaaataaaactgtctttgttcacagatgacatgattgtcctatgtagaatatccaaaaattgacaaaaatgctccctggaaataataagcaattttacccagggtggtaggatataaggttaatacacaaaattcagttacttttcgtgtatatcatcagtgagcaagtggtatttgaaattaaaaaaaatactatttgcattagaacccccaaaagtggaatacttgggtagtaatctaacaaaacatgcacaagatttatatgagaaaaattgtaaaactttaattaaagaaatcaaagaactaaataaatggagagagattttatgtggatagaaatattctgttttcaagatgtccgttcttctgaacttcgtctatagattcaatgcagtcccaatccaaatcccagtaagttgttttgtgggtattgacaaacattttaaagtttatatggagaggcaaaaagacccagaatagccaactcaatattgattgagaacaacaaagtcacaggattgacactacctttcttcaaggcata

SEQ ID NO: 157985 - DNA, 577 bp, Homo sapiens
gcacgagtaatgagtgtggcaaaaccttccgtcacaattcagtccttgtaattcataagacaattcatactggagagaaaccttacaagtgtaatgaatgtggcaaggtttttaatcgaaaagcaaaacttgcacgtcatcatagaattcatactggaaagaaacattagaaatatgaagaatgtgacaaagtttacagttgtaaatcaagtcttgaaagacaggagaattcatactggagagaaagcttacaaatgtaagagtttgtgacaagaatcttgggcgtgattcacacctggcccaacaaactagaagtcacactggagagaaaccttacaagtgtactgagtgtggcaaagcctttagtgggcagtcaacacttattcaccatcaggcaatccatggtatagggaaactttactaatgtaatgattatcacaaagtcttcagtaacactacaaccgtttcaaatcattggagaatccataatgagagattttgaaagtgtaataaatgtggcaaatttttcagacattgttcataccttgcagttcatcggtgaactcatgctggagag

SEQ ID NO: 157986 - DNA, 338 bp, Homo sapiens
ttgacgcactccttcagggtaaggatgaagggatacaactgttcataccaatcctctcttgggagagagggaatggcatctgttaatgaacgttccttttctccatcattgatgccgccactggcttcactgccaccatctctttcaatcaatttgtccaccatagcaatactgcagctaaggctctttcccacattggcccacaccctgttccactcttcctcatcataatctgaatgatagaggacggagtcctgccctctcatcactgggggtttggcctagggactgatatactctgtgctgatcttagagaggtagtgttttatcatagacct

SEQ ID NO: 157987 - DNA, 246 bp, Homo sapiens
ccgtcccctcaagcacaccctggtgacctgtgacaaaggagggttgtaatttgaaccctcctttgtctcaggtcaccaaggtgtgcttgaggtgacggtaccaagccagaagtgccattcataggtacagcaaccttttaccattatctcccaactgcctatgggtgcatgcttacctctacttaacgcaaagtagaggaaacggaattggatgacttctatgatggaaacagtcgacgcggccga

SEQ ID NO: 157988 - DNA, 348 bp, Homo sapiens
ccggctggcggttggtgaggccactgttcatgggccacagacagcccgtcatcagtgggctccagcctgagcagcctctgcatctgaaactttagtttctgtgctctggagtctctgactgtgcatccttccctgtccatccccagagcccaaggtggtgtttgctaaggagcagctggcacgcaggaagctgcaggcagaggcaggagccagtgccacactgagctgcgaggtggcccaggcccagacggaggtgacgtggtacaaggatgggaagaagctgagctccagctcgaaagtgtgcatggaggccacaggctgcacgcgcaggctggttgtgcagcaggc

SEQ ID NO: 157989 - DNA, 220 bp, Homo sapiens
ctcttgagcacctaacacagggaaatgaaaactggaaatgatctaaagatccttcaaaaggtaaacaaactctggcacctctatactacagcatactaaaaaagagcaataaaaaagagcaaactattggttcacacaaaaaacttgggtgaatctcaagggagttgtgctgagtgaataaagccagtctcaaagggttaaatattggtcgacgcggccg

SEQ ID NO: 157990 - DNA, 868 bp, Homo sapiens
ttgcatcttcttgctgtcctagaaaaaatgatttcacagggtaacaataacaaaaatggaaagaatgagactggtaataacaacaacaaagatggatctaatcataaagctgaaagtggagctctaatagaagctgcaaaatcaaagatacatcagtacaaagtacgagcttatatccaaatgaagtctctgaaagcatgtaaaagggaaatcaagtcagtcatgaatacagctggaaattccgcaccctctctctttcttagaagcaattttgagtacttaagaggtaattatcgaagagccgtgaagctagtaaatatgtcaaacattgctgagcatccaggattcatgaaaacaggtgaatgcttgagatgcatgttctggaataaccttggttgcatccattttgccatgagcaagcacaatttgggaatattctactttaaaaaggctctgcaagaggaatgacaatgtctgtgcacagctccagtgcaggtagcactgatccaggtaaaaaattttcagggaagacccatgtgtacgttacttaacccaataagaggttatgagtttgctgtataactgtgggatttcagcttcttcacattggaaggcctcttgctgccttcgaatgtctgattgaagctgttcacgtttatcatgcaaatcctcgcctctggctacggctggctgaatgctgcattgctgccaataaggggacttctgaacaagaaactaaaggccttcccagcaaaaaaggaattgtacagtctattgttggtcaaggctatcatcgtaaaatagttttggcatcacagtctatacagaatactgtttataatgatgggcagtcttcggccattcctgt

SEQ ID NO: 157991 - DNA, 1050 bp, Homo sapiens; identical to SEQ ID NO: 144729

SEQ ID NO: 157992 - DNA, 2248 bp, Homo sapiens
ccctgagcagcctaactggaaggcattctcccagtaggggcagactgacacttcacacggccgggtactcctctgagacaaaacttccagaggaacgatcagacagcagcattcacggttcacgaaaatccgctgttctgcagccactgctgcggatacccaggcaaacagggtctggagtggacctctagcaaactccaacagacctgcagctgagggtcctcgtgatccgcctgcctcggcctcccaaagtgctgggattacaggcgtgagccatcgtctgcgcttctatttcgatcaccaagatgtggctccggaatgcggggcttacttcttccatgaattggccaaggagaagcgcaagggtgttgagcgtctcctgaagatgcaaaaccagcgtggtggccctgctgtcttccaggacatcctgaagccaggtcaagatgagtggggtaaaaccctggaagccatggaagccgccatggccccggggaaaaatctcaaccagagtcttttggatcttcatgcactgggttccgcccctacagacccccatctctgtgacttcctggagagtcacttccgagatgaggaagttacctttatgcctcggaagagtgcagacctccatgcagcgggtgaggctgccagcctaggtggggtgtcattgaatgtcatgaagggagccagccttcatgcactctgcctgcgtctcctgaacagctttggaccaggagttgctaccttgtgcggagaacgtgtggtgcataagaacaaccgagcctctgctcttcgaaaatgtatattctggccagtctccttgaattcctccagggcgaggccacgccagcgcacaactgcagggggcgccgttcccacagcagccctgcaaagggtcatccctgcttcaagccagtgcctcttcccagctcccatggggaccaccgaagccacgctccggatggaaaacgtggacgtgaaggaggaatggcaggacgaagatcttcccaggccactcccagaagagacgggggtggaactgcttggcagcccggtggaagacacatcctctcctcccaacacgctaaatttcaacggagcgcatcgtaagaggaagacgctggtggccccagagatcaacatttctctggatcagagtgaggggtccctgctgtccgatgacttcttggatacccctgatgacctggatattaacgtggatgacatcgagacccccgatgagaccgactcgctggagttcctggggaatggcaacgaactggagtgggaagacgacacccccgtggccaccgccaagaacatgcccggggacagcgcggatctatttggggacggcacgacggaggacggcagcgccgccaacgggcgcctgtggcggacagtgatcatcggggagcaagagcaccgtatagacctgcacatgatccggccttacatgaaagtggtcacccacggagggtactacggcgaaggcctcaacgccatcatcgtcttcgcagcctgcttccttccagacagcagcctccccgactaccactacatcatggagaacctcttccttccgccaggacagcagacaacacctggaccagtggggctgacccagccagcggcaggagtggaggcaggcagggtcggcaccgcaggtgtcctgaccctggacccctccatgttgggtccctgccttctgtgccccgtgagcaggtacgtcatcagcagcttagagctcctggtggctgaggactacatgatcgtgtacctgaacggtgccacgccccggcggaggatgcctggaatcggctggctgaagaagtgctaccagatgatcgaccggaggttgcggaaaaacctgaagtccttgatcatcgtccacccctcgtggttcattcggactgtgctggccatctctcgccctttcatcagcgtcaagttcatcaacaagatccagtacgtgcacagcttggaagacctggagcaactcatccctatggaacacgtccagatcccagactgcgtcctgcatgaccggcagatcatccttaccacactctgtgcttatggggaaggagaagccttggcaagccacctcttccacgtcatcctcccattccatatccactcctgcttcccctccagcacggagacctcagaccctccctgtggccctggactcgacctggcatacaccacaccgttcagcacacattttgcacagaggggcaaatag

SEQ ID NO: 157993 - DNA, 512 bp, Homo sapiens
catattaaaaatatgacttttatttacttcagttctttcatcttttgtttccccccgagatggagtctcgctctgtcgcccaggctggagtgcagtggcgggatctcggctcactgcaagctccgcctcccgggttcacgccattctcctgcctcagccttcccaaagtagctgggacttacaggcgccccgccaccgcgcccggctaatttttttgtatttttttttagtagagatggggtttcaccacattagccaggatggtctcgatctcctgacctcgtgatccgcccgccttggcctcccaaagtgctgggattacaggcgtgagccaccgcgcccggcctgaaacatataatttttgttcctttattattatttcttctttacctgtggagccagaggcaaggaagatgaccaagaattcagacataggagagatctggataaacttaggaacctgtctaatagtttagaccctggaagatactgtagaggaaagttgtttattg

SEQ ID NO: 157994 - DNA, 362 bp, Homo sapiens
attcagcaatcatagtttgagatataaatacttccaataatgggtggaacaaccaggcagatgattaataaggaaatagaagatgtgaacagtgctataaaccaagaagacttactagttatctatagaacacttcatacagcagcagcagaattcacattcttctcgagtttacatgaagtatcctccagcatagagtatgatgttaggccattaaacaagcctcaataaattttaaagtattgaaatcatacaaaatattttctgaccataaggggataaaatttgaaatcaataacaaggaaatctgaaaaattcacaaatatgtagaaattagcagtacacttcttagtaaacaaggg

SEQ ID NO: 157995 - DNA, 1055 bp, Homo sapiens
  misc_feature (1)...(1055): n = a,t,c or g
ggcttggcaggagcctccccgctgtgtagagccagctttgcttgtggggggtcggtggtgccatgtgggcatctggcttcctccacggctcagcccctgagcacctcgggctgtgcacagagggcctggccggcttcttcctgcttccagagaacatgtttagccatcaacgcttctgtgtgaataggttatcaaagcggctgagggtgacagtgggtctgcctgggtcttggatgaggccgaccctactgggggtcctgggctgggatgtaggggtaccaagtacttactgaggtccggggcaggaggcctgagtgatgaggaccttgtgggcctggcactgatttggccctttctcctaagcccccaggtcttcatggacctcctagtgggccagccctggctgggtaggatttcaagcagactgctacccagagcccacagtgagaattggcctggggctgctggagggggctcanatagggcatgagtagggtctgtgaccaggctgacaatgacacagagggaaataacaaagacccaggtaggccccaggcacagcccagctgcaggggcagcctcggcccagccactggcaggagtggatggccatacggctccccgtgacccacctggggccaggggcctgtcagcactcccagagaaggccctgcgggtgtcaggattgaagcaaagggcaagtcgaagttggagggactggtgggatggccccaagtccctctagaacttgtaacttgttgtcactcccaaaactttctggggttgtttgagaagcctggaatcctggaagggctgatgtgcacatcatgcatgcagtgggactcatcaaaaccagccacgaatggttagatccacctgcggactcacaggctggctcctgtggtgcctctgggcaggagcctcagccagcagcatcagggagtgctgcctggaggaggtgttctcaaggtgggcttggcaggctgaggcaccaacagcaggaggaggggccgtcttcccagcacgttggagtgggatgcgtgccctgtgggggg

SEQ ID NO: 157996 - DNA, 401 bp, Homo sapiens
  misc_feature (1)...(401): n = a,t,c or g
ggcacgaggcacgttagttattctccagggtaaaccatatggtaggtcacaaattaagtctcaatagattttaaaagatagatattatacaaagtatattctacgaccacaacagtatgaagttagaaaataataataaaaggaaaactggaaaatttataaatttgtggaaataatttaaataatatacctttaaacaacccataagtaaaagaaaaaaatcacaagggaaattgaaaaatacttagagatgactgaaaacagaaacaaaacatacagaaacttatgggatgcagcaaaagttgtgccaaaaggggatatttatagctataggtgcttaccctttaaaaaggaggaaaatctccaatccaggtatcctaaccttacctccttagggnccc

SEQ ID NO: 157997 - DNA, 370 bp, Homo sapiens
ggcacgagcgcttggccccaatacaaactcgacaatgattccaaatagccagaaaacggcactttcgagttctccatcctacaagttctagataattcttgtcataaaatgggcaaatggtctgaggtgcctgacgtccaggcattcttttacacattggtccctccctagtctctgctcccaatgtgactcatcccaaatctttcttctttctctcctttctggtccttcgggctccaccccaagttccgagtcctctgaatccttcttttctatggactcatctgacctccccccttctccccaggctgctcctcgccaggctgagccaggtcccaattctcacttagcctctgctcccccaccctat

SEQ ID NO: 157998 - DNA, 374 bp, Homo sapiens
ggcacgaggttaaaactatgaagattctagaagaaaacctaggagaatatcttttagacctggtaggcaaagatttcataaataggacacagaaacaatatcataaaataagatttacaaattcaacttcatcaaaattaaaaacttttgctcattgaaagacatccttaaggaaataaatacgcatagattgggagaaaatagtcacaaagcattctgacaagggactggtatccaggattaagaaattccacgattcagtaataaaatgagaacccagttttttccccccaaggataaagatttgggcaggtacttcacaaataaggaaacatgaatggtggccagtggacacctgaaaatgtgctaacacc

SEQ ID NO: 157999 - DNA, 3243 bp, Homo sapiens
atggggtcggcggtgccgagccaggcctgcctggaggctctgctcctgatcgttccctggggcgcctgtggtgtttcccaggaggaagaggagagccctgcagaggggagcaaggacgagcctggggagcaggtggagctcaaggaggaagctgaggccccagtggaggatggctctcagcccccaccccctgaacctaagggagatgcaacccctgagggagaaaaggccacagaaaaagaaaatggggacaagtctgaggcccagaaaccaagtgagaaggcagaggcagggcctgagggcgtcgctccagccccagagggagagaagaagcagaagcccgccaggaagcggcgaatggtagaggagatcggggtggagctggttgttctggacctgcctgacttgccagaggataagctggctcagtcggtgcagaaacttcaggacttgacactccgagacctggagaagcaggaacgggaaaaagctgccaacagcttggaagcattcatatttgagacccaggacaagctgtaccagcccgagtaccaggaagtgtccacagaggagcagcgtgaggagatctctgggaagctcagcgccgcatccacctggctggaggatgagggtgttggagccaccacagtgatgttgaaggagaagctggctgagctgaggaagctgtgccaagggctgttttttcgggtagaggagcgcaagaagtggcccgaacggctgtctgccctcgataatctcctcaaccattccagcatgttcctcaagggggcccggctcatcccagagatggaccagatcttcactgaggtggagatgacaacgttagagaaagtcatcaatgagacctgggcctggaagaatgcaactctggccgagcaggctaagctgcccgccacagagaagcctgtgttgctctcaaaagacattgaagctaagatgatggccctggaccgagaggtgcagtatctgctcaataaggccaagtttaccaagccccggccccggcctaaggacaagaatgggacccgggcagagccacccctcaatgccagtgccaacagagcctttccctcacccctgaccccctgggctgaccaaaatgtgctttctactgtgagtccctatcccaagatcctggggaaaggagagaccatggtggttccacgagtgtttgggcgcatggtgggtaaaagccgggaggcggtggctcaggccatggtgctggagatgtttcgagaggaggactactacaacgatgatgttctggaccagatgggcgccagtatcctgggcgtggagggcccccggcgccacccagatgagccccctgaggatgaagtcttcgagctcttccccatgttcatgggggggcttctctctgcccacaaccgagctgtgctagctcagcttggctgccccatcaagaacctggatgccctggagaatgcccaggccatcaagaagaagctgggcaagctgggccggcaggtgctgcccccatcagagctccttgaccacctcttcttccactatgagttccagaaccagcgcttctccgctgaggtgctcagctccctgcgtcagctcaacctggcaggtgtgcgcatgacaccagtcaagtgcacagtggtggcagctgtgctgggcagcggaaggcatgccctggatgaggtgaacttggcctcctgccagctagatcctgctgggctgcgcacactcctgcctgtcttcctgcgtgcccggaagctgggcttgcaactcaacagcctgggccctgaggcctgcaaggacctccgagacctgttgctgcatgaccagtgccaaattaccacactgcggctgtccaacaacccgctgacggcggcaggtgttgccgtgctaatggaggggctggcaggaaacacctcagtgacgcacctgtccctgctgcacacgggccttggggacgaaggcctggagctgctggctgcccagctggaccgcaaccggcagctgcaggagctgaacgtggcgtacaacggtgctggtgacacagcggccctggccctggccagagctgcccgggagcacccttccctggaactgctacatgaagtccagcggaacctcaatagctgggatcgggcccgggttcagcgacaccttgagctcctactgcgggatctggaagatagccggggtgccacccttaatccttggcgcaaggcccagctgctgcgagtggagggcgagagctccatccaaatcgcctttgaggaggtgccccaactcccacccagagccagcatcagtcatgtgacctgcgtagaccaatctgagcataccatggtgctgcgttgccagctctctgctgaggaggtgcggttcccagtctctgtgacccagcagtcccccgctgccgtctccatggagacctaccacgtcactctgacactgccaccaacacagagaggtgaagaacaagtggagctctccacaattgaggaactgatcaaggatgccatagtcagcacccagccagccatgatggtcaacctcagggcttgctctgccccaggaggcctggtacccagtgagaagccacccatgatgccccaggctcagccagccatccccagacctaaccggttattcctacggcagcttcgggcatctcacttgggaaatgagctggaaggcaccgaggaactgtgctgtgtagctgaactcgacaaccccatgcagcagaagtggaccaagcccgcgagggctggatccgaggtggagtggacagaagacctggcactcatcacacctaccaagaagattgagcttgaccggaccatcatgcccgatggcaccattgtcaccacagtcaccactgtccagtcccggccccgtatagacggcaaattagcaggggacagccacctttccaacggcttggaccctgtagcagagacagcgattcgccagctgacagagcccagtgggcgggtggccaagaagacacccaccaagcgcagcactctcatcatctctgacccaccagccatgtctccaggaccgctagatgccctctctagtcccacaagtgtccaggaagcagacgagacaacccgttcggatatttctgagaggccatctgtggatgatattgagtcggaaacggggtccactggtgccctggagacccgcagcctcaaggatcacaaagataaggaatctgaggcacagaactaa

SEQ ID NO: 158000 - DNA, 394 bp, Homo sapiens
gctgtccaacaacccgctgacggcggcaggtgttgccgtgctaatggaggggctggcaggaaacacctcagtgacgcacctgtccctgctgcacacgggccttggggacgaaggcctggagctgctggctgcccagctggaccgcaaccggcagctgcaggagctgaacgtggcgtacaacggtgctggtgacacagcggccctggccctggccagagctgcccgggagcacccttccctggaactgctacatgaagtccagcggaacctcaatagctgggatcgggcccgggttcagcgacaccttgagctcctactgcgggatctggaagatagccggggtgccacccttaatccttggcgcaaggcccagctgctgcgagtggagggcgag

SEQ ID NO: 158001 - DNA, 3664 bp, Homo sapiens
tgacagccacctttccaacggcttggaccctgtagcagagacagcgattcgccagctgacagagcccagtgggcgggtggccaagaagacacccaccaagcgcagcactctcatcatctctggtgtttccaaggtgcccattgctcaggacgagttggcgctatccctgggctatgcggcatccctggaagcctcagtgcaggatgatgcagggaccagcggaggcccctcttcacctccctcagacccaccagccatgtctccaggaccgctagatgccctctctagtcccacaagtgtccaggaagcagacgagacaacccgttcggatatttctgagaggccatctgtggatgatattgagtcggaaacggggtccactggtgccctggagacccgcagcctcaaggatcacaaagccaagaaatccaagctatttagcatggtggttccacgagtgtttgggcgcatggtgggtaaaagccgggaggcggtggctcaggccatggtgctggagatgtttcgagaggaggactactacaacgatgatgttctggaccagatgggcgccagtatcctgggcgtggagggcccccggcgccacccagatgagccccctgaggatgaacttggctgccccatcaagaacctggatgccctggagaatgcccaggccatcaagaagaagctgggcaagctgggccggcaggtgctgcccccatcagagctccttgaccacctcttcttccactatgagttccagaaccagcgcttctccgctgaggtgctcagctccctgcgtcagctcaacctggcaggtgtgcgcatgacaccagtcaagtgcacagtggtggcagctgtgctgggcagcggaaggcatgccctggatgaggtgaacttggcctcctgccagctagatcctgctgggctgcgcacactcctgcctgtcttcctgcgtgcccggaagctgggcttgcaactcaacagcctgggccctgaggcctgcaaggacctccgagacctgttgctgcatgaccagtgccaaattaccacactgcgggcccgcgccgcccggcagcccgcggggggcgaggacggcaaaggagagagcagcgcttgcggcgcgggggccggaggaggtgcaggggtgaactcaggactgggggttgatggcaaagggccgacttggaggcagctgtccaacaacccgctgacggcggcaggtgttgccgtgctaatggaggggctggcaggaaacacctcagtgacgcacctgtccctgctgcacacgggccttggggacgaaggcctggagctgctggctgcccagctggaccgcaaccggcagctgcaggagctgaacgtggcgtacaacggtgctgctctactgaatggcatcgactttctctctcctgccagcctctacttcaatgagctgagctcagagggccgccaggtcttgcgagacttggggggtgctgctgaaggtggtgcccgggtggtggtgtcactgacagaggggacggcggtgtcagaatactggtcagtgatcctcagtgaagtccagcggaacctcaatagctgggatcgggcccgggttcagcgacaccttgagctcctactgcgggatctggaagatagccggggtgccacccttaatccttggcgcaaggcccagctgctgcgagtggagggcgagagctccatccaaatcgcctttgaggaggtgccccaactcccacccagagccagcatcagtcatgtgacctgcgtagaccaatctgagcataccatggtgctgcgttgccagctctctgctgaggaggtgcggttcccagtctctgtgacccagcagtcccccgctgccgtctccatggagacctaccacgtcactctgacactgccaccaacacagagaggtgaagaacaagtggagctctccacaattgaggaactgatcaaggatgccatagtcagcacccagccagccatgatggtcaacctcagggcttgctctgccccaggaggcctggtacccagtgagaagccacccatgatgccccaggctcagccagccatccccagacctaaccggttattcctacggcagcttcgggcatctcacttgggaaatgagctggaaggcaccgaggaactgtgctgtgtagctgaactcgacaaccccatgcagcagaagtggaccaagcccgcgagggctggatccgaggtggagtggacagaagacctggcacttgctgggatcacaggcgtgagccacgacacccggcccactgatggagttataaagctctttaacccggatgcctgtgggcgccgggtgcagacagtggtgctgtatgggacagtgggcacaggcaagagcacgctggtgcgcaagatggttctggactggtgttatgggcggctgccggccttcgagctgctcatccccttctcctcctccctgtgccaacttgtggcccagcgctacacgcccctgaaggaggttctgcccctgatggctgctgctgggtcccacctcctctttgtgctccatggcttagagcatctcaacctcgacttccggctggcaggcacgggactttgtagtgacccggaggaaccgcaggaaccagctgctatcatcgtcaacctgctgcgcaaatacatgctgcctcaggccagcattctggtgaccactcggccctctgccattggccgtatccccagcaagtacgtgggccgctatggtgagatctgcggtttctctgataccaacctgcagaagctctacttccagctccgcctcaaccagccgtactgcgggtatgccgttggcggttcaggtgtctctgccacaccagctcagcgtgaccacctggtgcagatgctctcccggaacctggaggggcaccaccagatagccgctgcctgcttcctgccgtcctattgctggctcgtttgtgccaccttgcacttcctgcatgcccccacgcctgctgggcagacccttacaagcatctataccagcttcctgcgcctcaacttcagcggggaaaccctggacagcactgacccctccaatttgtccctgatggcctatgcagcccgaaccatgggcaagttggcctatgagggggtgtcctcccgcaagacctacttctctgaagaggatgtctgtggctgcctgggaggctgggcatcaggacggaggaggagtttcagctggctgcacatcttccgttcgggatggccctgaggtttttcctgggccccatgtgtgggagccagggcttgcaggcacctttcgtgtttcaacgtgcccgccatgcaggaatacctggctgccctctacattgtgctgggtttgcgcaagacgaccctgcaaaaggtgggcaaggaagtggctgagctcgtgggccgtgttggggaggacgtcagcctggtactgggcatcatggccaagctgctgcctctgcgggctctgcctctgctcttcaacctgatcaagcaccccaagccgcccacgcccccacatggttccctgttcaccccttgctcctctcccagcaggaaactgctgcttcctgcaaaggaggcaggcctatcctctgctttgcaggtccagaaactcgattgtgtctgctcctccagaggtgattag

SEQ ID NO: 158002 - DNA, 3511 bp, Homo sapiens
atgtcccagcctgacctcaccaccgccctgattggccctaagctacatctccaggcccctttccctgacacatttcccttatcttcccactcagaagctatacagcggcaccgccggaacctggctgagtggttcagccggctgcccagggaggagcgccagtttggcccaacctttgccctagacacgggccacgttgaccctgtgatccgcgagagtacccctgatgagctacttcgcccacccggaggagctggccctggagcatcagccaccccaggccgggctccccccactggccttgtctcagctctttaacccggatgcctgtgggcgccgggtgcagacagtggtgctgtatgggacagtgggcacaggcaagagcacgctggtgcgcaagatggttctggactggtgttatgggcggctgccggcattcgagctgctcatccccttctcctgtgaggacgtgtcatccgtgggccgtgccccagcctccatgtgccaacttgtggcccagcgctacacgcccctgaaggaggttctgcccctgatggctgctgctgggtcccacctcctctttgtgctccatggcttagagcatctcaacctcgacttccggctggcaggcacgggactttgtagtgacccggaggaaccgcaggaaccagctgctatcatcgtcaacctgctgcgcaaatacatgctgcctcaggccagcattctggtgaccactcggccctctgccattggccgtatccccagcaagtacgtgggccgctatggtgagatctgcggtttctctgataccaacctgcagaagctctacttccagctccgcctcaaccagccgtactgcgggtatgccgttggcggttcacgtgtctctgccacaccagctcagcgtgaccacctggtgcagatgctctcccggaacctggaggggcaccaccagatagccgctgcctgcttcctgccgtcctattgctggctcgtttgtgccaccttgcacttcctgcatgcccccacgcctgctgggcagacccttacaagcatctataccagcttcctgcgcctcaacttcagcggggaaaccctggacagcactgacccctccaatttgtccctgatggcctatgcagcccgaaccatgggcaagttggcctatgagggggtgtcctcccgcaagacctacttctctgaagaggatgtctgtggctgcctggaggctggcatcaggacggaggaggagtttcagctgctgcacatcttccgtcgggatgccctgaggtttttcctggccccatgtgtggagccagggcgtgcaggcaccttcgtgtttcaccgtgcccgccatgcaggaatacctcgctgccctctacattgtgctgggtttgcgcaagacgaccctgcaaaaggtgggcaaggaagtggctgagctcgtgggccttgttggggaggacgtcagcctggtactgggcatcatggccaagctgctgccactgccggctctgcctctgctcttcaacctgatcaagcaccccaagccgcccacgcccccacatggttccctgttcaccccttgctcctctcccagcaggaaactgctgcttcctgcaaaggtggttccacgagtgtttgggcgcatggtgggtaaaagccgggaggcggtggctcaggccatggtgctggagatgtttcgagaggaggactactacaacgatgatgttctggaccagatgggcgccagtatcctgggcgtggagggcccccggcgccacccagatgagccccctgaggatgaagtcttcgagctcttccccatgttcatgggggggcttctctctgcccacaaccgagctgtgctagctcagcttggctgccccatcaagaacctggatgccctggagaatgcccaggccatcaagaagaagctgggcaagctgggccggcaggtgctgcccccatcagagctccttgaccacctcttcttccactatgagttccagaaccagcgcttctccgctgaggtgctcagctccctgcgtcagctcaacctggcaggtgtgcgcatgacaccagtcaagtgcacagtggtggcagctgtgctgggcagcggaaggcatgccctggatgaggtgaacttggcctcctgccagctagatcctgctgggctgcgcacactcctgcctgtcttcctgcgtgcccggaagctgggcttgcaactcaacagcctgggccctgaggcctgcaaggacctccgagacctgttgctgcatgaccagtgccaaattaccacactgcggctgtccaacaacccgctgacggcggcaggtgttgccgtgctaatggaggggctggcaggaaacacctcagtgacgcacctgtccctgctgcacacgggccttggggacgaaggcctggagctgctggctgcccagctggaccgcaaccggcagctgcaggagctgaacgtggcgtacaacggtgctggtgacacagcggccctggccctggccagagctgcccgggagcacccttccctggaactgctacaagctctactgaatggcatcgactttctctctcctgccagcctctacttcaatgagctgagctcagagggccgccaggtcttgcgagacttggggggtgctgctgaaggtggtgcccgggtggtggtgtcactgacagaggggacggcggtgtcagaatactggtcagtgatcctcagtgaagtccagcggaacctcaatagctgggatcgggcccgggttcagcgacaccttgagctcctactgcgggatctggaagatagccggggtgccacccttaatccttggcgcaaggcccagctgctgcgagtggagggcgaggtcagggccctcctggagcagctgggaagctcctggaagctgagaccactggcgggcagggcaccttagcttattgtgaccacttggcccttaaaccttttccctctgtggcctcctggctttgcactgctccctctagaaagattcctttcaggtctggaggcagaggaatgggcatagctgagccagttgccctcctatttcatgtttgaccaggactgagtctggaatctccaagttaaagatggtgaatcaatgcttcgggcttggagatggaacatgcctcctatccaattgcagctagaaggaccaaagcatgtggcatttggatggccagagtgccctgaagcaccactaccaaccttgcctccccctcctctcaaagagcctctgattgtgtcaccaaggggctcacatcttatgtctgccatgccaggggtgtcgccatccagatgtgttggaagcttcccctcctgccttatgctcacctgtggacaccgaggatgccctcacattggtgctttctcctcatcctcatgccccctttgccacaatggtatgatggcttggtagcccctcgaggcagatgcacctgacttgctgctattaaaaagccgtgtgccttcaaaaaaaaa

SEQ ID NO: 158003 - DNA, 376 bp, Homo sapiens
  misc_feature (1)...(376): n = a,t,c or g
ccgttcctccccccatatatgaaaatcaactcaagatgatctaaagacataaatgtaaatttcaaatctagnnnnnnnnnnnnnnnnnnnnnnnnnnnnnnnnnnnnnnnnnnnnnnnnnnnnnnnnnnnnnnnnnnnnnnnnnnnnnnnnnnnnnnnnnnnnnnnnnnnnnnnnnnnnnnnnnnnnnnnnnnnnnnnnnnnnnnnnnnnnnnnnnnnnnnnnnnnnnnnnnnnnnnnnnnnnnnnnnnnnnnnnnnnnnnnnnnnnnnnnnnnnnnnnnnnnnnnnnnnnnnnnnnnnnnnnnnnnnnnnnnnntttataaaagaaaaacacccccattaaaaagtgggtaaaagacatggacagacctcgtgcc

SEQ ID NO: 158004 - DNA, 468 bp, Homo sapiens; identical to SEQ ID NO: 108145

SEQ ID NO: 158005 - DNA, 378 bp, Homo sapiens
tatagaaaaccaaagctgacaacattattaatggtgaaagactagatgcttttcccctaagaccaggaacaagacaaggtatccattcttgctacttctattcaacattgtaccagaggttctagtcagggcaattaagcaagatctcgatgacaataataatagttatctaaattaggaaggaagaaggaaaactatctctatgtacagatgatatgattttctatgtagaaaatcctaaggaattcattaaaatactattggaacaaataagttcagcaggttgcagagtacaagatcaatatacaaaaatcagttgtatttctatatacttggaatgaacaatccaaatatgaaattaagataatttctcgtgcc

SEQ ID NO: 158006 - DNA, 1101 bp, Homo sapiens
tcaaaaattttctttgttgaagtagaattgaacctttctaggatccagactggaatatcggtgacagcatttgcgcaggctctttgccaaagtccgagggccacataagaaaactcccactacagacttggggtgggaggtagctattgtagaaaactcattgtcccacattggtctcccaaaggaggttttctgtttcagacctgtcacgatgtcagtggccttgtcaaagtttaatgctgcatgaccaacaatattgctgtcccatccggtgaggaagagacggtagtttagaaaacccactttgcctaattcctccatctcctgttccagggaagtcaacaggttgttgaaccaggaaaaggcacctgtctccctgcagatccagtagaaatagatcttttttgttttgaggttgtggtctgcacactggaatttgtaccagatggatttcaagatagaagcaaagggggtgaccccaattcctgctccaaccagcacagccacttcatactggaaaacatcctcactggctgtgccaaagggaccatccacttcaatcctgggaattggtgaatattgttgttcgaaagcccttatgagattttctgtccagtcccctgctgctcggatatgaatggagaagaaatcttcctctggagcagaggtcaaagtaaaaggatgccattccaggagagagattgaggggcaattaacaaagatatactgccccacttccatgctgaagccacgcttgttcatctgcaattccaaaactttggatgggtgcataacaaccacccactgtgcccagtttccaagttcctctttcagggtgacaacataaaaatttagttctgtagtccggtagaagataactcttatcacagcaagaggaaagtgcatattctttaccttggtaatcacaaccttctgctgggagcggtaaaaccggaggatcctttcacagatataaagaatgaccggtgcaaggatccacttccaagagcctgtaatcccagcaccttgggaagccaaggcgggtggatcacttgagatcaggagttcaagaccagcctggccaacatggtgaaaccccat

SEQ ID NO: 158007 - DNA, 3104 bp, Homo sapiens
gatcacattgcatctaaaatatagtaattaacaagactttattcttaaataaaatgttgctttaataaaatactgcacatatatatttttcttttcaaagatgttatgagcaggatggttgttttgaatgataatgtatggtatactatataattagtagcaaaaacaaggactttcaaataaataggcttcagcttttttttggggggtaggtgggtggggcagaaatactctgcatatcagatgagattgaaaaacaggcaaggagggcccggtgcggtggctcatgcctgtaatcctagcaccttgggaggccaaggcaggtggatcacttgaggtcaggagttcgagaccagcctggccaacatgatgaaatcccatctcttctaaaattctaaaaatataaaaattagcctggcatggtggtgcacgccggtagtcctagctactgaggaggctgagacatgagaatcgcttgaaccaggaggaagaggttgcagtgagccaagatcgtgccactccactccagcctgggtgataggtgcgccgtctcaaaaaaagaaaaaaaaagaaaagcaggcaaggaggagttggctagctggacatagtggcttgcacctgtatgccagctacgcgggacgctgtggtagggtgggaggactgcttgagcccaggaattcaagagcagcctgggcaacatagtgagaccctgtctcaaaaaaaaaaaaaaagagagaagatgttgacttttcctttaagaatgtgctcttggttggcttgggatagagaaaggagtcatatttaccctctaggaattaaaagtaacactggagtgacctgagagaggaatcctggccctccccttgtcattttgcccaagatttcagagcctaattgaaacatacaaaagcaccaccagagtcgccctctagccttctgaagatccagtggggtggatgtggagccagtggaagaatctggaaaaagcagagctgggcttataaggaggatgatgtaatgtgatagaggagatgtcagctatacctgaatgttttgacctagtgcaatatctgggtcactgcagccattcagaaatccaaggaaatacgatgaacatgtatgcacagtaaaaaaaatactagaagcagaattaccccactaaccatctattaattatacttaagctggtcccccattactgagagtgcattactatataattaaagccatttagacatggcttggcatagcacttgcatgatacgccacatactaaaaactcctccttagggcagccttcttttcctatcagattcagagctcctttctccttttctcggtaagaatgaacacagggagggaaaattctcagttaggatctccagcctgggggggcttgtgagctgggccctacctggaagtcttgcttttgtatatgtgacggaagaataagtaagtcttcaggggaaaatccagaacaacccaacttctagcaacaggtctttctcaatagcttcattagcttttcaaaaacattacccaatatgattaggattgtaaaagaggaccacctgagctgacagcacctctggcctcaaaatgggctggcagaagaccattcaaagataaaatgggctgttccagtgggagtgagctccctacttgtgagagtattcaagtagagagaggaggacctcctggcgggaaacttgcatatggtgtacgtgatatggcacctccatctgaaagagtctgtgctgagggcaggctggagtcacacatgggaataagccaggcgaccctccaatctgccatccgtgatttaattccacgacggcagaatggatggcatgtcacttgctccaaataccagtgcccattgcttcaaatagtagtcctcctcaatccctggcatggttgttgactttaaacaccgaagactccacatctcttacaacgacttcttgtgcggctggcccaggacctgggcgaggcagtaggggatgacactgacggatgccaggggcactaccgcactcttgcagaaggacaagacgtagaagaccagctcgacttgggatgggggtttcaaggagtcaaagacgtgcaggaggacgagggaggctacaatagagctgaggcggaatgggagccacttgctgagtttccccttgcagctctccctgtacatgctggagttgagagccagccccaggccaaagagcgtgcccaggttcttgaggaggctggcaaagggtgtggtgtcaatgtggacccattctggctgctcgcaccacctctgggctttctccagagtccacaggaggtctacacccagtcccttgagcagcagataaaatccgatggcgaagctgaacaggaagaaggtaatgagaaaatatttcttgaggctggcattatagatgctgtggatgtggctgaaagtttctgtaacagcaatgcctgacaggactccagcaacaacttgatgaggaaaatgagcagcaaggtagattcgtgacagacagacattcagctgcacagcccagaatcccaaccacaaaatgacattcaagcaccgaaatctgtaggtcggctttatctttccctgaaagatggaaagagtagatgtgaccatcacgtagtatacacctgctgtgcccatggcatggccagaggggctccctggtccagtctcacaggttacagggaactgctttatcaggggcacggaagtgttgctgtagtagtcagtatccaaaacccaccagtatggacgctgtccaaagagaatccacttaaagacgaggttgagccagtctccaatcacagctacccaaaggagtttaatgcccacagcttcctgaagatggaaccagatggggaagaggacgtagaaggcattcctgaggtctgcgatcacggacaccaagatgaaccagtcctgggagtcttggtaattcacctggaggtaatgtgttgactggatcccaaagtcatggagaacattcattccttcctccatcctcatttccttggcacctcaggaagatgtcagcagagcccttgcagttattccaggcttggtggtgattgctctgcta

SEQ ID NO: 158008 - DNA, 427 bp, Homo sapiens
caagtcactgatgtttgtgtatgtctacgtgtatgtgtgcttgtgtgtgtgtttctgtatgtatgcatatttgtgtctgtgattgtgtgtgtttgtatgtgtgtgtgcgtgcgcatatatttagcttttcctcataaatctttattattaaaatgagctcacaacagaagaggatgagaactcttgggctatgtaggaaatgcagggccagagggtgtattaggatcaagaagaggccagacccccaggtcgtggacctcctcctgccatgggcccacagcccatgtggttttgtgaggtagcttgaaaacctggttaacctggaatgtaatttttaaacatgattgtactttgaggaaagaggctgttatttcttgttagagggatctgggcatcttttctgctctgttggctttggttatgctct

SEQ ID NO: 158009 - DNA, 350 bp, Homo sapiens
  misc_feature (1)...(350): n = a,t,c or g
nnnnnnnnnnnnnnnnnnnnnnnnnnnnnnnnnnnnnnnnnnnnnnnnnnnnnnnnnnnnnnnnnnnnnnnnnnnnnnnnnnnnnnnnnnnnnnnnnnnnnnnnnnnnnnnnnnnnnnnnnnnnnnnnnnnnnnnnaagcaataatggccccaaactttccaagttaggtgaagacataaagtcaagaagatgggcaaacccccaataggataaagctaaagaaatccacatccagacacataatcaaattgctgaaaactaacggcaaaataaaatatcttgaaagcagtgagagaaaaatggctcattacctgtaggagaacagtgatttcaatgactatggatttct

SEQ ID NO: 158010 - DNA, 330 bp, Homo sapiens; identical to SEQ ID NO: 107849

SEQ ID NO: 158011 - DNA, 373 bp, Homo sapiens
tagatcaggtgggatttgggtagatggagaagagaaggagggagagccgggatgtgagaacctaagctcagaggtaggagcatgttgggtatatttgaaggactccaaatcaaccagcttgtagagacagggctgaaaagatggttgcgtcttagaaacagtttcctcaaaagattttgttaccttcttaaaagcctcagtagaagcagtagaaccaccaccaccacagctttcgtttgtgatgggcgatggattatgcaaatacctggaagtgtcctaccttttccacagtgctggtaacctcccaaccccttttggctgccagttttttgagggcctccacattgctgtcactcagggatgcctgctagct

SEQ ID NO: 158012 - DNA, 796 bp, Homo sapiens
  misc_feature (1)...(796): n = a,t,c or g
aaggaaaatctcatcacgtttcccagaatccaacccatttcaaaggatgatttcagacgctatcggggagctattgcacgcaagcgaattcgcctaggcagaaaatatgttatttcccacaaagaagaggttccactttgcatacactgggatatcagcaagcaggcatccctgagtgacagcaatgtggaggccctcaaaaaactggcagccaaaaggggttgggaggttaccagcactgtggaaaagataaaaatatatactctggaagagcatgatgttttatctgtttgggttgaaaagcacgtggggaagtccagcacatttgacttatccgtctcttgtctgactttacaaagcgacctttgtggggacccccattttgtgtccctgtgaagtcatagactggggtgagtgaaggatgaccagctgtatccacatcacctgtcctatactgaatgatgacaaacccaaagacttggtagtacttcgtattcacgaaggaaaacccctcaaagatggtaacacttaccacagtgggcagtgaagtcggtcattttgccatcggtccccccgtctccacagtacatcagaagtgaaatcatatgtgccggatttctcatccatgctatttgacagcaattcatgcattcgtatcttactttaaccatatgtctgctaggcatccttccttactttggctgggaaatcttgggtgggctgggtccaaaatccattggaaggaaacagcagcctcttgtatacagttcttaggggatcctccctgatggngggg

SEQ ID NO: 158013 - DNA, 432 bp, Homo sapiens
cacgtttcactgagcatcatcgaacgctcactggggagaaaccttatgaatgtaaagagtgtggaaaacgattaagctccaacacagccttgactcagcatcagcgaattcacactggggagaacccctttgaatgtaaagagtgagggaaggcattcaatcagaaaataaccctgattcagcaccagcgagttcacactggcgagaaaccttatgagtgtaaagcgagtggaaaaccttcagctggtgtggaagattcattctgcatcagatactacacactcagaagacacctgtccaagcatagggctatccatagttaggcccactgagcctctccttttttctctttattttcatgctttttatcagtgtcctcgctgtccttcctggatagacacttggctttcatcatgaactcttctttaagtt

SEQ ID NO: 158014 - DNA, 374 bp, Homo sapiens
actggagttaccccagcggccacccaggcctcatggacccctcccccgatagacgggcccacgacccaggaaaagctttcctaggctaacacggcccctgggaccgagggggagcagcaggtgcatggcgagaaaaaggaggatccagcagtgccctcagccccaccctgatatgaggaatccacctctggggaggggaggaaggcatgggccttcccaccagcccccacaggggagcctttccaccctaactgggcctatgtggaccccaacagcaactcccgctatgacaacggagtcccgcaccggagaccatgagctctgaaccactttcagctgggatgaccagaaagttcgtcgagtctttgtcagat

SEQ ID NO: 158015 - DNA, 512 bp, Homo sapiens
gccgccccggagtccgcgccgcgactaccgggtcgacgatttcgccgcggaggagggaagagacgcaggcaggctgcggttacccaagcggccacccgggcctcagggaccccttccccgagagacggcaccatgacccagggaaagctctccgtggctaacaaggcccctgggaccgaggggcagcagcaggtgcatggcgagaagaaggaggctccagcagtgccctcagccccaccctcctatgaggaagccacctctggggaggggatgaaggcaggggccttccccccagcccccacagcggtgcctctccaccctagctgggcctatgtggaccccagcagcagctccagctatgacaacggtttccccaccggagaccatgagctcttcaccactttcagctgggatgaccagaaagttcgtcgagtctttgtcagaaaggtctacaccatcctgctgattcagctgctggtgaccttggctgtcgtggctctctttactttctg

SEQ ID NO: 158016 - DNA, 399 bp, Homo sapiens
ttttttttttttaattatatcacaagatataataaacattatagatattataagatgtcaaaaaaaagatgccataaaatctttcagatgattgacatgttaaatgcggcctcctgtgccgccctggggcgccactctcgctgggttcttggcggagctcaccctactccacctgctcagcccaggctcctgcaccctggagtcacgccatgggagcaaggaccttgccgccgcggcccttccgaagtttgtggacactcttctgccacaccaaaagtttcaccatcagctgcgatgccgactgaggcgcagagacccctccgggatgtggaccaggcagtgactttgctgggcatccgcagtgctgaccaccccaagtgcagatccccacttcgtgtt

SEQ ID NO: 158017 - DNA, 430 bp, Homo sapiens
tttatataagggtaggatagtataattgtgcagtaacgttttttgtgaaagtggtggaaagtggattgcgttggcgacatgctggaatgtgcttccattggcagaagtgaggctttcaaaactagtagttttcagttttctctagcaacttccgaagtttgtggacactcttctgccacaccaaaagtttcaccatcagctgcgatgccgactgaggcgcagagacccctccgggatgtggaccaggcagtgactttgctgggcatccgcagtgctgaccaccccaagtgcagatccccacttcgtgttcctcctcctccacgttccacatccaaagttctcgcaccatttcttgcatccagtgaccacctggagcacacctgcagttcgcaagttaggcttcctgctgcagtgaggggagcaagcactg

SEQ ID NO: 158018 - DNA, 1935 bp, Homo sapiens
  misc_feature (1)...(1935): n = a,t,c or g
gggcgaggcctcaggaggacagcagccactgctggcaagacgttggtgttctcctgttgaactgcacaggctgtcagcatcagacaaggtcgctctgtgaccatgatgggtcaagacaaagcaaggtcacttggtagctatcatggctcagctcatgcaaaacatggacaaaaatgacctcacaccccctcccctgtgtctatgtcatgaccactacctctgtcaattgcagcgttagctttggtcttgtcttccttccttctaggtaagattggggaagatgccaggtgatagaatccaccctgcctctgacagcatccaatctggagcaaaggcttctttcaaccttcccccaagctcccaatacaagcccaaattctggaacaagtcctttccaacacctccttcagagaagctccctggctccaggcagtgcttgctcccctcactgcagcaggaagcctaacttgcgaactgcaggtgtgttccaggtggtcactggatgcaagaaatggtgcgagaactttggatgtggaacgtggaggaggaggaacacgaagtggggatctgcacttggggtggtcagcactgcggatgcccagcaaagtcactgcctggtccacatcccggaggggtctctgcgcctcagtcggcatcgcagctgatggtgaaacttttggtgtggcagaagagtgtccacaaacttcggaaggtatccgctacatcctccatagccgtgtatccctgcccagggcaatcttctgggggagcggaaagtcctgctcccgggccagggctggctggctggagccacttgtgcggcgcagccctggcggaggttcaggcggccccggtgtcgcaagcggctgtgagtgatgcctccctggggccggagtggtcccaggaaggctgcagaccagggctgaccagcgggcagcatggtggccgcgatggaaggtgacggggttcgcagcgccagggggacccagcagagcccgagcccgggaattcccgcatcttcagcagcattgtaagtaggcctggtgctggtgaagtggcggccagtgcacaaggcctacgacccagtcccagaggccagcccattgtcagctaacttcaggaaccccgggccagctgaggccccgggccccatgggcaagacaaagggcagagggtccgcaggcggggccgagtgcaggcagtgcaggcctggctccaccgccgcggagctcgcagggcgcagcaggcatcgggcagtgaccagggcttccagaggaggctgtgcacccctgcaaaggctcctgccctgcgtccagcctatccgcggggactccacgtgcaccccctcctcattgtccttgtctagggccgcggcggcaaggtccttgctcccatggcgtgactccagggtgcaggagcctgggctgagcaggtggagtagggtgagctccgccaagaacccagcgagagtggcgccccagggcggcacaggaggccgcatttaacatgtcaatcatctgaaagattttatggcatcttttttttgacatcttataatatctataatgtttattatatcttgtgatataattattaacaccacttcagtgtgattattatgattatttttataccaacacatcttcaattattaatattcccagttgctagagaaaactgaaaactactagttttgaaagcctcacttctgccaatggaagcacattccagcatgtcgccaacgcaatccactttccaccactttcacaaaaaacgttactgcacaattatactatcctacccttatatactttttgtgtgtgtgtgtgtacttgtatgcatgtatgttacacatgnnnnnnnnnnnnnnnnnnnnnnnnnnngggtgccagagatgaacaagtattataaaattaaatgcacacgagtcgtgtc

SEQ ID NO: 158019 - DNA, 429 bp, Homo sapiens
  misc_feature (1)...(429): n = a,t,c or g
aaataaaatnnnnnnnnnnnnnnnnnnnnnnnnnnnnnnnnnnnnnnnnnnnnnnnnnnnnnnnnnnnnnnnnnnnnnnnnnnnnnnnnnnnnnnnnnnnnnnnnnnnnnnnnnnnnnnnnnnnnnnnnnnnnnnnnnnnnnnnnnnnnnnnnnnnnnnnnnnnnnnnnnnnnnnnnnnnnnnnnnnnnnnnnnnnnnnnnnnnnnnnnnnnnnnnnnnnnnnnnnnnnnnnnnnnnnnnnnnnnnnnnnnnnnnnnnnnnnnnnnnnnnnnnnnnnnnnnnnnnnnnnnnnnnaatggtaatttaaaagttacatacaaaaaaagtcaaggactaggcacattcacagatgaattctatcagatactcaaagaagaattgatatcaatcttattgacattattccaaaagatacagaaagagtgaatn

SEQ ID NO: 158020 - DNA, 167 bp, Homo sapiens
ccgtctataccaaaattctaagggctgaccgagatatgctaactggatacccttgctgctccacaggcttgcttactgcggacgactaatgataagataataccctggaggtaaagctcttcgcaggggtcctttctacttggagggcctggacctcagccccaaag

SEQ ID NO: 158021 - DNA, 406 bp, Homo sapiens
gccaagatttcctgctgacccctgcaggagctgggagggcagagcctcagcctccactatgttgggggaagggctcccgggcccccggcacctggacacccacctgtccagagcctacagagaccctgcgtccccacacagcagctcctcacaccagagttctggtgcccagcactcctcagcagcagtgaggccacaggcagggcacaggcctctgtccctacgccaggtcctcccctaaaagggcagtggcagcaggggccgccgcagaaggaatggcagatgagacccaaagcctttggtcatcaccccggaggtctatgccaaagcctgggtggggctcccaggagatggaacagggacacataccaggcaggtccacgccaggggtgcggtgccctgatgt

SEQ ID NO: 158022 - DNA, 4221 bp, Homo sapiens
cagcggcagtggagttcgctgcgcgctgttgggggccacctgtcttttcgcttgtgtccctctttctagtgtcgcgctcgagtcccgacgggccgctccaagcctcgacatgtcgtacaactacgtggtaacggcccagaagcccaccgccgtgaacggctgcgtgaccggacactttacttcggccgaagacttaaacctgttgattgccaaaaacacgagattagagatctatgtggtcaccgccgaggggcttcggcccgtcaaagaggtgggcatgtatgggaagattgcggtcatggagcttttcaggcccaagggggagagcaaggacctgctgtttatcttgacagcgaagtacaatgcctgcatcctggagtataaacagagtggcgagagcattgacatcattacgcgagcccatggcaatgtccaggaccgcattggccgcccctcagagaccggcattattggcatcattgaccctgagtgccggatgattggcctgcgtctctatgatggccttttcaaggttattccactagatcgcgataataaagaactcaaggccttcaacatccgcctggaggagctgcatgtcattgatgtcaagttcctatatggttgccaagcacctactatttgctttgtctaccaggaccctcaggggcggcacgtaaaaacctatgaggtgtctctccgagaaaaggaattcaataagggcccttggaaacaggaaaatgtcgaagctgaagcttccatggtgatcgcagtcccagagccctttgggggggccatcatcattggacaggagtcaatcacctatcacaatggtgacaaatacctggctattgcccctcctatcatcaagcaaagcacgattgtgtgccacaatcgagtggaccctaatggctcaagatacctgctgggagacatggaaggccggctcttcatgctgcttttggagaaggaggaacagatggatggcaccgtcactctcaaggatctccgtgtagaactccttggagagacctctattgctgagtgcttgacataccttgataatggtgttgtgtttgtcgggtctcgcctgggtgactcccagcttgtgaagctcaacgttgacagtaatgaacaaggctcctatgtagtggccatggaaacctttaccaacttaggacccattgtcgatatgtgcgtggtggacctggagaggcaggggcaggggcagctggtcacttgctctggggctttcaaggaaggttctttgcggatcatccggaatggaattggaatccacgagcatgccagcattgacttaccaggcatcaaaggattatggccactgcggtctgaccctaatcgtgagacttatgacactttggtgctctcttttgtgggccagacaagagttctcatgttaaatggagaggaggtagaagaaaccgaactgatgggtttcgtggatgatcagcagactttcttctgtggcaacgtggctcatcagcagcttatccagatcacttcagcatcggtgaggttggtctctcaagaacccaaagctctggtcagtgaatggaaggagcctcaggccaagaacatcagtgtggcctcctgcaatagcagccaggtggtggtggctgtaggcagggccctctactatctgcagatccatcctcaggagctccggcagatcagccacacagagatggaacatgaagtggcttgcttggacatcaccccattaggagacagcaatggactgtcccctctttgtgccattggcctctggacggacatctcggctcgtatcttgaagttgccctcttttgaactactgcacaaggagatgctgggtggagagatcattcctcgctccatcctgatgaccacctttgagagtagccattacctcctttgtgccttgggagatggagcgcttttctactttgggctcaacattgagacaggtctgttgagcgaccgtaagaaggtgactttgggcacccagcccaccgtattgaggacttttcgttctctttctaccaccaacgtctttgcttgttctgaccgccccactgtcatctatagcagcaaccacaaattggtcttctcaaatgtcaacctcaaggaagtgaactacatgtgtcccctcaattcagatggctatcctgacagcctggcgctggccaacaatagcaccctcaccattggcaccatcgatgagatccagaagctgcacattcgcacagttcccctctatgagtctccaaggaagatctgctaccaggaagtgtcccagtgtttcggggtcctctccagccgcattgaagtccaagacacgagtgggggcacgacagccttgaggcccagcgctagcacccaggctctgtccagcagtgtaagctccagcaagctgttctccagcagcactgctcctcatgagacctcctttggagaagaggtggaggtgcataacctacttatcattgaccaacacacctttgaagtgcttcatgcccaccagtttctgcagaatgaatatgccctcagtctggtttcctgcaagctgggcaaagaccccaacacttacttcattgtgggcacagcaatggtgtatcctgaagaggcagagcccaagcagggtcgcattgtggtctttcagtattcggatggaaaactacagactgtggctgaaaaggaagtgaaaggggccgtgtactctatggtggaatttaacgggaagctgttagccagcatcaatagcacggtgcggctctatgagtggacaacagagaaggacgtgcgcactgagtgcaaccactacaacaacatcatggccctctacctgaagaccaagggcgacttcatcctggtgggcgaccttatgcgctcagtgctgctgcttgcctacaagcccatggaaggaaactttgaagagattgctcgagactttaatcccaactggatgagtgctgtggaaatcttggatgatgacaattttctgggggctgaaaatgcctttaacttgtttgtgtgtcaaaaggatagcgctgccaccactgacgaggagcggcagcacctccaggaggttggtcttttccacctgggcgagtttgtcaatgtcttttgccacggctctctggtaatgcagaatctgggtgagacttccacccccacacaaggctcggtgctcttcggcacggtcaacggcatgatagggctggtgacctcactgtcagagagctggtacaacctcctgctggacatgcagaatcgactcaataaagtcatcaaaagtgtggggaagatcgagcactccttctggagatcctttcacaccgagcggaagacagaaccagccacaggtttcatcgacggtgacttgattgagagtttcctggatattagccgccccaagatgcaggaggtggtggcaaacctacagtatgacgatggcagcggtatgaagcgagaggccactgcagacgacctcatcaaggttgtggaggagctaactcggatccattagccaagggcagggggcccctttgctgaccctccccaaaggctttgccctgctgccctccccctcctctccaccatcgtcttcttggccatgggaggcctttccctaagccagctgcccccagagccacagttcccctatgtggaagtggggcgggcttcatagagacttgggaatgagctgaaggtgaaacattttctccctggatttttaccagtctcacatgattccagccatcaccttagaccaccaagccttgattggtgttgccagttgtcctccttccggggaaggattttgcagttctttggctgaaaggaagctgtgcgtgtgtgtgtgtgtatgtgtgtgtgtgtatgtgtatctcacactcatgcattgtcctctttttatttagattggcagtgtagggagttgtgggtagtggggaagagggttaggagggtttcattgtctgtgaagtgagaccttccttttacttttcttctattgcctctgagagcatcaggcctagaggcctgactgccaagccatgggtagcctgggtgtaaaacctggagatggtggatgatccccacgccacagcccttttgtctctgcaaactgccttcttcggaaagaagaaggtgggaggatgtgaattgttagtttctgagttttaccaaataaagtagaatataagaagaaaaaaa

SEQ ID NO: 158023 - DNA, 1062 bp, Homo sapiens
ataagggcccttggaaacaggaaaatgtcgaagctgaagcttccatggtgatcgcagtcccagagccctttgggggggccatcatcattggacaggagtcaatcacctatcacaatggtgacaaatacctggctattgcccctcctatcatcaagcaaagcacgattgtgtgccacaatccgagtggacccctaatggcctcaagataccctgctgggagacatggaaggccggctcttcacagccttgcagaagaacccaactgaaaaaaaaattcctcaggctttacagcaagcaaactcvcactatgatttttacaattcctgattctdgtatccccctgggggtgtatcccagtttgcttctttagggtgggggtttattgacgttgtacatatatcccgatgtgtctgtgtgaatctttgvtcttttttgggcgagggcagagggcggttcttttttttagatattgttcctaaaaaggaataaatgcatacacctgtttgtcaaaacacctttgctttttgtgcaactgctttatattaacgatactaaaaaaaaatagctttgggaaaaaaaactactgtatgtaacgggatttgccaggaatatgcctgcacatgtattttaattttagttatccttgctttaagaatattggatgacatttcctgacatgtgggagggagaaactccctaactttttttttctgcttttaaawctgtaacatagttgaagatttcttttttctgttctcattgattggagcattttgtaacaggttttgtgtgtgtgtgtgtgtgtgtgtgcgcgcgtgcgtgtgtgttaatctgttttttgatacattcctatcccttgtgtttatcctaccactgccttcctggctatcttaaacaagttcatacatttgaaaagaaaacaaaatgttgtttaaaataatgttttctcctgctgcagtaaatattttgcgatgatgaaattccagggtcacacttttccaagtatataagtgaagctagtgattaacaatggggagtgtcaaaactattgaacttttgtat

SEQ ID NO: 158024 - DNA, 851 bp, Homo sapiens
atggcccgggggtcagctggtctcgtgctggggaggggtcggctccatgactggcagctcggctctggccacagtgcaccagggatgctggggcaggttgccctggctggtcgtacagagcttgctgtgcccagcctggacacccccggaggtggcgagcagcgggcatcagacctctcccgcaccctttcgtcttcccatgagtctgaccacacagtgcgggctgcccactcccctctgcccgctgaagccctgacccgctccctgccttgtctccagaatgtcgcccatgtgagattgtacatcaagtgccagcttgactttggtggggattcgattgctgtagggaccccgtggtatcccatggtgtggattcccgtggtgtggattcccgtggtgtggattcccgtggtgtggatggagcacactgtgctcattcacttgcctgtcggtgggcacgtgggcagctcccatctctcagctcctgtgaataacgtctgtgggaacgtggccgaggagcccccagccctgtgtgggaccaaggcttcaaagcccccactgaccccaccacccataagatcaaaagcgaaattcctcggtgggtcagtttgcttgggccgccataacaaactctcacagaccaggtggctgaaacaacagacgtttatttcccacgatcctggaggctggaagtccaacatcaagctgacccggccggcccaggacctgctgatgtccgtctgcatgaactgcaacacgcacggttccgaagacatggacgtcatctcacacctgatcaagatccgcctcaagcccaaggtcctcctcaaccacttcatgctgtgcatcat

SEQ ID NO: 158025 - DNA, 3235 bp, Homo sapiens
atctcctgcttctcccgctgggcggtctgcagctcacggttcagcatctccgtccgggtctcctcatccgtcatggtgcacggtgggtaggagtagttgttggtcatcaccatctccatgagcatcttcagggtcgggtactcctcccacgcagccaggccgatgttctctgggttgaatgcggcgacgaccagcaggaggggcccaggccttccaattaaagggtaaaaaatggcgaaggttcggaggctggtaaccccggtgggaagctggatgttttcagggtgaatggtaaggtgccacagattcaagaacggcgtcgaatcagctgggtcctccccaccttcagcacctccacatcaatccgcctgcacggcagccgcccgctttcaacagggtggtcaagcaagctccatggcgtccgcaggcccgagcgggagctcccgggacagcccgatgaccaggatgcgcatcagcgtgtcctccagaatgggcacctcggagcacagacgcaggaagaagttgcggtcactctcgggtggccagttgtcccacttgtagtaggtctccggctgctctgtggaacagcaccttgtgcaggcagtgcacgtagtccttaggggcgagcttgctgatggaggggaccacagtgtggagccaccagacggcatcccgctggatggcggcaatctggttctggaatgagcggagcacttccaggttcctcttttctcctttgtcccaggcgatgccggcctccttcacctgcgctgtgatgcccagcatcatggacacggccaggacgtcggtgatgtgcaccacgaagcgctcctgcaggtgcagcacggggtctgtatccagaagggacacccgggagccccactccacacccacgtgggcgcggcacggggtcttgaactccatctccaggtactgcggctccttgcgctcctgcatgagccccaggcagaaggcctggaagttgatctcgtgcttggtctgcttgatgatctcctttagcttggcccgcgaggcccgcaggtagtcgtccttgttggtcagcaggtcctggagcaccatggccaggaacttgggcgccagctctgagctgtgctgcagtgcggtatagaggacctgcatgttgttcgggttccgggcgctggagagctcattgaagatcaccaacttgatggtggtgcccaggttgtccttgtgcgcgctcagcagctccctgatgcacagcatgaagtggttgaggaggaccttgggcttgaggcggatcttgatcaggtgtgagatgaacgtccatgtcttcggaaccgtgcgtgttgcagttcatgcagacggacatcagcaggtcctgggccggccgggtcagcttggggttctgcagccacatctccagcttctgcaccgccagcagccgcacctccttatagccgcaggtggaggtgaggagccgcaggaggttcctggagacgttgtcgatgggctggcgccggttcagctggtcccgcagcatgtccaggacatactcctccacgctctccgcgagctcttcgtacctgggcatgagctggccctcctgcatcggggctcagcttctcctccgcgatcagcaactccgtcttggatgtcctcctcctccgttgagggaggggtgtgggctgctccctgcacccaggtcgcccgcaacgcggcccgcctccccctgcagcagcacgctcctggggggcattctggtgttgaaggccgtctggatgttgtccacaaacgtcttacagtgagggctgtccacccagatccgctcccccagggagtcctcgatgtacaccttgacaaagatctcgggccagttctcgtcctcctcgtaggcggccatgaggaggttacaggccagcacagacaccaggctgttccccttggccttgaagttgatggaggcgtcccgccgcaggaggctacacagagcctcaatgacgccctcagtggcgaagatgttgggcttgatcttggccaggtacatgaggctcaggtagagggtgctgtcaggcttggcgcgggtgaccttcagctgcttcacggccccgcacagcacgccctcgatcctgtcatcgttgccctccagctcggccgcctcgatctcatccagcagcaccgtgggcagcacttcaattggcaccacagatggctctttaatcgacggagaaatggctcgtttttctgccactgcagcctcagccaggcgccccagggcactcagagggggtgtggaggagagtttggggcgtttggtgagaccggtgagggccgaggcactggacaacgcggccgccgcatcccgcttgcgctcagaaggcaggccggaaggggctggcttcagcagggtggacgccgttttcgattcattggcctgaccctttgagcccagagcaatgaagtctcctgggggagggtgccctgagggtttggccgcggcgctgggccggcgcaccgtggtgggcttggcccggttcatcctgccccgtccctcgcggctcccggcggctgcggcgtcacctctggcccatcgcgaccggagcgccgccgccgccacccggccaccccggaatcggaaaccgatctcaccgccctcgaggacccgacttccggaacaaccggaaggaaaacagtgcggcgggaagcgggcccagaaggaggcgcgagaggcccgcggcgccggcctgatgcctgcagcgccccatggcggcgggaggcgggctggccggcgccgcgcgcatgtggtccggtccaggtgggtcggcggcgcggggcaggcgctggcctctccattcacaggtggtgctggtctaccggggaagagctcagaccctttggcttcaaagagcgggggccagtcccggttccacccccaggcaggaactctctcctgcctgaggctgggggctgccctgggagcatgcatcaggcactggcagggtggtgccccccagcccaggctgttctgtggagaagaggcagccagcggctgttcaccatcgcgggctgcagctgctgggcccgtgcgccaccgggcagcgagcctcctaacatgcagacccccgccagcaagcagaagctccgggggagttgagtgggggagcagcttctggctggagactaggaagtgctttccaacaattgtccgggggcttctgtcctgcaggtgcagacgacacggctggggctggtgcat

SEQ ID NO: 158026 - DNA, 1065 bp, Homo sapiens
tcatatgatcctatgtgtagaaaactccaaagactccaccaaaaaaaacctattagatctaataaatgaattcagtaaagttgcaggatatagaattaatatacaaaaatccatggccattttattcacaaataacaacctagctgagaaatcaagaaagcaatgcccatttatgataacataaaacacttaagaatacatttgaccaagaagatgaaagtgcatcagtatagcctgcacactgaaaaccacaaaacattgatgaaatacattgaagaggacacaaataaataaaacgatattccatgctcatagattggaagaattaatgttgttaaagtgtccatactacccaaagcaatatatagattcaatgcaatccctatcaaaatctcatcagcattcttcacagaaatagaaaaaaatcatacaatttctgtggatccacaaaagatcccaaataaccaaagcaattctgagaaaaaaaaatcctggaggcatcatacttcccaatttaaatttatattacaaaacgagagtaatcaaaacaatacagtattggcataagagatacacaggacagtgaaatagccagaaataaatccaaacatgtatggttaatgaatttttgacaagagcaccaaaaagacaaaatgaggaaaagggtagtctcttcaataaataggtgctgggatttccacatgcaaaagaatgaaattaggactcttacattacaccatacacaaaaatcaatccaaaatggataaaagatctgaatgtaaggacctgaagccataaatctaggaaggaaaacataaggggaaaagctccttggacactgggctttgggcaatgtttccttggatatcacaccaaaacctcaggctacaaaagcaacaataaataaatgaaattatatcaatctaaaaaacttctacacagaacgaaaacaatcaacaaaatgaaaaggcaatgtacagataaggagaaaatatttgcaaaccatatatcaggcaaggttttaatattcaggatttaggaagaactcatacaactcaatagcag

SEQ ID NO: 158027 - DNA, 413 bp, Homo sapiens
gcacactgctcccagagatccaggcctacacgcaggagcagtggctaggcagccctgaggaggccactgccctggcagagcggctacagcaggagtcagctgggccaggactccagatgaatgggggcctggtcctgggggcctgggtgtgccttccccctgctcacgacccccagctgaacccagcactggggcccagtcgtgggttggtggctgagagggccctgggggctgtgggaaagtgatggtgacaggtgggagtttggtggtcttggcttggacggcagagtcagagatctccagtcacacctgtgtgctccgcattgtgtcctgagaactgaaggtgcagagaagggtgggtcatgccaccgcatgccccttgttttctcctcagatctgctaggctgaacacc

SEQ ID NO: 158028 - DNA, 684 bp, Homo sapiens
ttatttgagtttaggcatgattcgaatgaagaggatcatgctaatgaagatgaagcagacgataatgagcatggcccagagcagccagttgactgacttctgcgtgtgctgctccagacgctctgactccgtcttcagtttctccaggttctggtccgccattttcagtgagtgtgacagggtctggttgtccttcttgatgacactctgggcggccaggtattggtcttgaggctccgggccagtcctagcatctcttccgccagcttttcctggaggttctgatgtcgctgcagagtccgtgcctagtagctcactccgcatctcgctggtgtaccgcgcccgtgactgcagatgcaccgtctttgtggcgggcactcgctctctggctgtggttggcacacggccaggggccaggaactggttggccagtgctttctctgaggaggaggtcagcttctcggcttgcagcatccccttcagaaaatccaccttccaggaatattcattgatcacctcagaggccggtttgctcgcgtggaccttcagggcctgcaacatgtcctctagggctcccacgtacttctccaggcgccactcgtccgggtcccgtttctccgctgccatcgcctcgcagcgggatagcagccgcaccaggtttagctccagcctcgacgccgccat

SEQ ID NO: 158029 - DNA, 888 bp, Homo sapiens
tttttttttttttttttgggcgggggtctttatttgagtttaggcatgattcgaatgaagaggatcaagctaatgaagatgaagcagacgataatgagcatggcccagagcagccagttgactgacttctgcgtgtgctgctccagccgttctgattccgttcttcagtttctccaggttctggtccgccattttcagtgagtgtgacagggtctggttgtccttcttgatgacactctgggcggccaggggtattggtcttgaagctcccgggccagtcctaagcatctcttccgccagcttttcctggaggttctgatgtcgctgcaggacgaggtcttagctcagctgccgactgcttctcactcactgggctggggaccctggccactccagttctcttccttacgtccaatctcaagcttctgcaagagtccgtgcctaagtagctcaattccgcatcttcgctggtgtaccgcgcccgtgactgcagatgcaccgtctttgtggcgggcactcgctctctggctgtggttggcacacggccaggggccaggaactggttggccagtgctttctctgaggaggaggtcagcttctcggcttgcagcatccccttcagaaaatcccaccttccaggaatattcattgatcacctcagaggccggtttgctggaaggcaggaagaagaaaaacaaaacctcgcgtggaccttcaggcgcttgaaacatgtcctctagggctcccacgtacttctccaggcgccactcgtccgggtcccgtttctccgctgccatcgcctcgcagcgggatagcagccgcaccaggtttagctccagcctcgacgccgccattatcgcccggccctacaccaccccttccgccggc

SEQ ID NO: 158030 - DNA, 1867 bp, Homo sapiens
ttttttttttttttttttagcacaccacagccaccatacagacaggagtgcagcccctcctccctaggaacccccacccctactcttcactaggcagggcccatggctcatgaatgcagaacaggcaccccagccatggctgaggcatacccactgttagtgacacagagtttccctgagaagaggctcccaaaggcatacgacagccccttggccactgccacagttaacagtggctatccctcctgcccttgggactaggggaggacacaaagagcctaagggctaacacttcaaacttagagttacattcacaggccaccatatgggaggagggaggaccaacctcttcctccctgtggaggcctttcaacttccctggttccccaacaaacaggaaccccaagctcatgccagcagtgcagccgccccatcccagtggctgaacaccctcagtaacagtggctccacatttcttggaggtggagcccctaggggcaatcaaaagcctctctaccactacctctgccatggaacagtacttgctaccctcagactaacaaagaaacgaagacccaaagtgccttatccacgccttcgacaaactgcaatcaacccaaggagagaaggccagtctgtctcccatgggtcccgcccacctcctgttcatcaacagacagggaacccccagcttgggcccacagcacagaccctccatcctgtgatggcactgctaaagtcccttcctctgctggctccaagttggggaggaaacatcaccccagagctgcagtgggcagcctgggagcgtcaagccacaatctaaaggcaatgggagaggaacccacactttgacagcattgagagggagcaaggttacaactgtgaggaaaccacacgaccaaggaagaagctatcaactgatcaatacacttaagcaccacctactggatcacatcccaaagcttcaacaccaaaaatacgctgctgtgttagtccgttctcacgctgctatgaagaaatacccgagacagggtgacttataaaggaaagaggtttaattgactcacagttccatatggctggagagccctcaggaaacttacaaccatggcggaaggcaaaggagaaacaggcaccttcttcacagagtggcaggacagagtgagtgccagcaggggaaatgctggacacctataaaaccattaggtctcatgagactcactcactatcacgagaacagcatggggaaaaccacccctatgatccaattacctccacctggtcccacccttgacacgtggggattatggggattacaattcaaggtgagatttgggtggggacacagagccaaaccatatcgctaacatacccatccccatgaaatcaaacaaaagaagtcagcaacaaataaagaccttgcacaaagcttggaaccctatgaaaaccatcccagaatggaagtctattaattactcaaactacactgcagttaaagggattttttagcacgctgcagccgccatacaagcaggagtggcagcctttcctccctaggaacccccgcccctactcttcactaggcagggcccatggctcatgaatgcagaacagtcaccccagccatggctgagcatacccactgttagtgacacagagtttccctgggaagaggctcccaaaggcacacagagaaaagaaagacccaatgcaagaactccagtaattcaaatgaccagagtgtcacatgtcttaaaatgaccacatcagttctttaataagggttcttaaccaggctgagctggctgaaatgacagaaatcctcgtgccaagcttggcgtagtcatctaacaatgttttcaag

SEQ ID NO: 158031 - DNA, 381 bp, Homo sapiens
  misc_feature (1)...(381): n = a,t,c or g
tcttgcctgttattcccccccttttggggggcccnnnnnnnnnntcccccgagggccgggggttcaaacccccccggccccccaggtttaaccccctttccccctaaaaaaccaaaaaattactgggccannnnnnnnnnnccctttattcccccccctcgggagggttgggccgggggattctttttaccccggaggggaagggttcccttagccccgggttccaataacttagaattggggccccttccctcccccccggggtaccaaaaaaaaactcccttttcnnnnnnnnnnnnnnnggaaaagaaaaaaaggaaaaggtaataaaaggtgaatctagacaaatactacttttcaaagtttcaaaaatattatctg

SEQ ID NO: 158032 - DNA, 829 bp, Homo sapiens
gagacagagtttcactcttattgcccaggctggagtgcaatggtgcaatctcgcctcactgcaacttccgtcgcccgggttcaagccattctcttgcctcagcctcccgagtagctgggattacaggtgtgtgccaccatgcctgactaattttcgtatttttagtagagatggagtttcatcatgctggccaggctggtcttgaactcctgacctcaggtgatccatccccgccttggtctccaaaagtgataggattaccaggcatggagccactgccacctggccctacatctttaaaaatttttaccccacgagacccagttaaaactcccttagtttaaaaaggaccagttgaattcaaatgccagctttgtaaatggaaaggttacagtttgtctgtccttcatggctgaagatcttaccaagttttaagaaaaacaggatagcaaatttacatctcaaaacagagaaaattaagcattttcaagaagaagttagggtatgttagagaaagattaaaaatggacaacaagtgatatagtttgagtatttgtcctcttcaaatctcatgttgaaatgttatccccagtgttggaggttgggtcaagtaggaggtttttgggtcatggtggcaggtccctcatgaatggctgggttctgtccttgtggtaatgagtgagttcttattccattagctcatgtgagagctggttttaaaaagagtctagtgtctttctcacctttctcttgctccctttttggccatgtgatatgcctgctcctcctcttcgccttccaccatgattgtaagcttctttttcttttc

SEQ ID NO: 158033 - DNA, 484 bp, Homo sapiens
agttgcaagtcccatgtttaaaggtggaagcggtcacctccccatctaggcttagggattcttagttggcctaggaaatccagctagtcctatctctcaaaacgagcctcaataaatttaagaaaattgaaattatatcaagcattctctcagaccacagtggaataaaactggaaatcaactccaaagggaaacttcaaaaccatgcaaatacatggaaattaaataacctgctcctgaatgagcactgggtcaaaaacaaaatcaagatggaaattaaaacattcttgaactgaatgacaataatggcacagcctatcaaaacctctgggatacagcaaaggcggtgctaagaggaaagttcacagccctaaacgcctacatcaaaaagtatgaaagagcacagacagacaatctaaggtcacacctcaaggaactagagaaacaacaaaccaaacccaaatccagcagaagaaaaaaaaaa

SEQ ID NO: 158034 - DNA, 1106 bp, Homo sapiens
gccatcagaacctaagcacgtgtgcttgcttcagcagcacatgtactggaattagaatgatgcagagaagattagcatggtccctgcacaaggatgatgcacaaatccgtgaagtattccatataaaaacaaagaagaagaagaagcagctgcagcaaaacccgcccaaggagactctgagctcagacacacctagccctgccccaacccagtggtcctaccctacccaccctgtgcatggaactttctccaagacagaccatatgataggctacaaagcaagcctcaataaatttaaggaaaatgaaattatatcaagcactctctcagaccacagtggaataaaactggaaatcaactgcaaaaggaagcttcaaaactatgcaaatacatcgaaattaaataacctgttcctgaatgatcattggctcaaaaatgaaatcaagatggaaattaaaaaattcttcgaactgaatgacaatagtgacacagcctatcaaaacctctgggattcagcaaaggcggtgctaagaggaaagttcatagccctaaaagcctacatcacaaagtctgaaagagcacagacagacaatctaagaattaaaaacaaaaatcacatgatcatctcaatagatgcagaaaaagcatttgacaaaatccagcatccctttatgattaaaactctcagcaaaatcggcatacaaaggacatacctcaatgtaataaaagccatctatgacgaacccacagccaacataatactgaatggtgaaaagcatgctgttggcattgttgtaaacaaagaagctaagggcaagattcttgccaagagaattaatgtgcggattgagtacattaagcactctaagagccaagatagcttcctgaaacgcatgagggaaaatgatcagaaaaaggaagccaaaaagagaggtacctgggttcaactcaagtgccaggctgctccacccagagaagtgtactttgtgagaaccaatggaaaggagtctgggctgctggaacctatcccctatgaattcaagcataataggtgcaaaaacataaaagacctctggactgtaaaaatgtttctcttcattaagtag

SEQ ID NO: 158035 - DNA, 1205 bp, Homo sapiens
  misc_feature (1)...(1205): n = a,t,c or g
gccatcagaacctaagcacgtgtgcttgcttcagcagcacatgtactggaattagaatgatgcagagaagattagcatggtccctgcacaaggatgatgcacaaatccgtgaagtattccatataaaaacaaagaagaagaagaaggaaaagggggagagtattacatcaagggaacatgccatgggacaaaaggatctgaacaacagccttcagccctggaccttccctctgacagagcctacccaaatgagaaggaaccagaaaactgactctggtaatatgaaaaaacaaggttccttaacacccccaaaagatcacactagctcaccagcaatggatccaaaccaagaagaaatccttgatttacctgaaaaagaattcgggaggttactaattaagctactcagggaggcaccagagaaaggtgaagcccaattgcatggaactttctccaagacagaccatatgataggctacaaagcaagcctcaataaatttaaggaaaatgaaattatatcaagcactctctcagaccacagtggaataaaactggaaatcaactgcaaaaggaagcttcaaaactatgcaaatacatcgaaattaaataacctgttcctgaatgatcattggctcaaaaatgaaatcaagatggaaattaaaaaattcttcgaactgaatgacaatagtgacacagcctatcaaaacctctgggattcagcaaaggcggtgctaagaggaaagttcatagccctaaaagcctacatcacaaagtctgaaagagcacagacagacaatctaagtactggaagttctaaccagagcagtcagacaagagaaagaaataaagggtattcaaattggaaaagaggaagtcaaactgttgctgttcgccgatgatatgatcatgtacctagaaaaccctaaagactcatccaaaaagctcctaggtctgatgaatgaattcagtagagtttcaggatacaaaatcaatgtacacaaatcagtagcactgctatataccaacagtgaccaagctgagaatcaaatcaagaactcagccccttttacagtagttgcaaaaaaaaataantaaataantaaataaaatacttaggaatacacctaaccaaggaggtgaaagacctctacaaggaaaactacaaaacactgctgaaagaaagcatagatgacataagcaaatag

SEQ ID NO: 158036 - DNA, 419 bp, Homo sapiens
ccagagtcgaatgcgtagttggtttagagtatgataggtcagcggcggcaagtaacacaataacccaggtagttgtaactcacatccaggctttgtcccatgaacaatagcagcatatacatccttctcaaataagcatgagtcattttccaggatacaccttctgttaggccacaaattaggtctcaatcacttttaaaatgtaggtatcatgcaaactcttctccaaccccaataggataacgttagaaatcaataccagaagtaaaactgaaaaatccacaaatttgtggaagttaaacaacacactcttaaacagccaacagtccagagaagaaatcccaagggaaaaagaaaatacttagaatgaaaacgaaaacgcagcagcccagcacttacaggatgctgcaaaagcagcc

SEQ ID NO: 158037 - DNA, 432 bp, Homo sapiens
  misc_feature (1)...(432): n = a,t,c or g
aggatgggaacttgtgttaacccccgttccctaaaaggttttggcccaaggccagggggaaaaaaaaagccccaaagttccccattaaaaagtttccaaaaatggctttaatgggaggcaaccccgggggtgcgcccccctttttccggtttcttttttttaacttccgctttgggccaaaaaagnnnnnnnnnnnagcccccattttcttctttttgaaaaaagggctttaaataaattttggccccccaagggaaccgggtggttttaaccaaaaaccccagtttccctcagccccgggttttgaaccttggaaccccccccaggggcccaaaccttaaaaggttttttccnnnnnnnnnnnnncnnnnnnnnnnnnnnnnnnnnnnnnnnnnnnnnnnnnnnnnnnnnnnnnnnnnnnnnnnnnnnnnc

SEQ ID NO: 158038 - DNA, 493 bp, Homo sapiens
  misc_feature (1)...(493): n = a,t,c or g
gtgtggtgcaattccctgagacaccttacgaacaccatggagaccatagactggaaggactttgagagctggatgctccattggctcctgtatgaaatgagcaggcactccttggagcagaagcccactgacgctccaccgaaagtactgaccaagtgccaggaagaggtcatccacatccgtgctgtccacccgggttcattcaagcccaagcgcgacgagaacggcaactatctgccactccagtgctatgggagcatccgctactgctggcgtgtcttgcccaacggtacggaggtccccaacaccagaagccgcgggcaccatatctgcagtgagacactggaactggaggacccgtcttctgggctgggagggaccaagcatgatctgggcccagtccccatgtgagagcagcagaggcggtctataacatactgccagccccacacagctacagctttattgctcccttcagcccccagcccctccn

SEQ ID NO: 158039 - DNA, 774 bp, Homo sapiens
atggtgaccagcgcgaccttatctccaacaatgagcaactgcccatgctgggcggcgccctggggccccggagagccagaggccagcacagccatccagggacaccaggcccccacttcccagccccaaaatagcctcacccatgtgttccctcaaaaagggctagaaggctattaccccaatgcccctgctaccccagtctccaaaaactcccaagcctgtagcaagatgcgcatggccaccccgctgctgatgcaggcgctgcccatggagccctgccccaggggcccatgcagaatgccaccaagtatgcaacatgacagaggaccatgtgatgcacctgctccagtactgaccaagtgccggaagaggtcagccacatccctgctgtccacccgggttcattcaggcccagtgcgacgagaacggcaactatctgccactccagtgctatgggagcatggctactgctggtgtgtcttccccaacggcacggaggtccccaacaccaaagccgcgggcaccataactgcagtgcccccagcccctcccccatctcccacctgtacctcatcccatgagaccctggtgcctggctctttcgtcaccctggacaagacaaaccaagtcggaacagcagataacaatgcagcaaggcccgctgcccaatctccatctgtcaacaggggcgtgaggtcccaggaagtggcaaaagctagacagatccccgttcctgacatcacagcagcctccaacacaggctccaagacctag

SEQ ID NO: 158040 - DNA, 1205 bp, Homo sapiens
atgcacaggaggagaagcaggagctgtcgggaagatcagaagccagtcatggatgaccagcgcgaccttatctccaacaatgagcaactgcccatgctgggccggcgccctggggccccggagagcaagtgcagccgcggagccctgtacacaggcttttccatcctggtgactctgctcctcgctggccaggccaccaccgcctacttcctgtaccagcagcagggccggctggacaaactgacagtcacctcccagaacctgcagctggagaacctgcgcatgaagcttccccaagcctcccaagcctgtgagcaagatgcgcatggccaccccgctgctgatgcaggcgctgcccatgggagccctgccccaggggcccatgcagaatgccaccaagtatggcaacatgacagaggaccatgtgatgcacctgctccagaatgctgaccgccctgaaggtgtacccgccactgaaggggagcttcccggagaacctgagacacctttaagaacaccatggagaccatagacttggaaggtctttgagatgctggatgcaccacttggctccctgtttgaaatgagccagccactcccttgcagcaaaagcccactggacgctccaccgataagtactgaccaagtgccagggaagaggtcagccacatccctgctgtccacccgggttcatttcagggcccaagtgcggacgaggaacgggcaattatcttgccattccagttgcttattggggagcatcggctacttgcttggtgttgtcttttccccaacgggcacgggaggtccccaacaccagaagccgcgggcaccataacttgcagtgagtcacttggaacttggaaggacccgtctttcttggggcttggggtgttgaccaaggcaggatctgggcccagtccccattgtgagagcaagcagaggcggtcttcaacatcctgccagccccacacagctacagctttcttgctcccttcagcccccagcccctcccccatctcccaccctgtaaccttatcccatgagacctgggtgctgggttcttttgtgacctttggacaagacaaaccaagttgggaacagcagataacaatgcagcaaggccctgctgcccaatctccatctgtcaacaggggcgtgaggtccccagaagtggccaaaagctagacagatccccgttcctg

SEQ ID NO: 158041 - DNA, 339 bp, Homo sapiens
cttttgggcaaatagccggttactgtgtcaggcctggtagcgtgagcaggatgtatgactgtctggttcccccttagtcacagccacctctcaggtgcctggtctcagcaggggaaagactggaggccctgatcctgccctttggctttgccagcacccccgaccagccctatatctcctcctccaccttcaagatcatccctgagaagacctcgagccccgagtgggtgcccttggggctgtcctgggagcctccagcaggcccctgggccactccactggcaggactaccgtcctggagtgagggtgaggcttcccgggtagggcgtgcctcgtgcc

SEQ ID NO: 158042 - DNA, 464 bp, Homo sapiens
gatgaggaagatggagagaatgcccacccatatagaaacagtgaccctgtgattgggacccacacagagaaggtgtccctcaaagccagtgactccatggatagtctctacagtggacagagctcatcaagtggcataacaagctgttcagatggtacaagtaaccgggacagctttcgactggatgacgatggcccctattcaggtaccatactgtgaccaggccacactgcataccgatttcacgccaagtccctatgacactgactccctcaaaatctagaaaggagacatcatagacattatttgcaaaacaccaatgaggatgtggaccggaatggtgaacaataaagtgggaaacttccaattcatttatgtggatgtcatctcagatgaggaagcagcccccatgacaataaaggcaaaccgaaggagtatcagcatattatccaagactctgcagg

SEQ ID NO: 158043 - DNA, 2120 bp, Homo sapiens
ttatctcttttcttagatctaaatgaaaatgattttctaagtaacaacatacatacctatcaaggaaaaactctacaaggaacttcctatcaggccataaaatcaggcagtgaccctgtggaatcaatggggacattaaagcgactacagaaactggtttggactaagaaagccagagtgcagaatctggatgaggtgaaaccgacattaataaacctccaagatgaagatgacacgttgatttcttgtttgaaattaaccaagtcccgagaaaagaaagtgaatagtgttagcacgaggaggaaggaagaaatggagattagattggatactctttctgcatcactgggtagatccagcactttaaataactgcaacttggaagataaattagcttggtatgaaggtgaagcttacatgtggcatcactggaagccttttcctgaaaaccctctctggacatgtcttgatttccaaatagcacaagttggaccctgggaccactgctcctcttgtattcgccacacacgtctcaagtcttcctgctcagatatggatctcctacattcatgggtaacattatgcagacaggagagctctaatataacatgttggaccaaactgagagagaagaggggtgatcttttctgcattctgtttgtctgtttcatagacaggaaaacaccgaggaagtttagtgatcaacaagctttagaaattttgaaaattggaagaaagcagaaagtgcactcactaggagtagtcagaattcaaaatgctcaagagaaagccatccaatgtttcagagaaggagaaacatcaaaaaccaaagaatatgaatctgtaatcaagttttatcccaagcagcgaagcagcagttttgggaatttcgatcgttttcggaataattctttatcaaaaccagatgattcaactgaggcacatgaaggagatcccacaaatggaagtggagaacaaagtaaaacttcaaataatggaggcggtttggggtaaaaaaatgagagctatttcatggacaatgaagaaaaaagtggggtaaaaagtacatcaaagccctttctgaggaaaaggatgaggaagatggagagaatgcccacccatatagaaacagtgaccctgtgattgggacccacacagagaaggtgtccctcaaagccagtgactccatggatagtctctacagtggacagagctcatcaagtggcataacaagctgttcagatggtacaagtaaccgggacagctttcgactggatgacgatggcccctattcaggaccattctgtggccgtgccagagtgcatacggatttcacgccaagtccctatgacactgactccctcaaaatcaaggttattggggaacaggggtgtttggttacatggaaaggagacatcatagacattatttgcaaaacaccaatggggatgtggacaggaatgttgaacaataaagtgggaaacttcaaattcatttatgtggatgtcatctcagaagaggaagcagcccccaagaaaataaaggcaaaccgaaggagtaacagcaaaaaatccaagactctgcaggagttcctagagaggattcatctgcaggaatacacctcaacacttttgctcaatggttatgagactctagaagatttaaaagatataaaagagagtcacctcattgaattaaatattgaaaacccagatgacagaagaaggttactatcagctgctgaaaacttccttgaagaagaaattattcaagagcaagaaaatgaacctgagcccctatccttgagctcagacatctccttaaataagtcacagttagatgactgcccaagggactctggttgctatatctcatcaggaaattcagataatggcaaagaggatctggagtctgaaaatctgtctgacatgctccttacggatcctctgcagctctcgcctcagctccctcaacgtggggcagggaacatcaacagaaggaagacaggtttttctcttggccatggaaagctgaataaagagcagcggaaagataagaaacggctcatccaaggttgggaggtagctgaggaacttggaccttctgctgcttttggctga

SEQ ID NO: 158044 - DNA, 654 bp, Homo sapiens; identical to SEQ ID NO: 144884
  misc_feature (1)...(654): n = a,t,c or g

SEQ ID NO: 158045 - DNA, 693 bp, Homo sapiens
  misc_feature (1)...(693): n = a,t,c or g
cccgactcttctggtccccacagactcagagagaacccacccatggttgctgtctcctgcccgacaaagaccaacgtcaagggcccgcctgggggtaaggtcggcgcgcacgctggcgcagtatggcttcggaggccctgggaaggagttttcctgtccttccccaccaaccaagacctacttcccgcacttcgaccttgagccacggtttctgcccaggtttaaggggccacgggcaagaaggtggccgacgcgctgaccaacgccgtggcgcacgtggacgacatgcccaacgtcgctgtccgcccctgaagcgacctgcacgcgcacaagcttcgggtggacccggtcaacttcaagctcctaagccacttgcctgcttggttgaccctggcccgcccaccttccccggccgagtttcaccccttgcggtggcacgccttccctggaacaaagttcctgggcttcttgttgaagcaccgttgcttgaaccttccaaatacccgttaaagcttggaagccttcgggttggccatgctttctttgcccctttggggcttccccccagcccctcctcccctttcctgcacccgtacccccgtgggtcttttgaataaaattttgaattgggggggcaaaaaaaaaaaaaaaaaaaagatctttnaatttaagggggcggaaagtttatttcaa

SEQ ID NO: 158046 - DNA, 472 bp, Homo sapiens
  misc_feature (1)...(472): n = a,t,c or g
cccacggagtactggatcccagtgatgggaaagctgtggcccacatcaaaggaccggataagctggaagcagccgttgcggttggcgaagacgtgcagcaggccctggttgtcaccagcccagagctggggttcctggtaggacatgcagagcaggtaggagtccagctgcagacgctgcaggacgctgttggctcggcggtccaccaccaccagggtgtggtcctcgctgcctgagatgatgtgccggtcatccgccagcagggtcagcacgggtctggagtgtagttgctggtgcttcaacagggctgggccggctctggggtcgtagatggtcaccttcttgtcataggtgccagtcaccaggatgtcaggcaggtaggagaggcacagcacggctgagctggcctttatctcgccgaacctcgtgccgaattcctgcagcgcgggtctatccaagggcngggcgaagg

SEQ ID NO: 158047 - DNA, 419 bp, Homo sapiens
  misc_feature (1)...(419): n = a,t,c or g
aattactggatcccagtgatgggaaaagctgtggccccacatcaaaggactgcaggaggaggatcaggcaacantcagtcgaggctctcccaaggcccgccctcccccacaccaccaggggctcgggtaggaaggaagcccggggggagggacagtcaggggcaggagctccagcagacccggataagctggaagcagccgttgcggttggcgaagacgtgcagcaggcccctggttgtcaccagcccagagctggggttcctggtaggacatgcagagcaggtaggagtccagctacgagagggacaagggacgggacagctcaggccgggctgggcctgcaacagtccccatccctccaggcccctggggagggcccacctgcagacgctgcaggacgctgttggctcggcggtcca

SEQ ID NO: 158048 - DNA, 264 bp, Homo sapiens
  misc_feature (1)...(264): n = a,t,c or g
cgccggtgtcttctgcgacgcggggctgaccttcacgagcagcagtggccagcagaccgcccagagggcagaacttttgtgcccgcagccagccgccctccgacgccggtctgagcctttctcggtgcatttattggacatttctgtgtgagtacctcttggggacattctattattgcgttgaaaatctgcgtgatggcccctgcgtggtagctgatgccgtgtgnnnnnnnnnnnnnnnnnnnnnnnnnnnnnnnnnnnccg

SEQ ID NO: 158049 - DNA, 394 bp, Homo sapiens
cccatagtaatctgaattttgtgactgggttgctgatttggatgttcagaaatatgagcaaccatctccgaagcattgacatctatgggttctactgaagctcgcgttgattacatgggctcaagtatcctcatgggcatcttcagtaatgctgatcttaagcttcaggatgaatggaaagtcaacttgtataatacattggattcaagcataactgataaaagtgagattttcgtccatggagatttgaagtgggatattttccaagtaatgatatcaaggtcaaccacaccagatctgataaaaataggaatgaagctccaggaatttttcacacaacaatttgataccagcacacgagctctgtctacctggggaccagttccttaccttc

SEQ ID NO: 158050 - DNA, 372 bp, Homo sapiens
tttttttttttttttttgagagagtcccactcttgcccaggccagagtgctgtggtgccttcacagctcaccacagcctcaatctccatgggctcaagcaatcctgcctcccaagccaagcagctggtactgcaggcatgtgccaccgtgcctggctcctgaagactgaggttggtttagattaatgagttgcccaaattcagacagttcttaagtggcaaagttaggattccaacccaggtcaacataactaaagcccaaaccccatctcacccctctagggcatcaaatattggctgggtgcggtggtttatgtctgcctccccggagtgttgggattgcaggggtgggccaccacgcccgggctattta

SEQ ID NO: 158051 - DNA, 1744 bp, Homo sapiens
  misc_feature (1)...(1744): n = a,t,c or g
cctaaatttgcattgactatgttttagtgtatttataaatggtgaactcagtttctgaaattaaacttcttatttgcaattttctagtgctggcagacactggctttttatttttaggataagaaaacagcgcatattctttgtggtccattatctagagcccatacttgggcagcatttgaaatttcaccttaaccacagacagggctccagggaagtggagatgtaattcttacaacaacagttctgatcatggccatggtgatgactttccaggtctcgtgttcaagtggtgccagaatgcaggagccggtgggcagtcctgaggggttgccttgtacgcagcctctgtgcacagctcttcctggagtcctcttacccggtagctgtgcgcttgttcccgtgagaacagcctgcttgcaaagtgcacatgagagctgctcagagacagagcctgtgagactgcataggatgccactctctctgagtatcccaacctcttggatgtatacagagattttatagaatagaacctatagcttctaccatgagttatatgagtcaagatcctgcctaacctgaaattattagggatttactcagccctgctgccagctaacagtggagttatgtcactgatctgaaggtcactgttaagggcttctgctgccatccttgtgggttgctacctttaagtcgcataactctagctgtatcatcctcttcacctgtcattcttctggaggggtctcaggacaaggggcccnggggatggagcccaccnggggtattcaccaacaggcctgacttgatactaagtgattaagttttccaagttgtcccactgcccattcaaagtccagcccctggagtgtatttgttctcagtcctaaccctggggcccagagattggtcccgaggttgagaattccttcctcctcatccttggtgttgctttctccaaatgattgttttagactagccaaaaatgcctgtggcaaaagagctcagaaatccaatttggataccaaaggtttctcatgttaatttctcagcccccaaagaagcaccctactccctgaaccctagacagggaagtattgttttcagtcacagaaaagcttttcctggggtaccctcngggttagcactttcctactctctgatatttcctatggtacatagctttttattgttgtaaatccctttcttaatggttaaataggattgttagcaactatgggtttgcagttttctgagtaggtgagttttgaatatgggtaaatcagaataatgagacaacttgttaatctctttaatactaaaaataaattactcttctatttcgagggacttaggtaatttaaaataaaccttcaatttatggtcttctgttttgaagctcatgggaaaattgtgatcaaaagggctatgggaagggcagaccccgccaatgatttctcttcacctgtcttaagattaaataaaaaagagtgtcctggcagttatcttgaggtggggaaggaggtgatgaaacattagtttgtgaaatccaaggccctggctttctttctttctttttttttttttttttttttgaaacagtctctctctgtcacccaggctggcgtgcaatggcgcagttgactcactacagcctctgcctcccaggttcaagcgattctcatgccttagcctcccaagtagctgggattacaggtgtgtgccgcaatgcccagctaat

SEQ ID NO: 158052 - DNA, 483 bp, Homo sapiens
tcggagaaccaagaacaggaggaggtgattacagtgcgtgtttatgacccccgagtgcagaatgagggctcctggaactcttatgtggatgtataagatattcctccataccaacagcaaagcctttactgccaagacttcctgtgtgcggcgccgctaccgtgagttcgtgtggctgagaaagcagctacagagatatgctggattggtgcctgtttctgaacttcctgggatgccaaccttatacggcctttattgatgagtacattggtatatcgtaactatggtatgcttctttcaccaggatatttgatcaagatatgttgatttctctattttctcttgcactcctccttgtagttgtgccattccgtctcttagtcatgattgatttgagtcgttttttttacactgccctatgctatttatttattatcagatctttttgactatcttatggccttttgtacatatgttttatta

SEQ ID NO: 158053 - DNA, 830 bp, Homo sapiens
tgtgctgtcaccccaggctggcatgcagtgggcatgattcttggcttattgccaatctctgcctcccaggttccaagagattcccgtgcctcagcctcccgagtagctgggattacaagcagccctgtcaccacacccggataattttggtatttttagtagagaccgaggtttcaccatgttggccagactggtctcgaaatctccggaactcgggagatccacccactttggcctcccaaaagtgctgggattataaggcatgagcaactacacccaggctaagttttcctttttcaaaaattgatttgtgctataaggaatcacattaaaattattaaggaaggattcatgtttttaaagttttctttcaggcatttttaaagcaccctcaataaactcagaaatacttataaaaaccaatatgctaatcataaatacttcagataattacatctcgttagtacaatcaactgctttatataaactaagaactatttaattaagactactatatgtcactataagacttaaaaacaatacatatgagtatatttttacatactcaaccactatgatgatctattaattcagactgttcttccccagaggaaaggtggtatcctataaagagcaattgatcactgctgaaaacttgtatggtgttaaagcattatgaagagcattctggtccagcttcctcatctgaaaatggcaaaaatgctttctctggacccctctcaaagatatcgtaatagtaagtaaacaatatgaagggtctctagatcgaaaaatcactataaaaaatatatggaacactttcatcacga

SEQ ID NO: 158054 - DNA, 375 bp, Homo sapiens
gcgcgcagcattgactccttccacttacaaaggggccccatcccccaaagagctcctcattccaccaggggtgacttcggcttcccccaaagaggcacctactcctccagctgtgactcctccatcccccgaaaagggcccagcaactccagcccccaaagggactcccacttccccacctgtgactccttcctccctcaaagactcccctacttccccagcttctgtcacatgtaaaatgggggccactgttcctcaagcatctaaagggcttccagcaaagaaaggccccacagctctgaaagaagtacttgttgccccagctccagaaagcacgccaatcatcacagctcccactcggaaaggtccacagat

SEQ ID NO: 158055 - DNA, 425 bp, Homo sapiens
  misc_feature (1)...(425): n = a,t,c or g
tatttttccccccccaaaaaggggttttttttctaaaaaaaagggggtggtatttaatccccccacnnnnnnnnnnnggttttttgcccgtccccccccgggggtgggtccccccccacaaatnnnnnnnnnnnnnnnnnnnnnattttatttttatannnnnnnnnnnnnnnannnnnnnnnnnnnaatttttcnnnnnnnnnnnnnnnnnnnnnnnnnnnnnnnnnnnnnnnnnangccagcagcatccgcacctttatccgcactgtaggctgggctgggcagagcgcgcctggccccggggacaccactgtatcactataaaacccagaggaaacaaggaacaagtgcaagtccggggagagggaccacttgccacactcctcagtcacctccccttccaggtcatcatcgatgtccttgg

SEQ ID NO: 158056 - DNA, 253 bp, Homo sapiens
gcacctttatccgcactgtaggctgggctgggcagacgcgcctggccccggggacaccactgtatcactataaaacccagaggaaacaaggaacaagtgcaagtccggggagagggacactgtcacgcagagaggtcactgttatcaaaacgctcctgggtcgtacacttcagccaccacttggggccacaaaaccagcgccacccaggtcaaagaggttcatgggagacacagcatctttggacgactgggc

SEQ ID NO: 158057 - DNA, 563 bp, Homo sapiens
  misc_feature (1)...(563): n = a,t,c or g
tttttttttcagggccagcagcatccgcacctttatccgcactgtaggctgggctgggcaaagcgcgcctggccccggggacaccactgtatcactataaaacccagaggaaacaaggaacaagtgcaagtccggggagagggaccactgtcacgcaaagaggtcactgttatcaaaacgctcctggtcgtacacttcagccaccaccttgcggccagcaaaccagcggccattgagggcctggatggccttatgagtctcagaggctatggaaaactccacaaagatcttgacaatgatttctgcatcctcctcctcgccttgccacactcctgcttgcggagcagcttctgcatcaccatgtgtcgggcgctactgcccgagatgctcatgtgctcctgctcgctcagcatctctggccgctctgactcgggaaacagctcctcttcttccttctccttcttgggctccaggagaccccacgttggagggctggccagggaatggttcaccactcccaccgagggggatgtgaccgggatagaggacgggctggngtccac

SEQ ID NO: 158058 - DNA, 1883 bp, Homo sapiens
  misc_feature (1)...(1883): n = a,t,c or g
ggcgaccatagctctccaggtcaatggccagcaaggaggggggtccgagccggcggcggcggcggcagtggtggcagcgggagacaaatggaaacctccacagggcacagactccatcaagatggagaacgggcagagcacagccgccaagctggggctgcctcccctgacgcccgagcagcaggaggcccttcagaaggccaagaagtacgccatggagcagagcatcaagagtgtgctggtgaagcagaccatcgcgcaccagcagcagcagctcaccaacctgcagatggcagcagtgacaatgggctttggagatcctctctcacctttgcaatcgatggcggctcagcggcagggggcgctggccatcatgtgccgcgtctacgtgggctctatctactatgagctgggggaggacaccatccgccaggcctttgccccctttggccccatcaagagcatcgacatgtcctgggactccgtcaccatgaagcacaagggctttgccttcgtggagtatgaggtccccgaagctgcacagctggccttggagcagatgaactcggtgatgctggggggcaggaacatcaaggtgggcagacccagcaacatagggcaggcccagcccatcatagaccagttggctgaggaggcacgggccttcaaccgcatctacgtggcctctgtgcaccaggacctctcagacgatgacatcaagagcgtgtttgaggcctttggcaagatcaagtcctgcacactggcccgggaccccacaactggcaagcacaagggctacggcttcattgagtacgagaaggcccagtcgtcccaagatgctgtgtcttccatgaacctctttgacctgggtggccagtacttgcgggtgggcaaggctgtcacaccgcccatgcccctactcacaccagccacgcctggaggcctcccacctgccgctgctgtggcagctgctgcagccactgccaagatcacagctcaggaagcagtggccggagcagcggtgctgggtaccctgggcacacctggactggtgtccccagcactgaccctgggcccagccccttggcacttttccccaggctgtcaatggctgcccaggcacctggagtccatcaacagttgtgaccccagcccgtcctcctattnccggtcacccataccctcggtgggagttgtgaaaccccaatcctgcccagccctccaaccctgtggtctcctggagcccaagaaggagaaggaagaagaggagctgtttcccgagtcagagcgcccagagatgttaagcgagcagaagcacatgagcactctggggcagtagcgcccgacacatggtgatgcagcaagcctgctccgcaagcaggagtctacagtgatggttctgcgcaacatggtggaaccccaaggaacatcgaatgaatgaccctggaaagggagggtgacaagaggagtgtggcaaagttcggggcccgtgaaccgcgggtctcatctaccaaagagaaagcaaggcggaggaggaggatgcaagaaatccattgtccaagatctttttgtgagttttccaatagcctctgaagaactcaaataaggccatccaaggccctcaaatggcccgctggttttgctggcccgcaaggtggtggttaaagtgtacgacccaggagccgttttgataacaagtgacctctctgncgtgacagtggtccctctccccggacttgcacttgttccttgtttcctctgggttttatagtgatacaagtggtgtccccggggccaggcgcgcttctgcccagcccagcctggagtgcggataaaggtgcggagtgctgctggccctgaaaaaaaaaaaaaaaaaactcgag

SEQ ID NO: 158059 - DNA, 407 bp, Homo sapiens
  misc_feature (1)...(407): n = a,t,c or g
tcaagagcatgacggaggcggagcagcagcagctcatcgacgaccacttcctcttcgacaagcccgtgtcgcccctgctgctggcctcgggcatggcccgcgactggcccgacgcccgcggtatctgattgaaactctcttcaagtctaaggactatgagttcatgtggaaccctcacctgggctacatcctcacctgcccatccaacctgggcaccgggctgcgggcaggtgtgcatatcaagcatgagaagttctcggaggtgcttaagcggctgcgacttcagaagcgaggcacaggcggtgtggacacggctgcggtgggcggggtcttcgacgtctccaacgctgaccgcctgggcttctcagaggtggagctggtgcagatggtggtggacggagtgaacn

SEQ ID NO: 158060 - DNA, 407 bp, Homo sapiens
  misc_feature (1)...(407): n = a,t,c or g
aagttctcggaggtgcttaagcggctgcgacttcagaagcgaggcacaggcggtgtggacacggctgcggtgggcggggtcttcgacgtctccaacgctgaccgcctgggcttctcagaggtggagctggtgcagatggtggtggacggagtgcccaccatgcacccctgatgttcgccgtctggcgagcccttagccttgctgtagagacttccgtcacccttggtagagtttatttttttgatggctaagatactgctgatgctgaaataaactagggttttggcctgcccccggnnnnnnggnngnggggggnggngngccccgnnnngnnnnnaagagtttgggcccctttaaaaaaaccaaatttacaccccccgcctcacaactttattttttttggggcg

SEQ ID NO: 158061 - DNA, 411 bp, Homo sapiens
tcctacgaagttttcaaggaactctttgaccccatcatctcggatcgccacgggggctacaaacccactgacaagcacaagactgacctcaaccacaaacctcaagggtggagacgacctggaccccaactacgtgctcagcagccgcgtccgcactggccgcagcatcaagggctacacgttgcccccacactgctcccgtggcgagcgccgggcggtggagaagctctctgtggaagctctcaacagcctgacgggcgagttcaaagggaagtactaccctctgaagagcatgacggagaaggagcagcagcagctcatcgatgaccacttcctgttcgacaagcccgtgtccccgctgctgctggcctcaggcatggcccgcgactggcccgacgcccgtggcatctg

SEQ ID NO: 158062 - DNA, 1499 bp, Homo sapiens
gctgccgacggacggagcgcccccgcccccgcccggccgcccgcccgccgccgccatgcccttctccaacagccacaacgcactgaagctgcgcttcccggccgaggacgagttccccgacctgagcgcccacaacaaccacatggccaaggtgctgacccccgagctgtacgcggagctgcgcgccaagagcacgccgagcggcttcacgctggacgacgtcatccagacaggcgtggacaacccgggccacccgtacatcatgaccgtgggctgcgtggcgggcgacgaggagtcctacgaagtgttcaaggatctcttcgaccccatcatcgaggaccgggacggtggctacaagcccagcgatgagcacaagaccgacctcgaccccgacaacctgcaggggggcgacgacctggaccccaactacagtgctgagctcgcgggtgcgcacgggccgcagcatccgtggcttctgcctccccccgcactgcagccgcggggaaggccgcgccaatcgagaagctcgcggtggaaagccctgtccagccttggacggcgacctggcgggccgatactacgcgctcaagagcatgacggaggcggagcagcagcagctcatcgacgaccactttctcttcgacaagcccgtgttcgcccctgctgctggggctcgggcatgggcgccgcaactggcccgacgcccgcggtatctggcacaatgacaataagaccttcctggtgtgggtcaacgaaggaggaccacctgcgggttcatctccatgcagaaaggggggcaacatgaaggaggtgtttcacccgcttctgcaccggcctcacccagattgaaactctcttcaagtctaaggaactatgagttcatgtggaaccccttccactgggctacttccctccccctgccattgcaacctggggcaccgggctgcgggccaggtttgcatattcaagctgcccaacctggggcaaggcatgagaaagttctcggaagttgcttaagccggctgccgaactttcaaaaagccgaaggccaccaggcggtgtggaacacggtctgcggtgggcgggggtcttcgacgtcttccaaacgctgaaccgccctgggccttctcagagcgtggagcttggtgcagatgmgtggtggacggagtghaagctgcttcatcgagatggaacagcaggctggagcagggccaggccatcgacgacctacatgcctggcccaagaaatgaagcccggcccacaccgcgacaaccagccctgctgcttcccaactctatgtgcctggggcagtgcccacacatgcaccacctgaatgttcgccgtctggcgagcccttagccttgctgtaggagactttccgtcacccttgtaggagtttatttttttttgatggctaagatactggctgatgctgaaataaaactagggttttggcctgccaaaaaaaaaaaaaaaaaaaaaaaaaaagtcgtatcga

SEQ ID NO: 158063 - DNA, 584 bp, Homo sapiens
gagcagctgccctactttgtcacgttcatctccatgccggccaccactgaggcaggcggggcttctccttgtccgtggagagtgcctgctccaactacgctaccactgtgcaagtgaaagtggtcaaccggatgcacatcagtcccagagctctaggaactcttcatcacaactagatttgcctcttctaagtgtctatgagcttgcaccatatttaataaattgggaacgggttcggggtattaatgcaatgtgtggtggttgtattggagcagggggaattgataaaggagagtggttgctgttaatattatcttatctattgggtggtatgtgaaatattgtacatagacctgatgagttgtgggaccagatgtcatctctggtcagagtttacttgctatatagactgtacttatgtgtgaagtttgcaagcttgctttacggctgagccctggactcccagcagcagcacagttcagcattgtgtggctggttgtttcctggctgtccccagcaagtgtaggagtggtgggcctgaactgggccattgatcagactaaataaattaagcagttaacatc

SEQ ID NO: 158064 - DNA, 497 bp, Homo sapiens
  misc_feature (1)...(497): n = a,t,c or g
tctgtcacgctattctcaatgccggccaccatgaagggcaggcggggcttctccgtgtccgtggagagtgcctgctccaactaattntgcctcttctaagtgtctatgagcttgcaccatttttaataaattgggaatgggtttggggtattaatgcaatgtgtggtggttgtattggagcagggggaattgataaaggagagtggttgctgttaatattatcttatctattgggtggtatgtgaaatattgtacatagacctgatgagttgtgggaccagatgtcatctctggtcagagtttacttgctatatagactgtacttatgtgtgaagtttgcaagcttgctttagggctgagccctggactcccagcagcagcacagttcagcattgtgtggctggttgtttcctggctgtccccagcaagtgtaggagtggtgggcctgaactgggccattgatcagactaaataaattaagcagttaacataactgg

SEQ ID NO: 158065 - DNA, 3711 bp, Homo sapiens
gtggtcttcccgcgcctgaggcggcggcggcaggagctgaggggagttgtagggaactgaggggagctgctgtgtcccccgcctcctcctccccatttccgggctcccgggaccatgtccgcgctggcgggtgaagatgtctggaggtgtccaggctgtggggaccacattgctccaagccagatatggtacaggactgtcaacgaaacctggcacggctcttgcttccggtgttcagaatgccaggattccctcaccaactggtactatgagaaggatgggaagctctactgccccaaggactactgggggaagtttggggagttctgtcatgggtgctccctgctgatgacagggccttttatggtggctggggagttcaagtaccacccagagtgctttgcctgtatgagctgcaaggtgatcattgaggatggggatgcatatgcactggtgcagcatgccaccctctactgtgggaagtgccacaatgaggtggtgctggcacccatgtttgagagactctccacagagtctgttcaggagcagctgccctactctgtcacgctcatctccatgccggccaccactgaaggcaggcggggcttctccgtgtccgtggagagtgcctgctccaactacgccaccactgtgcaagtgaaagaggtcaaccggatgcacatcagtcccaacaatcgaaacgccatccaccctggggaccgcatcctggagatcaatgggacccccgtccgcacacttcgagtggaggaggtggaggatgcaattagccagacgagccagacacttcagctgttgattgaacatgaccccgtctcccaacgcctggaccagctgcggctggaggcccggctcgctcctcacatgcagaatgccggacacccccacgccctcagcaccctggacaccaaggagaatctggaggggacactgaggagacgttccctaaggcgcagtaacagtatctccaagtcccctggccccagctccccaaaggagcccctgctgttcagccgtgacatcagccgctcagaatcccttcgttgttccagcagctattcacagcagatcttccggccctgtgacctaatccatggggaggtcctggggaagggcttctttgggcaggctatcaaggtgacacacaaagccacgggcaaagtgatggtcatgaaagagttaattcgatgtgatgaggagacccagaaaacttttctgactgaggtgaaagtgatgcgcagcctggaccaccccaatgtgctcaagttcattggtgtgctgtacaaggataagaagctgaacctgctgacagagtacattgaggggggcacactgaaggactttctgcgcagtatggatccgttcccctggcagcagaaggtcaggtttgccaaaggaatcgcctccggaatggcctatttgcactctatgtgcatcatccaccgggatctgaactcgcacaactgcctcatcaagttggacaagactgtggtggtggcagactttgggctgtcacggctcatagtggaagagaggaaaagggcccccatggagaaggccaccaccaagaaacgcaccttgcgcaagaacgaccgcaagaagcgctacacggtggtgggaaacccctactggatggcccctgagatgctgaacggaaagagctatgatgagacggtggatatcttctcctttgggatcgttctctgtgagatcattgggcaggtgtatgcagatcctgactgccttccccgaacactggactttggcctcaacgtgaagcttttctgggagaagtttgttcccacagattgtcccccggccttcttcccgctggccgccatctgctgcagactggagcctgagagcagaccagcattctcgaaattggaggactcctttgaggccctctccctgtacctgggggagctgggcatcccgctgcctgcagagctggaggagttggaccacactgtgagcatgcagtacggcctgacccgggactcacctccctagccctggcccagccccctgcaggggggtgttctacagccagcattgcccctctgtgccccattcctgctgtgagcagggccgtccgggcttcctgtggattggcggaatgtttagaagcagaacaagccattcctattacctccccaggaggcaagtgggcgcagcaccagggaaatgtatctccacaggttctggggcctagttactgtctgtaaatccaatacttgcctgaaagctgtgaagaagaaaaaaacccctggcctttgggccaggaggaatctgttactcgaatccacccaggaactccctggcagtggattgtgggaggctcttgcttacactaatcagcgtgacctggacctgctgggcaggatcccagggtgaacctgcctgtgaactctgaagtcactagtccagctgggtgcaggaggacttcaagtgtgtggacgaaagaaagactgatggctcaaagggtgtgaaaaagtcagtgatgctccccctttctactccagatcctgtccttcctggagcaaggttgagggagtaggttttgaagagtcccttaatatgtggtggaacaggccaggagttagagaaagggctggcttctgtttacctgctcactggctctagccagcccagggaccacatcaatgtgagaggaagcctccacctcatgttttcaaacttaatactggagactggctgagaacttacggacaacatcctttctgtctgaaacaaacagtcacaagcacaggaagaggctgggggactagaaagaggccctgccctctagaaagctcagatcttggcttctgttactcatactcgggtgggctccttagtcagatgcctaaaacattttgcctaaagctcgatgggttctggaggacagtgtggcttgtcacaggcctagagtctgagggaggggagtgggagtctcagcaatctcttggtcttggcttcatggcaaccactgctcacccttcaacatgcctggtttaggcagcagcttgggctgggaagaggtggtggcagagtctcaaagctgagatgctgagagagatagctccctgagctgcggccatctgacttctacctcccatgtttgctctcccaactcattagctcctgggcagcatcctcctgagccacatgtgcaggtactggaaaaccctccatcttggctccccagagctctaggaactcttcatcacaactagaatttgccctccttcctaagtgcctatgaaccttgcacccataaatttaataatttgggaatgggtttggggtaattaatgccaatgtgtggtggttgtattggagcaagggggaattgataaaggagagtggttgcctgttaatattatcgttatctattgggtggtatgtgaaatattgtacatagacctgatgaagttgtgggacccagatgtcatctcctggtcagagtttacttgctatatagactgtacttatgtgtgaaagtttgcaagcttgctcttcaggctgagccctggactcccagcagcagcaccagttcagcattgtgtggctggtctgtttcctggctgtccccagcaaagtgtaggagtggtgggcctgaactgggccattgatcagactaaataaattaagcagttaacataaaaaaaaaaaaaaagggcggccgct

SEQ ID NO: 158066 - DNA, 411 bp, Homo sapiens
gcctatggcccagccgtcccaccacagaccctctacaaccccgcccagcagatcctggcctacgcaggcttccgcctgacgcccgagcccgtcccgacctgctcgtcctaccctctgccccttcagccctgcagcccgcttcccagttgcgccctcctctgccctggcttcgtctgaggacctgcagcccccttctccaagcagctctggctctgggcttcccggccaggctccaccgtgctacgcacccacctactttcccccgggggaagaaccacccccctacgcaccctgatagaggcgaggacgaatagataaccttgctcggtattcttcttacctcataaggggatctctttcacaaccccttctctcgtcccctaactccgtgtccataccattagcaactcg

SEQ ID NO: 158067 - DNA, 1136 bp, Homo sapiens
taaattaacggccgcgtcgacctctcctgggcagttaggaaaatcaaattgctgcaaaagtgattgagcaaaattccaccaaaacagagaatattcttattaatgcatttagaaataaatacagcagataaacctgaggagtaaaaatagcagttgatatttattgggcacttaccatgtgccaggcactgtcccaagcactttatgtgtattagttcactgacttctcacggcagccctgggagataggtattcttttcatccccactctagagatgaagacactgagccctgaggtgttaacttgctccaggttgcatagtaagtggcagaggcaggactgatacataagcaggctgacccagggcccgcactctcaacccctgccccacactgacccaccccctatcttgtcagccataccggtggctccaccaccagaccagcccaccccaatcccatccccatgcgcactgaggaatcagacttcctctcagcttcttgtggcctttctagaacaaaaggatctacaactgcatgatgatctcttcaagaagagtgatctctctctccccaattgtcctgcttcagatttttgattgtccccggctgaagttttctgagattccccagcgcctcacagccctgctattgccccctgacccaattgtcatcaaccatgtcatcaggtgaggtggccccagcttgcttctcagaccagggaatgatctcgttcctgccttccctgcccctccctctcctcccactcccatctcttctccctccctgttggatctgccccagccccggggccctggggcccgtatgggggcatcgtggacacgaagggctggacttccctggcagcgtggacccttcagaccagaagaagacggcgtgctatgacattgacgtggaggtggaggagccattaaaggggcagatgagcagcttcctcctatccacggccaaccagcaggagatcagtgctctggacagtaaggtggggcccaagcccagagctggagtgggacattaacccagagatgatagaggagacttttctgagaccagggtgtggttgcagatgagcagtctgggttaaattaaaaaaaaaaaaaaaaaagtcgtatcga

SEQ ID NO: 158068 - DNA, 1783 bp, Homo sapiens
  misc_feature (1)...(1783): n = a,t,c or g
gaattccggcgcaggcgcccgagccgagcgccgagcagggagcgggcggccgcgctccgggccggggtcccgggggagcagatcctcagaatggcccttggtgctgcaggcgcggtgggctccgggcccaggcaccgagggggcactggatgactctccaggtgcaggaccctgccatctatgactccaggtcttcagcacccacccaccgtggtacagcgccccgggatgccgtctggagcccggatgccccaccaggggcgcccatgggccccccgggctccccgtacatgggcagccccgccgtgcgacccggcctggcccccgcgggatggagcccgcccgcaagcgagcagcgcccccgcccggcagagccaggcacagagccagggccagccggagcccaccgcccccgcgcggagccgcagtgccaagaggaggaagatggctgacaaaatcctccctcaaaggattcgggagctggtccccgagtcccaggcttacatggacctcttggcatttgagaggaaactggatcaaaccatcatgcggaagggggtggacatccaggaggctctgaagaggcccatgaagcaaaagcggaagctgcgactctatatctccaacacttttaaccctgcgaagtctgatgctgaggattccgacggcagcattgcctcctgggagctacgggtggaggggaagctcctggatgatcccagcaaacagaagcggaagttctcttctttcttcaagagtttggtcatcgagctggacaaagatctttatggccctgacaaccaacctcgttgagtggcatcggacacccacgacccaggagacggacggcttccaggtcaaaccggcctggggacctgagtgtgcgctgccacgctgctcctcatgctggactaccagcctccccagttcaaactggatccccgcctagcccggctgctggggctgcacacacagagccgctcagccattgtccaggccctgtggccagtatgtgaagaccaacaggctgcaggactcccatgacaaagaaatacacaatgggggacaagtatttcccgcagaattttgaattgctccccggctgaagtttacttagattccccagcgcgtcacagccgtgctaatagccccctgacccaattgtcatcaaccatgtcatcagcggtggacccttcagacccagaagaagacggtcgtgctatgacattgacgtggaggtggaggagcccattaaaggggccagatgagcagcttcctcctatccacggccaaaaccagcaggagatcagtgctctggacagtaagatccatgagacgattgagtccataaaccacgctcaagatccaagagggacttcaatgctaagctttctccggagaccccataagctatgtgccagaacctggctccgctcccaagagccggggacctcaaggtgattgacagatgtagccggcaaccctgaagaggagcgccgggcttgagttctaccaccaagccctggtcccaggaggccgtcagtcgctacttctacttgcaagatccaagcaagcgcaggcaaggaagcttggangcaagtcgcttggtttgtgccgcaacaccttaaggaagcccaaaaataaagcaagcaccgacggaacttttcaagcccgtgttcccggggcccaagattttgccccgggctccagcatcacttcttcttgccaactttggggttttgggggctggattaaaagtcattcatctgacaaaaaaaaaaaa

SEQ ID NO: 158069 - DNA, 426 bp, Homo sapiens
gaggggatgatttgccagggcttgggctcaggccagcagggatgtccacgaacaaggtggccagacaagacgaatgaccagctctagtacacatcagactttgtgaaatatgctcggtgtcctggggcagggagccctcggccctctccctcgcaggaaggctcgggccctagagcatcatgtgtgtccggggtgggctgttctccccgaaagaaaggtggaggggttgtcagagctgcagctgctccaccctgacaccccatctgccctcagaccaccaaggccttcctgccgcgtatgctggagctgcagaatggccacatcgtgtgcctcaactccgtgctggcactgtctgccattcccggggccaatcgactactgcacatccgaagcggcagactttggcttcatggagagcctgaccct

SEQ ID NO: 158070 - DNA, 1465 bp, Homo sapiens
cgtattgctcggcccggggagtttcgccccctgcccggctccgcggcgcggaggatggcgtggaaacggctgggcgcgctggtgatgttccctctacagatgatctatctggtggtgaaagcagccgtcggactggtgctgcccgccaagctgcgggacctgtcgcgggagaacgtcctcatcaccggcggcgggagaggcatcgggcgtcagctcgcccgcgagttcgcggagcgcggcgccagaaagattgttctcgtggggccggactgagaaatgcctgaaggagacgacagaggagatccggcagatgggcactgagtgccattaccttcatctgtgatgtgggcaaccgggacgacggtgtaccagacggccaaggccgcccgggagaaggtgggtgacatcaccatcctggtgaaaaaatgccgccgtggtccaatgggaaagagcttaatggacaagtgatgatgatgccttcctaaaagcccaaaaacataaacaccctggggccagttttggaaccaccaggggcccttctctggcaagttatgctggaaacagcagaatgggccgcatcggtgtgccttcaacttccgttgctgggcattgttcttgccattcccccggtgccatcgactacttgcacatccaaagcgtcagctttcgccttcatggagagccttgaccctgggggcttgctgggacttgtccgggagtcaagcgccaccacagtgcttgccctttccacaacaagcaccgagatgttccaggggcattgagagttcaggttttcccaacctctttcccccactgaaagccggagacggtggcccggaagaacaagtggaagctgtgcagctcaaccaggccctcctcctcctcccatggacaatgcatgccctcgttatcttgaaaagcatacttccacaggctgcactcgaggagatccacaaaattctcaaggaaacctacaaccttgaatgaacacttttcaaaaggggcggacattagagacaggatgaaagacattgctttgaggagccacggagttttggggggccacagcaccttggggcacacaacccgagcaaccttgttccatttggcatggcttctgctgggtgagcaggacagctcctgtccccagcgaagaatccggctgcccctgggccagtcccaggacctttgcacaggactgatgggtgtaactgacccccacagggaggcaggaaaacagccagaagccaccttgacacttttgaacatttccagttctgtagagtttattgtcaattgcttctcaagtctaaccagcctcagcagtgtgcatagaccatttccaggagggtctgtccccagatgctctgcctcccgttccaaaacccactcatcctcagcttgcacaaactggttgaacggcaggaatgaaaaataaagagagatggcttttgtgaaaaaaaaa

SEQ ID NO: 158071 - DNA, 376 bp, Homo sapiens
  misc_feature (1)...(376): n = a,t,c or g
aaacaggctgcaagtaaccagttagactctttgatgggcctgggcgttcccaccctgtggaggagaggggcattatcctatgtgaattctgtggggtacagctgttttacgatgtgctggtccattaccaggaccagtgggaccttcgcccaggcactgctttcttccgtgtgacagaggggattcctagactgcattcccaagtctcaagagacctggccagagctgctcttaggcgtgttagacgccaagaaaacctgtcttctggttacctggatgatactttgcttgaaacagctaatgggcccaccttttgtctgccggcccgtccactntaacaatatgacagctacctataaccagctatcgagatcag

SEQ ID NO: 158072 - DNA, 2755 bp, Homo sapiens
atgaaggagttctcatcaacagcacaaggcaatacagaagtgatccacacagggacattgcaaagacatgaacgtcatcacattggagatttttgcttccaggaaatggagaaagatattcatgattttgagtttcagtggaaagaagatgaaagaaatagccatgaagcacccatgacagaaatcaaacagttgacgggtagtacaaaccgacatgatcaaaggcatgctggaaacaagcctattaaagatcagcttggatcaagctttcattcgcatctgcctgaactccacatgtttcagaccgaagggaaaattggtaatcaagttgagaagtctatcaacagtgcttcgttggtttcaacatcccaaagaatttcttgtaggcctaaaacccacatttctaagaactatgggaataatttcctgaattcttcattactcacacaaaagcaggaagtacacatgagagaaaaatctttccaatgtaatgagagtggcaaagcctttaattatagctcagtcttaaggaaacatcagataatccatttaggagcgaaacaatataaatgtgatgtgtgtggcaaggtctttaatcaaaagcgatatcttgcatgtcatcgtagatgtcacactggcaagaaaccttacaagtgtaatgattgtggcaagaccttcagtcaggagttaacccttacatgccatcatagacttcatactggagagaaacattacaagtgcagtgagtgtggcaagaccttcagtcgaaattcagcccttgtaattcataaggcaattcatactggagagaaatcttacaagtgtaatgaatgtggcaagaccttcagtcaaacgtcataccttgtgtaccatcgtagacttcatactggagagaaaccttacaaatgtgaagaatgtgacaaagctttcagtttcaaatcaaaccttgaaagacataggaaaattcatactggagagaaaccttacaagtgtaatgaatgcagcaggacctttagtcggaagtcatcccttacacgccatcgtagacttcatactggagagaaaccttataagtgtaatgattgtggcaagaccttcagtcagatgtcatcccttgtataccatcgtagacttcatactggagagaaaccttacaaatgtgaagaatgtgatgaagctttcagtttcaaatcgaaccttgaaagacataggagaattcatactggagagaaaccttacaagtgtaatgattgtgagcaaagcctttacttcacattcacacctcattagacatcagagaatccatactggacagaaatcttacaaatgtgaagaatgtgatgaagctttcagtttcaaatcaaaccttgaaagacataggataattcatactggagagaaactttacaagtgtaatgaatgtggcaagacctttagtcggaagtcatcccttacacgccattgtagacttcatactggagagaaaccttaccagtgtaatgagtgtggcaaagcctttcgtgggcagtcagcacttatttaccatcaagcaatccatggtatagggaaactttacaaatgtaatgattgtcaccaagtctttagtaatgctacaaccattgcaaatcattggagaatccataatgaagagagatcgtacaagtgtaatagatgtggcaaatttttcagacatcgttcataccttgcagttcattggcgaactcatagtggagagaaaccttacaaatgtgaagaatgtgatgaagctttcagtttcaaatcaaaccttcaaagacataggagaattcatactggagagaaaccttacaggtgtaatgaatgtggcaagacctttagtcggaagtcataccttacatgccatcgtagacttcatactggagagaaaccttacaagtgtaatgagtgtggcaagaccttcggtcgaaattcagcccttataattcacaaggcaattcatactggagagaaaccttacaagtgtaatgagtgtggcaaggccttcagtcagaagtcatcccttacatgccatcttagacttcatactggagagaaaccttacaaatgtgaagaatgtgacaaagttttcagtcgcaaatcaagccttgaaaaacacaggagaattcatacttggaagagaaaccatacaaatgtaaggtttgtgacaaagcttttgggcgtgattcacacctgggcacaacatactagaattcacactggagagaaaccttacaagtgtaatgaatgtggcaagaacttccgtcacaattcagcccttgtaattcataaggcaattcatagtggagagaaaccttacaagtgtaatgagtgtggcaagaccttccgtcacaattcagcccttgaaattcataaggcaattcatactggagaaaaaccttacaagtgtagtgaatgtggcaaggtttttaatagaaaagcaaacctttcacgtcatcatagacttcatactggagagaaaccttacaagtgtaataaatgtggtaaggtttttaatcaacaagcacaccttgcatgtcatcatagaattcatactggagagaaaccttacaagtgtaatgagtgtggcaaaaccttccgtcacaattcagtccttgtaattcataagacaattcatactggagagaaaccttacaagtgtaatgaatgtggcaaggtttttaatcgaaaagcaaaacttgcacgtcatcatagaattcatactggaaagaaacattag

SEQ ID NO: 158073 - DNA, 149 bp, Homo sapiens
gattcatttggggcttctcgatttctgaggatacatgccgagagcttatttcactcttagggcttattttgctgagagcagatgcattgaggccttggatgaacttgcttcacttcaggtcacaatgcatcaagctcagaaacacacat

SEQ ID NO: 158074 - DNA, 331 bp, Homo sapiens
atgaattttgagattgtatttttagaaagatctaagaactagagtcaccctaaatcctggagaatacaagaaaaatttgaaaaggggccaggttcttgttacttattctttatttgctagatgccttcctcttcatatcttgatctctttttccttgagtacccgtcttattttctcttatgtttctgttctttactcttattttttttctgtcactgtttttcgctatatttctttgtctgtcgtccctcttcatccctcttttctagctctatcttattaatccttctcttctttcttgttcgttttctcctcttttgcttgtttctcg

SEQ ID NO: 158075 - DNA, 1114 bp, Homo sapiens
  misc_feature (1)...(1114): n = a,t,c or g
tttttttttttttttttgagggggcgtctcactctctcacccaggctggagtacagtggcgcaatctccgttcactgcaacctccagcctggcgagagagcgagactctgtcttaaaaaaaaaagccattaggccaggcgtggtagctcactcctataaccccagcacttagggaggctggtggttaccatgacattcgctggaagaggaatggaactgggatcagattgccacaagggaggccctctgcagtccctccctttgaacaagaagttgtagtaggcaattaagaggagaccagagtgaaaagagatctagtctgttaattccttccactttgcagcttcaattaacatttgctgggttttttttttttannagtcaagctctgtgctgggacttgtgtatataaaaatgagtaaaatatgcttcctaccccggtggagttcacagtcttggtggagttcacaatctatctcaaaaaacttgttaataacgttatgacaaagcacaatagggttatgttaagttatataactggactatgagagcaatgggaaggttggggaatatctgagaaaaggtgatgcctgaataaaagaggatttaagaaaacagtcttggaaaaagggcaccttgagccaaacatttaggcgtggtgctctggagaacagccccagaagtctagggtggagtttaagctacaagacattccatgttgtcttgtatcatatatacatatatatatataaaacacacacacacacacgtatttatatatatatacacatatacatatatacacacacatatatacacatatacatacatatgtatacacacacacatacatatatatatatatatatatatacacacacacttttttttttttttttttttttttgagacggagtctcgctcagttacccaggctggagtgcagtggcatgatctgggctcactgcaagccgcctcctggggtcacgccattctcctgcctcaacctcccaagcagctgggaccacaggtgcccaccaccacgcccagctattttttttttttttgtatttttagtagagacggggcctcaccgtgctagccaggatagtct

SEQ ID NO: 158076 - DNA, 337 bp, Homo sapiens
cggagtgttttccgggaaagaggtaaactgtctgccgggccttggtggagcggctgtacagagtgaggcgatttgaccggttcgaacgtatcttgaagatggccagaaaagctgtggagacccacgtgctcaggagccctcaccttgtttcggactatagagactccatcatcccttctgaatccctgttggccctaccctgctgaggaagtttatcagggtgggctcccttcctgcacttcctgcgcttggaggcattggagagcccacattgaaaatctcttcagtcaaccacatttaaagtgctgacgccagagattttcaatgtgggctctcc

SEQ ID NO: 158077 - DNA, 434 bp, Homo sapiens
  misc_feature (1)...(434): n = a,t,c or g
ccagcccgcaattcccgccacgacccacgcgtccgggctgaatatgaggggaggggatatttatgactgtgttaatcttttttgatcattagctgaatattcaatatttgatatgtaaccatatagggatgtgttcgatataactatataggcaagggatatattgatttggccacatctatttgatttatggagggcaaatacctgtttcttttacatacagccattgccggggcattctaaatgttttttactaacataaagatgattgcgtatnnnnnnnnnnnnnnnnnnnnnnnnnnnnnnnnnnnnnnnnnnnnnnnnnnnnnnnnnnnnnnnnnnnnnnnnnnnnnnnnnnnnnnnnnnnnnnnnnnnnnnnnnnnnnnnnnnnnnnnnnnnnnnnnnncaatactattctccgcatggctccgtgc

SEQ ID NO: 158078 - DNA, 1144 bp, Homo sapiens
tttttgtttttttgagacggagtctcgctctgtctcaaaaacaacaacaacaaaaaaaccccccaaaaaacaaaaaaaaacggaagggagaaaggaaattttaaaaatacaatttggctttagtttgtgaatgttgtgtgcaggtgacacacgatcttttttttttttttttgagagacagtgtctcacttgttgcccaggctggtctcaaactcctggccttgagtgatcctcctgcctcagcctcccaaaggttctaaaattacaggcatgagcaactgctcccagccatacacaatcatctttatcttagtagaaaacttttagaatgccccggcgaatggctgtatctaaaagaaacaggtatttgccctccataaatcaaatagatgtggccaaatcaatatatcccttgcctatatagttatatcgaacacatccctatatggttacatatcaaatattgaatattcagctaatgatcaaaaaagattaacacagtcataaatatcccctcccctcatattcagccttcaaccaaaagtctttctaaggcagcatataacagtgctaacagcaaactgacaaattaaagtggcatactaggaaaaatggagaaataatgccatttgctctgaaaaatacttcagttttatcttcagaatcagatatgtttaatatctgcatataacttaatatgcatttcttccattacaatttttaagtataatccaaggctttaaaaggtatcttttttttacagtaatttaaaattatagaagatgcctttcctataattgaagttattgatcaattgaaggtataaccagactgaaatatacagcaacttcttgaagaatggcaaaaataaagtgaaagttctaaattcttctctgaatttttcagctattgctaatggaaggtcctgccaatataataggcaacacaggttcgtctaacacaggtcggtctaacactggtccaagtaatcaatcatcatatcttatttctttcctttttcttttttgtttttttgagacggagtctcgctctggtcgcccagggctgggagtgcagtgggcgtggatctcgggctcactggcaagctctgcctcctgggtccacaccattctcctgcctcagc

SEQ ID NO: 158079 - DNA, 681 bp, Homo sapiens
gcaacacgtgagctggtgaccagctctgggctgaggaggaaaacggggctgtgggccaggcccagagagaagcccacagcctggcacctggcctccttgtccagaccagatgagctggtacgaaatcctcaggagccccagcctgggcccagggaggagggcagcttgggccacgtggccaggacaccagctcccgggggaggcgggcagcggcatctgagcagagcagggcactccaggccaggcagaaggttcaaggcaacactgtggctgaggtgaagagcacccgctctccctgggtgaccaggtgacccccatcatcgacctaatggccatcagcaacgctcactttgccaagctgcgcgacttcatcactctgcgccttccacctgggcttccccgtcaaaattgagattccccttttccacgtgctcaatgcccgcattcacctttcaggcaacctgtgtgggtgttgatggaggcccctgaggttccgtgtggggtgccgggcccccagcttttgtgttcggccgcattcagggggaacccttttcccgttggcgagggtgggaccccaccttgtttttgaagttgcccaacgggtacagcgtgctgggcatggagcgcaacgagcccctccgggacgaggacgatgaactctctgcagtctgccatcagacg

SEQ ID NO: 158080 - DNA, 1074 bp, Homo sapiens
atgactagtgctaaaactgagatagtcctgggcaaacgggatctgctggaggaagtcatcgacatcctgccggcccccgtgcaggcgtttctctacgagactgcctgccaggagcgtttctgcgccgaattatgtgacgccctgcgcgagcgccatgacagcggcgagatcctgagctatctgcaggcccaccaggtgttcctggtgccggtcaccccagctctgatctttgccatcacagttgctacaatcggctctttccagtttggctacaacactggggtcatcaatgctcctgagacgatcataaaggaatttatcaataaaactttgacggacaaggcaaatgcccctccctctgaggtgctgctcacgaatctctggtccttgtctgtggccatattttccgtcgggggtatgatcggctccttttccgtcggactctttgttaaccgctttggcaggcgcaattcaatgctgattgtcaacctgttggctgccactggtggctgccttatgggactgtgtaaaatagctgagtcagttgaaatgctgatcctgggccgcttggttattggcctcttctgcggactctgcacaggttttgtgcccatgtacattggagagatctcgcctactgccctgaggggtgcctttggcactctcaaccagctgggcatagttattggaattctggtggcccagatctttggtctggaactcatccttgggtctgaagagctatggccggtgctattaggctttaccatccttccagctatcctgcaaagtgcagcccttccatgttgccctgaaagtcccagatttttgctcattaacagaaaaaaagaggagaatgctacgcggatcctccagcggttgtggggcacccaggatgtatcccaagacatccaggagatgaaagatgagagtgcaaggatgtcacaagaaaagcaagtcaccgtgctggagctctttagagtgtccagctaccgacagcccatcatcatttccattgtgctccagctctctcagcagctctctgggatcaatgctgtgagtgtgatactttag

SEQ ID NO: 158081 - DNA, 696 bp, Homo sapiens
  misc_feature (1)...(696): n = a,t,c or g
cagttgctctatcggctctttccagtttggctctaccctggggtcatcaatgctcntgagacgatcataaagaaatttatcaataaatcttgacggccaaggcaaatgcccctccctctgaggtgctgctcacgaatctctggtccttgtctgtggccatattttcccgtcgggggtatgaatcggnctcccttttcccgtcgggactctttgttaacccgctttggccaggtattgacctagaaaacgggccaaggaaagtgggctctgcccagcccacattgaggacaagtgtggagagttagggcagggaggtgatgatgccctttgaataagaacacccttgaattcctaatcaagggaaaccctagtcccaactggccccgaatatgactgcccttgcttggagctctactaccctggatagctcccacccagctgtgcaagagatgaactgtgtgagtgattggcctttgcagcccagctagggatagatcataattattccctagaaaactcaactatggggtttctagaaacatacttaattttacaaggtccgaagttgtttacttgtattataaatgtttttattattttaccccaggattggtacgaattatttttgtctatggcaaatgtggataatgacaaaaaaaaagtcttattctatagaagcttaacactatgttttaa

SEQ ID NO: 158082 - DNA, 404 bp, Homo sapiens
acagacaggcaggggcatgtggtgctcactggtcctgttccttctcatccttccagcaactccaagaaaacaatctgaacctaagacaacagacgcagctgcacctgggacagcagacacagctgggcctgggacaatggacacagctgtacctagaaaagcagaaacagctgtgcctgggaaaaggaacacagctgtgcctggaacagcagacccagcttcacctgggacagcagacacagcagaacctatgagaacaaccactccaacagttctggcctcctggccttctctcacccagagcaccaacagcacccagcccacggctcttaccagccccctcaccaggatcctgctctgcaacatccacttcctgctcccgatctccctgaaggggctgctgg

SEQ ID NO: 158083 - DNA, 200 bp, Homo sapiens
tccagtggccacgcagagccaggctctggtggtcctggattcttaagtccacactgctacgaggaggtatgtggtttcttcccctctctgtcctctttctccccctcacccccagaatgctcacctcagctggtacctgcaggggcccgtgtagatgccctggaccgagctggtcgcacacccctgcacctggccaagtc

SEQ ID NO: 158084 - DNA, 416 bp, Homo sapiens
tttgcctgtttccagtgcagctgctcctggaccatggtgctgatcctaaccagcgagatgggctggggaacacgccactgcacctggcggcctgcaccaaccacgttcctgtcatcaccacactgctacgaggaggtatgtggtttcttcccctctctgtcctctttctccccctcacccccagaatgctcacctcagctggtacctgcaggggcccgcgtagatgccctggaccgagctggtcgcacacccctgcacctggccgagtcaaagctgaatatcctgctagagggccatgcccagtgcctagaggctgtgcgtctggaggagaagcacatcatccatatgctgaaggagcatctggagctcctagggcgacattaccaactgattaacgcctggatgaccttagatcc

SEQ ID NO: 158085 - DNA, 395 bp, Homo sapiens
aaagtccagtccaggtgcagcagcaagggagaacattctcagagccagtcacagtgctgtcgatatcaccaaggtggctagaagaccttcgcatggcgtcttttgctctgacatctatggacaaagcctttatcacagtcctggagatgactccggtgcttgggacagaaatcatcaattaccgatatggaatggcacgaggtcttgttcaatatgtagtttctgatgacattgttttcagcttcctattctcgttactatatgagtactttattcgatcttttcatttttcattgtctttatttatttatctttccttacgaagtttttttaaactccgtgaatctttcttttgcttttcttctatcttcctgtctagtacttttgctctgtcc

SEQ ID NO: 158086 - DNA, 444 bp, Homo sapiens
  misc_feature (1)...(444): n = a,t,c or g
gcgatttttgtttataatgaacaagtagattcaatattaaattgcattttcctcattcttagaacaaatttgcttttttagtttacctgattagttaccatttagctatttacttagggtttatgaagatatattaatctaagtgacatcaggtggaaggacatttattcaaggtagataaatgatgctgagtgcatagtctatgctaactaaatcctattctttattctccaggtagagatcacagagttcaaaatttccatttgcctcgactgtgtatacagaagctctttccgaaatgcgaaatgctttatctatgagttacctgctcaccgcaagaagcttgtgcaacttgaaccactgactgacgatgagctagagcctgactttgtgcgacaggtgacagaatctatgtcctacatctttagccattctatgatctan

SEQ ID NO: 158087 - DNA, 870 bp, Homo sapiens
  misc_feature (1)...(870): n = a,t,c or g
cggttgacgtgtgggtgtggccgggccagcgccctggtggcttcgcgtatcactagggggcaggggatttccacacgcccatcagtggtgactaaggtggccgagcggggcaaagcagaggacgctgacctccggcctggagacataatcgtggccatcaacggggaaagcgcggagggcatgctgcatgccgaggcccagagcaagatccgccagagcccctcgcccctgcggctgcagctggaccggtctcaggctacgtctccagggcagaccaatggggacagctccttggaagtgctggcgactcgcttccagggctccgtgaggacatacactgagagtcagtcctccttaaggtcctcctactccagcccaacctccctcagctctcgggcctgagccccgccatgccctccagcctgcctcaactgctgggccccgggtcatgccctatataaagttggcatggccagggaacaatggtgggcagttgnctccttacatgagcctaagtttggagaccttgaggccccttttgtcctcgctgggtgggccaaggtctgggaccctgtcttggactgtgggagactcaccctcgaccttgccaggcctctcccctgcaggactggcattgcactaagtctgaggtggccactgcctttgatcaacctttgtgtgcgagggtctaagtagggtcgaacacagaagtgggaaggagaggggtgggccaggggctatatggtgtcactgtgtaaagtttttgacatactagctctataaatatatgaatatggacaaaacaaaacacacctaaactgacgaacttgtacttgaaatatgcaaatggggcgcccgtctctcgtgtag

SEQ ID NO: 158088 - DNA, 431 bp, Homo sapiens
  misc_feature (1)...(431): n = a,t,c or g
atgggaacctccctggcccggcccggtgcttggcctccccctcccacctcttcctcctcctagctccccaagctccctgcctattcccccacctccgaggggctgcagcttgggagcctcctcagcatgacagcttgggtctcctccccaaaagagcctgtcaggcctcaagaaccacctccaggtggggagggcagtaacgaaaaccatcgcaggaaatggcaccctcccttttcggtgatgttgaaatcatgttactaatgaaaactgtcctagggaagtggttctgtctcctcacaggcttcacccacggcgatgaggcccttgaatgtggtcactttgtgctgtatggttgagggaccctcacaccaaagggaccttcccatgtgagatgtgctcccgcccccacctgcccacaagcaaacacaccn

SEQ ID NO: 158089 - DNA, 442 bp, Homo sapiens
cccacgcgtccgggtttattatttccgacaaggacatgaagcctatgtcgaaatggcccggaaaaataaaatatatagtatcaatcccaaaaaacaaccatggcataaaatggagctacgggaacaagaacttatgaaaatagttggcataaagtatgaagtgggattacctaccctttgctgccttaaacttgcttttctagatcctgatactggtaaactgactggcggatcatttaccatgaaataccatgatatgcctgacgttatagatttcctagtcttgagacaacaatttgatgatgcaaaatacaggcgatggaatataggaaagggagagtgagtgaccgcttcaggtctgtcatagatgatgcctggtggtttggaacaatcgaaagccaggaacctcttcaacttgagtaccctgatagtctgtttcaag

SEQ ID NO: 158090 - DNA, 1232 bp, Homo sapiens
tggtagagctgtactttttcttcacagcttttaccatggtttataattatacacttatacagtttagtcatcaatgactattttgcttactattgtgtctatgatatgtgatacaaagcaaatattttctaaatattcattgactaaacagccatcaagatgaaacaggacaggagagaactgttcagtgtgatacagagctgccatttccaaagtattctggaagcaagccattgccttactcttgattttcaacagttctaaacagcaacagcatccacctaatataccttcagaatatcaaagcgaaaactgatagaactacaaagagaaataaaatccattctcacggcaggcaaatcagtgagaaaaaatgtaaagatctggaggatttacttagtatcgctaacaagctggatccagtagatgcgtatggaatttcaaatacacatagacgatgcacaaaaaaccaccctgtacgaaggccacaaagaacagctcagatgcacaaagattcacaccatacaggccaaattatagaatcccccaaccccaagacactgcaccctatgggctataccctcaggcagggccctgcttttctaggaattgactccaatgcagaatagtgagaaatcaacaaaaagcaaaataagacaattccagacactcctgaatttacttggatttaaagaggttaataaaaacaaactataaactctgtagactgggctgacagtaaaagcacagaatacaaaacccaggggatggggctgggaggggctgtgaggggctggcacctcagctcagaaaaggtagcagcattccccaaagcagcagaaggcaggggttaaatcaggataaaaacagacatcagtggaatcgaaaaccaatagttagttaatataaagccagaagggtttgttttttttcaggtggggtctcgctctgtcacctaaactagactggagtgcagtggcctgatctcggctcactgcaacctctgcctcccgagttcaagcaattctcctgcctcagcctcctgaggggctgggattgcaggcgtccgctaccacaactggctgatttttgcatttttagtagagacgggggatattgctatgttggccaggctggtctcaaacttctgacctcaaatgattgcctgcctcagcctcccaaagtgctgggattacaggtgtaagtctctgtacccagcccaaaagcagttt

SEQ ID NO: 158091 - DNA, 424 bp, Homo sapiens
aagcctctggctggcagctggtgttttccagcccccgcctggactggcccatcgaacgactggcgctcacagcccgggtgcatggaggggctttgggtgaacatgacaagatggtggcagcagccaccggcagcgagatcctgctatgggctctgcaggcggaaggcggcggctccgagataggtgacagcgggaactggatcgagatcgcctatggcaccagcttagggggcgtgcgggtcatcgtgcagcacccggagactgtgggctcggggcctcagctcttacagaccttcactgtgcaccgcagccctgtcaccaagatcatgctgtgggagaagcacctcatctcagtctgtgccgacaacaaccacgtgcggacatgtgctgtgactcgctaccgcggcatgatttgcacccagcc

SEQ ID NO: 158092 - DNA, 645 bp, Homo sapiens
atggaggttgcactgcaggagggggcggcccagctgcggacggtgtatgcgggtgaacatgccgaggccatcgctagccgggagcaggaggtgctgcagggttggaaagagctgctgtcagcctgtgaggatgcccgcctgcatgtcagctccacagccgacgccctgcgcttccacagccaagtccgcgacctgctctcctggatggatggcatcgccagccagattggggcagccgacaagcccaggtgcttcgtgtgtattcagaccccttttttaggcctgtcattggggacttcggtcatggggcatccttctgtccgctgtccttcccagttgcctattattaccctctccatgggatgtcacagcatgaaacaggctaaagacaggatgggcaagggagtgttcccagtgaagcggcggaaccggcacagcctagtggggcctcagcagctaggaggacggccagcccctgtccgacggagcaacacgatgccccccaaccttggcaatgcagggctgctgggccgaatgctggatgagaaaacccctccctcaccctcaggacaacctgaggagccggggatggtgcgcctgccccataaggtgggtactcttactatccgcaaagagaagctgtga

SEQ ID NO: 158093 - DNA, 4988 bp, Homo sapiens
cacccgtaattcccgggtcgacgatttcgtcgctgcagccatggcgggcggcgtgcggctgctctgggtgtcgctattggtgctgctggcgcagctaggggccgcagcctggactgggccggctcggagagcgtctccgcgtgcgcttcaccccggtcgtgtgcggcctgcgctgcgtccatgggccgaccggctcccgctgtaccccgacctgcgcgccccgcaacgccaccagcgtggacagcggcgctcccggcggggcggccccggggggacccgggcttccgcgccttcctgtgtcccttgatctgtcacaatggcggtgtgtgcgtgaagcctgaccgctgcctctgtcccccggacttcgctggcaagttctgccagttgcactcctcgggcgcccggcccccggccccggctataccaggcctcacccgctccgtgtacactatgccactggccaaccaccgcgacgacgagcacggcgtggcatctatggtgagcgtccacgtggagcacccgcaggaggcgtcggtggtggtgcaccaggtggagcgtgtgtctggcccttgggaggaggcggacgctgaggcggtggcgcgggcggaagcggcggcgcgggcggaggcggcagcgccctacacggtgttggcacagagcgcgccgcgggaggacggctactcagatgcctcgggcttcggttactgctttcgggagctgcgcggaggcgaatgcgcgtccccgctgcccgggctccggacgcaggaggtctgctgccgaggggccggcttggcctggggcgttcacgactgtcagctgtgctccgagcgcctggggaactccgaaagagtgagcgccccagatggaccttgtccaaccggctttgaaagagttaatgggtcctgcgaagatgtggatgagtgcgcgactggcgggcgctgccagcacggcgagtgtgcaaacacgcgcggcgggtacacgtgtgtgtgccccgacggctttctgctcgactcgtcccgcagcagctgcatctcccaacacgtgatctcagaggccaaagggccctgcttccgcgtgctccgcgacggcggctgttcgctgcccattctgcggaacatcactaaacagatctgctgctgcagccgcgtaggcaaggcctggggccggggctgccagctctgcccacccttcggctcagagggtttccgggagatctgcccggctggtcctggttaccactactcggcctccgacctccgctacaacaccagacccctgggccaggagccaccccgagtgtcactcagccagcctcgtaccctgccagccacctctcggccatctgcaggctttctgcccacccatcgcctggagccccggcctgaaccccggcccgatccccggcccggccctgagtttcccttgcccagcatccctgcctggactggtcctgagattcctgaatcaggtccttcctccggcatgtgtcagcgcaacccccaggtctgcggcccaggacgctgcatttcccggcccagcggctacacctgcgcttgcgactctggcttccggctcagcccccagggcacccgatgcattgatgtggacgaatgtcgccgcgtgcccccgccctgtgctcccgggcgctgcgagaactcaccaggcagcttccgctgcgtgtgcggcccgggcttccgagccggcccacgggctgcggaatgcctggatgtggacgagtgccaccgcgtgccgccgccgtgtgacctcgggcgctgcgagaacacgccaggcagcttcctgtgcgtgtgccccgccgggtaccaggctgcaccgcacggagccagctgccaggatgtggatgaatgcacccagagcccaggcctgtgtggccgaggggcctgcaagaacctgcctggctctttccgctgtgtttgcccggctggcttccggggctcggcgtgtgaagaggatgtggatgagtgtgcccaggagccgccgccctgtgggcccggccgctgtgacaacacggcaggctcctttcactgtgcctgccctgctggcttccgctcccgagggcccggggccccctgccaagatgtggatgagtgtgcccgaagccccccaccctgcacctacggccggtgtgagaacacagaaggcagcttccagtgtgtctgccccatgggcttccaacccaacgctgctggctccgagtgcgaggatgtggatgagtgtgagaaccacctcgcatgccctgggcaggagtgtgtgaactcgcccggctccttccagtgcagggcctgtccttctggccaccacctgcaccgtggcagatgcactgatgtggacgaatgcagttcgggtgcccctccctgtggtccccacggccactgcactaacaccgaaggctccttccgctgcagctgcgcgccaggctaccgggcgccgtcgggtcggcccgggccctgcgcagacgtgaacgagtgcctggagggcgatttctgcttccctcacggcgagtgcctcaacactgacggctcctttgcctgtacttgtgcccctggctaccgacccggaccccgcggagcctcttgcctcgacgttgacgagtgcagcgaggaggacctttgccagagcggcatctgtaccaacaccgacggctccttcgagtgcatctgtcctccgggacaccgcgctggcccggacctcgcctcctgcctcgacgtggacgaatgtcgcgagcgaggcccagccctgtgcgggtcgcagcgctgtgagaactctcccggctcctaccgctgtgtccgggactgcgatcctgggtaccacgcgggccccgagggcacctgtgacgatgtggatgagtgccaagaatatggtcccgagatttgtggagcccagcgttgtgagaacacccctggctcctaccgctgcacaccagcctgtgaccctggctatcagcccacgccagggggcggatgccaggatgtggacgaatgccggaaccggtccttctgcggtgcccacgccgtgtgccagaacctgcccggctccttccagtgcctctgtgaccagggttacgagggggcacgggatgggcgtcactgcgtggatgtgaacgagtgtgaaacactacagggtgtatgtggagctgccctgtgtgaaaatgtcgaaggctccttcctctgtgtctgccccaacagcccggaagagtttgaccccatgactggacgctgtgttcccccacgaacttctgctggcatgttcccaggctcgcagccccaggcacctgctagccccgttctgcccgccaggccacctccgccacccctgccccgccgacccagcacacctaggcagggccctgtggggagtgggcgccgggagtgctactttgacacagcggccccggatgcatgtgacaacatcctggctcggaatgtgacatggcaggagtgctgctgtactgtgggtgagggctggggcagcggctgccgcatccagcagtgcccgggcaccgagacagctgagtaccagtcattgtgccctcacggccggggctacctggcgcccagtggagacctgagcctccggagagacgtggacgaatgtcagctcttccgagaccaggtgtgcaagagtggcgtgtgtgtgaacacggccccgggctactcatgctattgcagcaacggctactactaccacacacagcggctggagtgcatcgacaatgacgagtgcgccgatgaggaaccggcctgtgagggcggccgctgtgtcaacactgtgggctcttatcactgtacctgcgagcccccactggtgctggatggctcgcagcgccgctgcgtctccaacgagagccagagcctcgatgacaatctgggagtgtgctggcaggaagtgggggctgacctcgtgtgcagccaccctcggctggaccgtcaggccacctacacagagtgctgctgcctgtatggagaggcctggggcatggactgcgccctctgccctgcgcaggactcagatgacttcgaggccctgtgcaatgtgctacgcccccccgcatatagccccccgcgaccaggtggctttggactcccctacgagtacggcccagacttaggtccaccttaccagggcctcccatatgggcctgagttgtacccaccacctgcgctaccctacgacccctacccaccgccacctgggcccttcgcccgccgggaggctccttatggggcaccccgcttcgacatgccagactttgaggacgatggtggcccctatggcgaatctgaggctcctgcgccacctggcccgggcacccgctggccctatcggtcccgggacacccgccgctccttcccagagcccgaggagcctcctgaaggtggaagctatgctggttccctggctgagccctacgaggagctggaggccgaggagtgcgggatcctggacggctgcaccaacggccgctgcgtgcgcgtccccgaaggcttcacctgccgttgcttcgacggctaccgcctggacatgacccgcatggcctgcgttgacatcaacgagtgtgatgaggccgaggctgcctccccgctgtgcgtcaacgcgcgttgcctcaacacggatggctccttccgctgcatctgccgcccaggatttgcacccacgcaccagccacaccactgtgcgcccgcacgaccccgggcctgagccctggcacccgatggccacccacccgcgcccgccactcggggcccctgccccgcatcctgcagcccgcttagtctgatgacgaggaagcccgccagaaagtccagaagaaggaacgacggacgcaaagcggcgccgcctaccatgcctcccccccccaccaccaccccccccaactgtggtcgtccccgcccggcccaccccgcccccatttctccccccttctttcaataaaaatttcaatcataaaaaaccacctataaaaaaaaaaa

SEQ ID NO: 158094 - DNA, 1501 bp, Homo sapiens
atgacgcaaaagaaaaaccaaacagagcagaaagagcaaaaaaacgaacaaaaaaaacaacacaacgaacgaaaagaacacaagaagaaacaaacagaatacaaaacacacgagacaaacagacccaggaaaacagaaagagcggagcacgacgaacaaaaaagagagaacgagggaaaaaggagacgacacaagaaacggacagtgagaggaaaaaaacgaacgaagagacagagacacggaaaggaagggagaagccagaacaagcaagacaagccagaaaagagaaacaaaagagacaacggggggaaagacaaaacagaagagaaaaaaagaaaaaacaacagacaagaaaacgaagaggaagaagcgaacgagcaagacagaagagaacaaaaagaggaaacaagaaaaagaggaccgagaaagagacgagagcacaaagaggaggaaggaaggagagagagaaagaagaggaaacgcaagacgaaggaaaaagggcggagagcacagcaaaaagagaggagagaggaggaacaacagcaaaggagaaggagaagaagaggaaagaggaagaaaaacgaaagcgaagacgaggaggacaaggcaagcaacaaacacagacagcaagaacgagaaaggcagaaaaggaaaggggcagacgcgggcgcgcagaccagcagaaacagggaggaggagaagaaaaagaaagagacagaggaaagcaggcgaaacaacgccaggagagacagggagatggtgtgcttccgtgcgctccgtggacggctcacccacaacagccttcacagtgttggagtgcgagggctcccggcggctcggctcatcggccccggcgctacctgctcaattgccaggccaacggcagcttggccatgtgggacctaaccaccgccattggacggcttcggccaggcccctgcaggtggcctgacggagcaagagctgatggaacagctggaacactgtgagctggccccgccggctggcttcaagctccctcaatggggctgtctccccaagcccctcaccccgcatctccctcaccaagcctccactcaagcctccagcaacacctcctttgtctggccaaccgtgggaagcccaaagccccccgcaaggctgaaggcccggcgccgtgggtggggggaagctttgtggaaagctgccaggaactggtgcggagtgggccagacctccgacggccacccacaccaagccccgtggccctccaagcggtctcggcactcccctcacaccttccaagaatgaagctcaatgaaacttccttttgaacaacgcagctgccatgatgccttgggatgccctggtcctgggggactcaggtgcctccctgattcctgtgggaaccccgggttcagggccagggcctccttggaataaatggttattgttactaggtccccaccttccctcttttctggaagccaaagtcaccctccccaataaagtcctcactgcc

SEQ ID NO: 158095 - DNA, 1703 bp, Homo sapiens
atggcgggcggcgtgcggctgctctgggtgtcgctattggtgctgctggcgcagctagggccgcagcctggactgggccggctcggagagcgtctccgcgtgcgcttcaccccggtcgtgtgcggcctgcgctgcgtccatgggccgaccggctcccgctgtaccccgacctgcgcgccccgcaacgccaccagcgtggacagcggcgctcccggcggggcggccccggggggacccggcttccgcgccttgttcccagtgaagcggcggaaccggcacagcctagtggggcctcagcagctaggaggacggcccagcccctgtccgacggagcaacacgatgccccccaaccttggcaatgcacggctgctgggccgaatgctggatgagaaaacccctccctcaccctcaggtacgtttctatctcgtggaaggacaacctgaggagccggggatggtgcgcctggtgtgtggacaccataattggatcgctgtggcctatacccagtttctagtctgctacaggttgaaggaagcctctggctggcagctggtgttttccagcccccgcctggactggcccatcgaacgattggcgcttcacagcccgggtgcatggtggggctttgggtgaacatgacaagatggtggcagcagccaccggcagcgagatcctgctatgggctctgcaggcggaaggcggtggctccgagataggggtctttcatctgggggtgcctgtggaggccttgttcttcgtcgggaaccagctcattgctacaagccacacagggcgcatcggggtgtggaatgccgtcaccaagcactggcaggtccaggaggtgcagcccatcaccagttatgacgcggcaggctccttcctcctcctgggctgcaacaacggctccatttactacgtggatgtgcagaagttccccttgcgcatgaaagacaacgacctccttgtcagcgagctctatcgggacccagcggaggatggggtcaccgccctcagtgtctacctcacccccaagaccagtgacagtgggaactggatcgagatcgcctatggcaccagctcagggggcgtgcgggtcatcgtgcagcacccggagactgtgggctcggggcctcagctcttccagaccttcactgtgcaccgcaggccctgtcaccaagatcatgctgtcggagaagcacctcatctcagtctgtgccgacaacaaccacgtgcggacatggtctgtgactcgcttccgcgtgcatgatttccacccagcccggctccaccccactcgcttcctttaagatcctggctctggagtcggcagatgggcatggcggctgcagtgctggcaatgacattggcccctacggtgagcgggacgaccagcaagtgttcatccagaaggtggtgcccagtgccagccagctcttcgtgcgtctctcatctactgggcagcgggtgtgctccgtgcgctccgtggacggctcacccacgacagccttcacagtgctggagtgcgagggctcccggcggctcggctctcggccccggcgctacctgctcactggccaggccaacggcagcttggccatgtgggacctaaccaccgccatggacggcctcggcaggcccctgcaggtggcctgacggagcaagagctgatggaacagctggaacactgtgagctggccccgc

SEQ ID NO: 158096 - DNA, 566 bp, Homo sapiens
atcgtagactctagtcactgtggggaattcccagggacgcgagggcttggcttttctcgtcagctgccctgaggggagagcggactgtgccagtgagtcggcgtgcagcagcgacagcctggacgaggccagatcgtccggctcggaagggacgccggcagacacgggtgacctctcgcctggccacggcgcgtcagcgccctcggtgtccagagaggctcgccaaacggtgccgcccctgacggtcaggctgcacacacagagcgtgtcggagtgcatcacggaggacggcaggactgtggccgtgggggacatcgtctggggtcaccgacgatgagggcgcacctgctgtcctggagcttccgatctctgttcggggaccctgtgagccttctggccggctgcgtgcagagcccactgggcacggtggtcggcctggtgtgaggtcccccggggaccggcagtgtgttcagggaggggatggacctgagcccagcggctcctcccgctgagtgtatttgttcccaccactcagcgcatggctgccctggctcacgaggcagtat

SEQ ID NO: 158097 - DNA, 906 bp, Homo sapiens
  misc_feature (1)...(906): n = a,t,c or g
gagccctgaaattctggtggacccacgcctccgcccacgcgtccgcttggcttttctcgtcagctgccttgtggggagagcggactgtgccagtgagtcggcgtgcagcagcgacagcctggacgaggccagatcgtccggctcggaagggacgccggcagacacgggtgacctctcgcctggccacggcgcgtcagcgccctcggtgtccagagaggctcgccaaacggtgccgcccctgacggtcaggctgcacacacagagcgtgtcggagtgcatcacggaggacggcaggactgtggccgtgggggacatcgtctggggtaagatccatggttttccttggtggccggcgcgtgttcttgacatcagtctcggccagaaggaggacggagagccgtcttggcgagaagcgaaggtctcgtggattggttctccgactacgtcgttcttgtctatttcaaaactctcccctttctctgaatttttcaaactgagatttaatcgtaagaagaaggggatgtatcggaaagctataaccgaggctgcaaatgccgcaagacacgtggccccggaaatcagggagctcttaacccagtttgaaacgtaactggttccctgaccaggtcaccgacgatgagggcgcacctgctgtcctgggagcttccgatctctgttccggggaccctgtgagccttctggccggctgcgtgcagagcccactgggnacggtggtcggcctggtgtgaggccccccggggaccggcagtgtgtccagggaggggatggccctgagcccagcggctcctcccgctgagtgtatttcttcccaccactcagcgcatggctgccctggctcacgaggcagtcgggactcgtgacttgctggctgctggctgctgctgc

SEQ ID NO: 158098 - DNA, 392 bp, Homo sapiens
tcgcagacgctgcggtgccaactcgctgtgtgacctcgggccactctctgcctatctctgggcatgctgctgaatcggagctctttcatagacacaggcatcatcctgccatcccggaggaatgtgctgcccattcgaggggcatcttccacccggagggcccgccccctagagaggccagcgacccctgtgcctgtcgcccccagcagcagggctgccaggagcagacacatagatcccctcctgcagtcttcctccccaacaccccctggtcctacagggtcggctgcttacgtggctgttcccacccccaactcatcctccccagggccagctgggaggccagcgggagccatgctctaccactcctgggtctctgaaatcactgaaat

SEQ ID NO: 158099 - DNA, 393 bp, Homo sapiens
ttaaggatttcgtaatcctcccagggattcccaccacccgcactccactcgcagacggcgggccttcctccgacgctgggagaaggaccctgggagaggcaagggaagggctccggaaccagcgcagcagcgggacgctagcccgcccacacggcggccacttgaaggtcctccagggaacacctgaggcagtgggagcgtctgccctttcctaagtctccttggaaagaagtattcgctttcgtttccgcaaacaaagcatgctccgcgctttcaggaccggtggctcccgtggagaccgcagcggaacccagtccgccttcgcacgcgtccgggggagaagcggccccaggactaagggcgcgcgcccgaggaaccggtgctgtgacgacc

SEQ ID NO: 158100 - DNA, 399 bp, Homo sapiens
ggcgaggacaaatactggtggcagaccatactgcttcattaggatgaggtaacttaattcataggacccagcagggatataataatcccaggcctctttcaaccaatataattctttctgacatacaaaccgaaaccaagctgaggcctccttatcaaatttccatgtgcgaactggggtcagccaaaggagtcacatcagcattttctgctgactgtaaaggagctgagaagatttcttctggtcaccaacgactggaaccagcaactctgtcagggattgcagagatttatccttagtcttttatggggagctctgaatttaattccaggctttcatgctatacaaaggctcctgcagagagaaggcgacgattttaactccttcatcgcattgttc

SEQ ID NO: 158101 - DNA, 401 bp, Homo sapiens; identical to SEQ ID NO: 130871
  misc_feature (1)...(401): n = a,t,c or g

SEQ ID NO: 158102 - DNA, 443 bp, Homo sapiens
  misc_feature (1)...(443): n = a,t,c or g
nttgattgcagtccctagtccgtgcggtggaattcctgtcgcgcagaagctcctcaatggccagcgccagctgcagccccggccgcccactcgcctcatctgagcctgggcgaatctggattgggaaagttgatattaatcaactcattattcctcacagatttgtattctccagagtatccaggtccttctcagagaattaaaaagcctgtacaggtctacatattggtatttttaattgatgataagctggaataatattaatacacacaaagcacgtgttgtaactttcattatgcttccctagagctggcagcctgctatcaattacattgatagtaaatttgaggactacctaaatgcagaatcgcgagtgaacagatgtcagatgcctggtaacagggtgcaggggtgtttatacttcattgctccttcaggacatg

SEQ ID NO: 158103 - DNA, 674 bp, Homo sapiens
tttcgtgggcgggatgtaaccggctgctgagctggcagttctgtgtcgctaggcttctgcccggccgccgccgcacataagctgcgaggaggagctttacgacttcccggtcttcggggccgggcgcagcaagggccagactctgcgctagcaggcgctgcgcgccaaccggccggcacctgtcgcagaaggtgcaaccgatcgcactgtcgcgcagaagctcctcaatggccagcgccagctgcagccccggccgcccactcgcctcatctgagcctgggtggaacaatccaaagttttaatcaaagtatggtggtgttcagttgctgcttacgatagttgataccccacgatttggagatgcagtggataacagtaattgctggcagcctgttatcaattacattgatattaaatttgaggactacctaaatgcagaatcgcgagtgaacagatgtcagatgcctggtaacagggtgcagtgatgattatacttcattgctccttcaggacatggaccattacataactgaagactcccaccttcaggcaggattgggtagtacgtgtttgtaactacctggcattgccttttgttgaggaagggtagatgtctacccaaatggaatattgagtatcagagacttcaaatgataacttttgtttgtttggag

SEQ ID NO: 158104 - DNA, 627 bp, Homo sapiens
gggagtgcgagatccgctgctgctgaggagaggagcgtcaacagcagcaccatggtagctcaacagaagaaccttgaaggctatgtgggatttgccaatctcccaaatcaagtatacagaaaatcggtgaagagaggttttgaattcacgcttatggtagtgggtgaatctggattgggaaagtcgacattaatcaactcattattcctcacagatttgtattctccagagtatccaggtccttctcatagaattaaaaagactgtacaggtggaacaatgcggagtttgtaatcaaagaagggggtgttcacttgctgctcacaatagttgataccccaggattttggagatgcagtggataataagtaattgcctggcagcctgtttatcgactacattgatagtaaatttgaggactacctaaatgcagaatcacgagtgaccagacgtcagatgcctgattaacagggtgcagtgttgtttatacttcattgctccttcaggacatggactttaaaccattggatattgagtttatgaagcgtttgcatgaaaaagtgaatatcatcccacttattgccaaagcagacacactcacaccagaggaatgccaacagtttaaaaa

SEQ ID NO: 158105 - DNA, 371 bp, Homo sapiens
tgtgctggagttggaagagcgcgcgctactacgcgaagcccgactggggagagcccgaagctcagggggcatgcaggccacccctgccactgagggtctggcgcggccccaggctccttcatcgtccgccttccgttgcccctactgcaaaggcaagtttcgcacctcagcggagcgcgaacgccacctgcacatcctgcataggccctggaagtgcggcctgtgcagtttcggctccagccaggaggaggagctgctgcaccacagcctgccaagtgtgcggccagagctttacacagtcttggtttctcaagggccacatgcgtaagcacaaggcctccttcgatcatgcgtgtccggtgtgcggccgc

SEQ ID NO: 158106 - DNA, 983 bp, Homo sapiens
ttttcctgctcttccctgcacttcccagaaccaaagaatgtgaagggggtccatggagggctcacgtccccgcgccccgagcggccacttagcgccgtcgccgccggctttcgacggcgagctggatctgcagcgatactccaacgggccagccgtgagcgcagggtcgctcgggatgggagcggtgagctggtctgagagtcgtgcaggcgaacggcgcttcccctgccctgtatgcgggaagcgcttccgcttcaactctatccttgctttgcacctgcgggcgcacccaggagcccaggccttccagtgccctcactgcggccaccgcgcggcgcagcgggctctgctgcgctcgcacctgcgcacacaccagcccgagcgcccacgtagtcctgctgcacgcctgttgctggagttggaagagcgcgcgctactacgcgaggccccgactggggagagcccgaagctcagggggcatgcaggccaccccttgccactgatggtctggcgcggccccaggctccttcatcgtccgccttccgttgcccctactgcaaaggcaagtttcgcacctcggctggagcgcgaacgccacctgcacatcctgcataggccctggaagtgcggcctgtgcagtttcggctccagccaggaggaggagctgctgcaccacagcctgacggcccacggggctcccgagcgtcccctggcggccacctccgttgcgcctccgcctcagcctcagcctcagcctccaccccagcccgaacccagatcagtcccccagccggagccggagccggagcccgaacgtgaggcaaccccgaccccagctcctgccgctcccgaggagcccccagcgcctccggagttccgctgccaagtgtgcggccagagctttacacagtcttggtttctcaagggccaacatgcgtaagcacaaggcctccttcgatcatgcgtgtccggtgtgcggtcgc

SEQ ID NO: 158107 - DNA, 582 bp, Homo sapiens
ggtaatgctggattaagtagcctgacggaaggggtcttggatctttttgcagtgaaggctgtatacatgggccaccctggcattgatatacacactgtgtgtgttcagaacaaactgggtagcatgttcctgtcagagactggtgtgacattgctctatgggcttcagaccacaagacaacagattattgcacttcgtggcaccaaagcacacagctaaaatgctcttcagcggattattggaactcactagagctgtgagaaagatgaggaaattccctgaccaaagacagcagtggctgcggaaacagtacgtcagcctttatcaggaggatggacggtatgaaggcccaactttggctcacgctgtggagttgtttggtggcagacggtggagtgctcgaaaccccagccccggaacatcagcaaagaatgctgagaagcccaatatgcagagaaacaataccctgggcataagcactaccaagaaaaagaagaaaatcctcatgaggggtgagagtggagaggtaactgacgatgagatggcaacccgaaaggccaagatgcacaaagagtgtcgaag

SEQ ID NO: 158108 - DNA, 428 bp, Homo sapiens
  misc_feature (1)...(428): n = a,t,c or g
ctccgtggggtcggagtcagacagctccaaagaagagaccatctatgacacgatccgggccactgcggagaagccgggcggtgccaggacggaggagagccagggcaacacgctggtgatccgcgtggtcatccatgacctgcagcagacgaaatgcattcgatttaacccggatgccacagtgtgggttgcaaagcagcggatcctgtgtacattaacccagagtttgaaagatgtgctgaactacggcctgttccagccggccagcaatgggcgtgacggcaagttcctggatgaggagcggctcctgcgcgagtacccacagcccgtgggtgagggcgttccttccctggagtttcgatacaagaagcgggtgtataaacaagccagtctcgatgagaaacagttggccaagctccacacgaagn

SEQ ID NO: 158109 - DNA, 330 bp, Homo sapiens
gtcattttcttggtgaacagtggctcagaagccaatgagctggccatgctgatggccagggcgcactcaaacaacatagacatcatttctttcagacaatgtgtccagatgtttttcgtggcccttggggaggaagccactgtcgagattctccagtgcaaacaatcaggaagtgcagctgtgcaccaggtccgactgggcaaggggggtgccagtggagtgttggaagttggaagggacacgaataaaggcagactcatccctgagggaacaattgaatttgaaaacatggaaaagggaaaagccagaggaagcaaaactggaaagtaa

SEQ ID NO: 158110 - DNA, 501 bp, Homo sapiens
atgactctaatctggagacatttgctgagacccttgtgcctggtcacttccgctcccaggatccttgagatgcatcctttcctgagccgtaagtggaaaccagggggacgtgggtcagtagaggatcagcgagaggagcacgcatgggacagaggggacctccacagagaaggctgtgagagatcatgtccggagcggatgataccgaacagcaatggtgagggtcctcagcagcgtgctgcagactgcggccccatgtgtgaagagaaaacgaccactctggagtctccaagctggcagctccagcacagagaagcagaggagaaaaatttctctaccgaccagacactgtccctcaggcgtccaaaccccaacacagcttcagcaggcctccatgggaggcagtgtctcaaacgtacttcccggacatcagtaaccaagctcagtcttcatacaaagcccagaatgcctccatgtgacttcatgcctgaaagataccag

SEQ ID NO: 158111 - DNA, 380 bp, Homo sapiens
gagcctaccatggatgcagtccttacacacttggcttgacaaacgtagggatctacaagatggaactccctggtgggacaggttgccaaccaacaatgtgtccagatgtttttcgtggcccttggggaggaagccactgtcgagattctccagtgcaaacaatcaggaagtgcagctgtgcaccagactgctgccaagctaaagatcagtatattgagcaattcaaagatacgctgagcacatctgtggccaagtcaattgctggatttttccgcagaacctattcaaggtgtgaatggagttgtccagtacccaaaggggtttttaaaggaagccttttgagcttggtgcgagcaaggggaaggccgtgtgcattgcag

SEQ ID NO: 158112 - DNA, 864 bp, Homo sapiens
ctctctctccttcctattttcattctatctcttttcctcactctctttttctcccccttgaaggcactgttactagaaatagagagctctggggcttgctgcaagccatgggagttcaccactccaggattccccttttagcgcctcctccccatcttaatctcaaagtccagcaggatagtgagcagttagagcccggcctccaatctgcttccatgggggttggctttctgagtgggagaaatgactctaatctggagacatttgctgagacccttgtgcctgggtcaattccgctcccagggatccttgagatgcatcctttcctgagcctaggtacttcccggacatcagtaaccaagctcagtcttcatataaagcccagaatgcctccatgtgacttcatgcctgaaagataccaggtcattttcttggtgaacagtggctcagaagcccaatgaagctggccatgctgatggccagggcgcactcaaacaacatagacatccatttctttcagaggagcctacccatggatgcagtccttacacacttggcttgacaaacgtagggacctacaagatggaaactccctggtgggacaggttgccaaccagtgagtttggagatttttctcttgtttctttaaagactgctgggtatgtgaagtagttgatcaggttttcctggtataaggattagaaactaatataaagcctgtcattaatcaggggctcaatttgacctaattgaattggagaccacttgaggacaccattagaaaggccttccgagtctgagtaataattaatgacagagttttaaaatgtattttgcttttaaataaaatcaagtaaactgcaa

SEQ ID NO: 158113 - DNA, 1576 bp, Homo sapiens
tttttcatttttaaaaaaggttttaattccatatagtacagtacttcaatttttttgtttgtttgtttgtttgtttgtttgagacagaatctactctgtcacccaggctggaaggcagtggtgtgatctcggctcactgcaacctccaccctccctcctgggttcaataattcttgtgcctcagcctcccgagtagctgggactacacagtgagactccgtctcaaaaaaaaaaaaaaagaaagaattaaactatacctttaatatatgaagaaaatgatagtttggcatcatttatagtaaatgtgttcataaacattctaaatattccaaacacgtacatacagaagaacataatcttaagacaatgatttttattacctttagtctaccacatttgtcactataaatatacttattgaaaaaaaaccatactatttaaataagaattcagttcatgaaagtttacaaaatacaaccaatgtactctgacttgtggttatatcttaactatctcaactgtacttttctggttatggccagaccttttgcaaatattaccatggggattttaattttatgatataaaaccagtagccaatttattaaggttttcccattattaaaaattaatatggtaattctccaaaatactgaaaaaactgttttatgaaaggcaggtacccacatcactggcaacgtatttcctttctcttggggaaaacatctttcaaaagggcacattttaattactagtgtttatatctaaagatagtagtttggaggttttggaatttccagtcaattttccattatctcaaaattgagctaatggagggttggaagaggtaggagaacgcaggtttccaatgaactgccctcagggcagcagaatcctcattcatctcgtccatgaagaccaaaaggaagatataagggaaaaaggaatggcagatctgttttgcatcctaatttaaccttctacacaaaatacttcattaaaagcaaataaacaaacacaagatagtaagcttagaaaacaaaaggccctagacccacaaattaccccagttaagccccaagtggtgacattggttttaagcctcaagaaaatgaaacttctgcttctgtaaaatcacatcttcatcaattgaatttaaatcacttagtgcattaacaatgttacaaattccaataatgtccagacatatggatggatattcaaaataaagtacaaaaatacatttccaaaatccaaatataaatggacttttatggttatcctgccatgctcccctttaatttggcctgatagtctacatttgactgtaattataataacatctgtaatttcaagtacaatagtacaatcataataattttgaagaacgtatgacctaggaccccaaaatgcaatccaatatacaatttggagtatggtttactttttagtgaagtttaatactaattgaagtactaaattgaacaaggccagtactctgaagtactaatctcaagtatttgatcccatgtaagaaacagaagggaatttttaaggcaattttggtattccaaaa

SEQ ID NO: 158114 - DNA, 310 bp, Homo sapiens
cggccgcgtcgacggggagaccacagggaggtgaaaggtgggcggggggggaaaggaggagaggggagaccacagggaggtcaaaggtgggcagtggggaaaggaggagaggggagaccacagggaggtcaaaggtgggcagtggggaaaggaggagaggggagaccacagggaggtcaaaggtgggcggaggggaaaggaggagaggggagaccacagggaggtcaaaggtgggcagtgggggaaaggaggagaggggagaccacagggaggtgaaaggtgggccgggggggaaaggaggagaggggag

SEQ ID NO: 158115 - DNA, 384 bp, Homo sapiens
caaatatgtgtttactgatatatcatatagcataccacaccgggagcgttttattgtcgtcagagaaccaagtggcacactacgcaaagcctcttgggaagaacgggaccgaatgatacaagtttatttcccaaaagaaggtcgtaaaattttgacaccaataattttcaaggaagaaaatcttaggtttgagccagattccacagagtatatcaaggttcatcacaagacctatgaagatataggtaaacgtgggaaaatatgaccttttacgttcaacaaggtactttgggtgggaatgggtgtgggtattttgttaaattattaaaaaggtttgatgggtttgcttgatttgacccggtttccggaggaggttttaattcg

SEQ ID NO: 158116 - DNA, 1207 bp, Homo sapiens
tattgctgtggagcctcttgaggagttctccgggcgtggaacgggtctgtttccgggctcgaatccagccctggcacggtggcctgctccaaccgctaccttgctctttcgagatggggctgtcacagccgacggatcaactcctatggcgcagaatctggtagcccagagaccaagaaacctacatttatggatgaggaagttcaaagcagtactcacgaaaatgacaggcttgaacttgcagaagacttttaagccagctatacaagaactgaagccaccaacctataagctaatgactcaggcacagttggaagaggctacaagacaggcagttgaggcagctaaagtacgattaaaaatgccaccagttctggaagagcgagtaccaataaatgatgtgttagctggagataaggatttttggaaaggaacagaaacaaccaaatatgtgtttactggatatatcatattgcataccacaccgggagcgttttattggtcgtcagagaaccaagtggcacactacgcaaagcctccttgggaagaccgggaccgaatgatacaagtttatttcccaaaagaaggtcgtaaaattttgccaccaataattttcaaggaagaaaatcttaggactatgtatagccaggacaggcatgttgatgtcctcaatctctgctttgcccagtttgagccagattccacagagtatatcaaggttcatcacaagacctatgaagatatagataaacgtggaaaatatgaccttttacgttcaacaagatactttggtggaaatggtgtggtattttgtaaataataaaaagattgatggtttgctgattgaccagattcagagagatttaatcgatgatgcaaccaacttggtccagctgtatcacgtgctccatccagatggccagtcggctcaaggggccaaggatcaggctgctgagggaataaatttaatcaaggtctttgcaaaaacagaagcacagaagggagcctatatagaactaacactgcagacttatcaagaagcactcagtcgccattctgcagcttcctaaaaatattttaaaaatacatttattttactaaatactgactacatttctctgttaatattgagctaaatgttaaaaaatggccagattaaaagatatcaatttgtagttctccctacaaaaaaaaaaaaaaaaaaaaa

SEQ ID NO: 158117 - DNA, 383 bp, Homo sapiens
cttctctgcgcctgctgcatctgagccccttcccttctctggacctcctccatctgagccccttcccttctctgggccgcccccatctgaccccctagccttcgctgcacctcctccatctgagccccttactttttctgggccccctcctccatctgagccccttaccttctctgggccgcccccatctgaccccctttgcttcactgcacctcctccatctgagcctgttcctttctctgggcctgctccatctgaccgccttcccttctttggacctactacatctgagccccccaatagactgggatgcctactcaaccacaccccatatgcctctccaagaacactcctttgcctgagcccacacgtttgcatcccct

SEQ ID NO: 158118 - DNA, 2484 bp, Homo sapiens
  misc_feature (1)...(2484): n = a,t,c or g
cgccagccatcaagataaggcgccgcagagtcagagatctacaggatcccccaccccaaatggccccggagatccagcctccatcccaccacttctcccccgagcagcgggccctgctctacgaggacacactctacactgtcttgcaccgcctgggtcatcctgagcccaaccatgtgacggaggcctctgagctgctgcgatacctgcaggaggccttccacgtggagcctgaggagcaccagcagacactgcagcgggtcagggagcttgagaagccaatattttgtctgaaggcaacagtgaaacaggccaagggcattctgggcaaagatgtcagtgggttcagcgacccctactgcctgctgggcattgagcagggggtaggtgtgccagggggcagccccgggtcccggcatcggcagaaggctgtggtgaggcacaccatccccgaggaggagacccaccgcacgcaggtcatcacccagacactcaaccccgtctgggacgagaccttcatcctggagtttgaggacatcaccaatgcgagctttcatctggacatgtgggacctggacactgtggagtctgtccgacagaagcttggggagctcacggatctgcatgggcttcgcaggatctttaaagaggcccggaaggacaaaggccaggacgactttctggggaacgtggttctgaggctgcaggacctgcgctgccgagaggaccagtggtaccccctggaaccccgcactgatatcctacccagaccgaggccagggccacctccaggggcaactcgtgcataagcggagagccacttcggccagccgcttcgcagccgagctacaccgtgcacctccacctcctgcagcagcttgtgtcccacgaggtcacccagcacgaggcgggaagcacctcctgggacgggtcgctgagtccccaggctgccaccgtcctctttctgcacgccacacagaaggacctatccgacttccaccaatccatggcgcagtgggtggcctacagccgcctctaccagagcctggagttccccagcagctgcctcctgcaccccatcaccagcatcgagtaccagtggatccagggtcggctcaaggcagaacagcaggaggagctggccgcctcattcagctccctgctgacctacggcctctccctcatccggaggttccgctctgtcttccccctctctgtctcggactccccagcccggctgcagtctcttctcagggtcctggtacagatgtgcaagatgaaggcctttggagaactgtgccccaacaccgccccattgccccagctggtgactgaggccctgcagactggcaccactgaatggttccacctgaagcagcagcaccatcaacccatggtgcagggcatcccggaggcaggcaaggccttgctgggcctggtacaggatgtcattggcgacctgcaccagtgccagcgcacatgggacaagatcttccacaagtgagcttatttccagtaccctcaagatccacctcttctccatggctttccgggagctgcagtggctggtggccaagcgggtgcaggaccacacgacggttgtgggtgatgtagtgtccccagagatgggcgagagtctgttccagctctacatcagcctcaaggagctctgccagctgcgcatgagctcctcagagagggatggagtcctggccctggataatttccaccgctggttccagccggccatcccctcctggctgcagaagacgtacaacgaggccctggcgcgggtgcagcgcgctgtgcagatggatgagctggtgccccctgggtgaactgaccaagcacagcacatcagcggtggatctatccaccggctttgcccagatcagccacactgcccggcagctggattggccagacccagaggaggcattcatgattaccgtcaagtttgtggaggacacctgtcgcctggccctggtgtacttgcagccttattaaaggcccgggcccgcgagctttttttcagggccagaaggaccaaggccagggcagccaacatgctgtgtgtggtggtgaatgacatggagcagctgcggctggtgattcggcaagttgcccgcccagctggcatgggaggccctggagcagcgggtaggggccgtgctggagcaggggcagctgcagaacacgctgcatgcccagctgccngagcgcgctggccgggctgggccatgagattccgcactgggtgtccgcaccctggccgagccagttggaggtgggcatcgccaagcacatccagaaactggtgggcgtcagggagtctgtcctgcctgaggatgccattctgcccctgatgaagttcctggaggtggagctttgctacatgaacaccaacttggtgcaggagaacttcagcagcctcctgaccctgctctggacccacacactcacagtgctggtggaggcggccgc

SEQ ID NO: 158119 - DNA, 510 bp, Homo sapiens
  misc_feature (1)...(510): n = a,t,c or g
agtgcccaatcganngcatggcagatccngggcgaccacgcgtccgataaagagactataacaattgtaaatatatatgcacccaacatcagagcatgttctaagtatataaagcaaacattaacagaactgaaaggtgaggtagacagcaatgtaataacagcgatttcaatactccgttttcaacaacttccaacacttatcaagactgaatcattaagaaatagaaatnnnnnnnnnnnnnnnnnnnnnnnnnnnnnnnnnnnnnnnnnnnnnnnnnnnnnnttaaaaaaagtctcccaacaaaggaaagcataggaccagatggtttcacagatgaattctaccaaacatttaaagaagaattaaaactaagnnnnnnnnnnnnnnnnnnnnnnnnnnnnnnnnnnnnnnnnnnnnnnnnnnnnnnnnnnnnnnnnnnnnnnnnnnnnnnnnnnnnnnagaaaaggatgctacaagagaagaaaattacaggccaatatccctgan

SEQ ID NO: 158120 - DNA, 469 bp, Homo sapiens
  misc_feature (1)...(469): n = a,t,c or g
aacataccacattgacagaataaaggacaaaagccacatgatcatctcaattgccacagaaaaagcatttgacaagattgaacatcctttcatgataaaagccctctcccaactagaagtggtaggaaatgaccaatgtaataaaggccatttataaaaagtccatggctaatatcactcaacaatgaaaggctgatagctaagatcagnnnnnnnnnnnnnnnnnnnnnnnnnnnnnnnnnnnnnnnnnnnnnnnnnnnnnnnnnnnnnnnnnnnnnnnnnnnnnnnnnnnnnnnnnnnnnnnnnnnnnnnnnnnnnnnnnnnnnnnnnnnnnnnnnnnnnnnnnnnnnnnnnnnnnnnnnnnnnnnnnnnnnnnnnnnnnnnnnnnnnnnnnnnnnnnnnnnnnnnnnnnnnnnnncgcgtgggtggccgtngnctacggtcactacgacggcgtcattggcactcc

SEQ ID NO: 158121 - DNA, 409 bp, Homo sapiens
  misc_feature (1)...(409): n = a,t,c or g
ggaacacggcgaaccgggcagcgagagtgagtgccagcattgaggacagtccggacaacagcgaaacgctgccgcccgacgagagcttccgcaacggggagaacgccaagcgcttcgccatcgacataggcgggacgttaaccaagctggcctactattcaacggtacagcacaaagtggccaaggggcgggctttcgaccactccggaaaggacacagaacgtgaacacgagccgccctatgagagttcagttcaagaagagagcactgctcgacggcacttcattaaggcggagaaaacctacaccgaagcctgcctggacttcatcaaagaccatctcgtcaacacagagaccaaggtcatccaggcgaccgggggcggggcctacaaggtcaaagacctcatcgn

SEQ ID NO: 158122 - DNA, 480 bp, Homo sapiens
attgagcccgatgtaccggtccgtttgatccgcgttgacccacgcgtccgcccacgcgtccgcccaggctccactccccagttgtgaaaggaggagctctacggtgactttgaagacttggaaacaggacgtgcacaagggaaaatcgggccccgacactcagaatgaagatatagagaaacacggatgaaattgaccccgacgaaaaaaaaagtgccaagaaaaagcatttggataagaagagaaaattgaaggagatgttggatgcagaatatgatgaaggagaaagcacatattttgatgatcttaaaggagaaatgcagaaagaagcacagatgcgtctgaagaatcatcgctggtataagaaaatcctcaagtcccaagatccaatcatattttctgtagggtggaggagggttcacaccatcctgctctattatatcgaagaccacaatggaagacaaaggcttctaaagtata

SEQ ID NO: 158123 - DNA, 1557 bp, Homo sapiens
atggctgcaaacaggaaggattttattcaccgtcgatgcggccccgagttgtcccaaagcgaggcagtgccccaaggtctatgcagagcagaacgcagctccgccctcgcaatgctctccgggtctgtgccgaggagaacgcagctccgcccttgcaaaggcacacagcgccggtgccggcgtggcggagaagcggacagcggcggagaggcggtcggcggcggcgcggcggagaggcggtcggcggcggcgcggcggagaggcggtcggcggcggggcggcggagaggcggtcggcggcggcgcggcggagaggcggtcggcggcggcgcggcggaggcgaggcgggcggcggcggcgcggcggaggcgaggcgggcggcggcggcgcggcggaggcgaggcgggcggcggcggcgaggcgggcggcggcggcgaggcgggcggcggcggcgcggcgggcggcggcggcgcggcgggcggcggcggcgcggcggatagcggagagcggcggagaggcgcacagccgcggagaggcgcacagcggcggagaggcgcacagcggcggcgcaggcgcggagaggcgcaggcccaggctccactccccagctctgaaaactcatcctggtcagagttcagaaggacatgtggagtataagctgaatcacgtagaatttgaagatcaagatgatgaagccagagttcagtatgagggttttcgacctgggatgtatgtccgcgttgagattgaaaatgttccctgtgaatttgtgcagaactttgaccccctttaccccattatcctgggtggcttgggcaacagtgagggaaatgttggacatgtgcagatgcgtctgaagaaacatctctggtataagaaaatccctcaagtcccaagatccattcatatcttctgtaggtggaaggaggtttcagaccattcctactctattatattgaagaccacaatggaagacaaaggcttctaaagtataccccacagcacatgcattgtggagcagcccttttggggtaaaatatgattacaataacttgcctattgccgagattaaactttacaggctgcgttattttagctttgtgcttttcctttcataaaattccactcctaagatgtttctgttttctgggagcggggaggtggtttggagtatatatgtaaatctatatccaaatctaaatgtccgtatccagtatgttaaactagaatctaaaatttctggtttgctatatttctttttttccttttcctttaagaccctatcactccacagggaactggtttcttggcaatacagtctgtcagtggcataatggtaactatcttggacaatttcttttacagattggtttgagaaatatatcctgaatgtgggttattatgtacatgagcctttaagttgaaaattactcatttttattattataaagtaaatttccctttgcttttaatctttgtacatccttttcagtagggtgtgggattaaaggaggggcggtggaagaattataatggtacattaaaaattaaaaaaaaa

SEQ ID NO: 158124 - DNA, 904 bp, Homo sapiens
  misc_feature (1)...(904): n = a,t,c or g
gcgctgcaggaattcggcacgaggcacagcgaggcgccggcccagactccactccccagctgtgaaaggaggagctctacggtgactttgaagacttggaaacaggggacgtgcacaagggaaaatcgggccccgatactcagaatgaagatgtagagaaacaaggaagaaattgaccctgacgaagaagaaagtgccaagaaaaagcatttggataagaagagaaaattgaaggagatgtttgatgtggaatatgatgaaggagaaagcacatattttgatgatcttaaaggagaaatgcagaaacaagcacagataacagcatacaggttttccccccccaccccgtcatgtacagctgaatcatgcagaatttgaagatcaagatgatgaagccagagttcagtatgagggttttcgacctgggatgtacgtctgcgttgagattgaaaatgttccctgtgaatttgtgtagaactttgacccccgctaccccattatcctgggtggcttgggcaacagcgagggaaatgttggatacgtgcaggtgggtccctttgctgcatatttggtgcctgaggctctgtggatttcccctccatcaatcatcttaccctctcatccccctcagatgcgtctgaagaaacatcgctggtataagaaaatcctcaagtcccgagatccaatcatattttctgtagggtggaggaggtttcagaccatcccgctctgttatatcgaagaccacaatggaagacaaaggcttctaaagtataccccacagcacgtgcatcgcgganagccttttgggataaaatatgtttacaataacttgcctattgctgagattaaaccttacaggctgcgttattttaaaaaaaaaaannnnacactncaaannatc

SEQ ID NO: 158125 - DNA, 1194 bp, Homo sapiens
  misc_feature (1)...(1194): n = a,t,c or g
ctaagaatgaggcttggaacgcggagtgcattgtgggcctgtcgtgggtggggccagcagcacatgcatgcctggctcacagagcagcctttgggtgttcttttcccagaggagctctacggtgactttgaagacttggaaacaggggacgtgcacaagggaaaatcgggccccgatactcagaatgaagatatagagaaagaagttaaggaagaaattgaccctgaccgaagaagaaagtgccaagaaaaagcatttggataagaagagaaaattgaaggagatgtttgatgcagaatatgatgaaggagaaagcacatattttgatgatcttaaaggagaaatgcagaaaagaagcacagctgaattcacgtagaatttgaagatcaagatgatgaagccagagttcagtatgagggttttcgacctgggatgtacgtccgcattgagattgaaaatgttccctgtgaattttgtgcagaactttgacccccattaccccattatcctgggtggcttgggcaacagtgagggaaatgttggctacgtgcagatgcgtctgaagaaacatcgctggtataagaaaatcctcaagtcccgagatccaatcatattttctgtagggtggaggaggtttcacaccatcccactgtattatatcgaagaccacaatggaagacaaaggcttctaaagtataccccacagcacatgcattgcggagcagccttttggggccctatcactccacagggaactggtttcttggcaatacagtctgtcaagtggcataatgcctgattttcgggtagctgctacaggagttgtccttgatctggataaatccataaaaattgtgaagaaattaaagctaactggttttccatataaaattttcaagaacacttcatttattaagggaatgtttaattctgccttggaagtggccaaatttgaaggtgctgtgattcgaacagtcagtgggataaggggggcagatcaagaaagcactccgagctccagaaggagttttcagggccagctttgaggataagctgctgatgagcgatattgtcctcatgcgacttggnacctgttccatcccagcgtctatacccagtaacatcttgttgaaccattggtgagaagcacctggtcagaatgcggccccggccantcagctcccctggtcagct

SEQ ID NO: 158126 - DNA, 371 bp, Homo sapiens
  misc_feature (1)...(371): n = a,t,c or g
nnnnnnnnnnnnnnnnnnnnnnnnnnnnnnnnnnnnnnnnnnnnnnnnnnnnnnnnnnnnnnnnnnnnnnnnnnnnnnnnnnnnnnnnnnnnnnnnnnnnnnnnnnnnnnnnnnnnnnnnnnnnnnnnnnnnnnnnnnnnnnnnnnnnnnnngcagtcttaaaaaggaacaacaaagttggtagtcaaactttctgatttcaaatcttatttcaaagctatagtaattaaaacagtgaggaactgcataaatacaaaccatatagatcaatggaacagaatacagaatccagaaataaaccctcacatatatggtcaaatgattttcaagaaacgtgccaagaacaaacaatggaaaaaggacggtcttcn

SEQ ID NO: 158127 - DNA, 1482 bp, Homo sapiens
atgttgagccgggcagtgtgcgggtgagaaggaaggggacccggtcacgccccaaggggaaggggctcgcggcgggcagggctccgggcaatggcgacatggccgcacgggcctggcgggaccgccgacctgcaggcggttctcccgggagtgccccgcgcggcggcctggagccggggatccgagggaggggacgcggggactcgggggacgccgcgctgcgttcctcggcagcccagcctgcgtagacggtccgcggcgctgactgaccgggctgtgctttctcgtcttcaggcaccagcaggcagctggctccggttttggggtatctgggctccaggcagaagcacagcctccccgacctgccctacgactacggcgccctggaacctcacatcaacgcgcagatcatgcagctgcaccacagcaagcaccacgcggcctacgtgaacaacctgaacgtcaccgaggagaagtaccaggaggcgttggccaagggtaggttccaggctgagcgggaaaaaaatgtggtttgcacttttaacttttaaggagatgttacagcccagatagctcttcagcctgcactgaagttcaatggtggtggtcatatcaatcatagcattttctggacaaacctcagccctaacggtggtggagaacccaaaggttggatatattgtgcacccttatctacaacttcttgcacagtaggaatcgatgtaatttcttgggccctatgacaaaaaatattttgaatacatgtaatataacattttactgtaattattggaaatctgttcatttgtgggtggttttgggattttttttttaataggggagttgctggaagccatcaaacgtgactttggttcctttgacaagtttaaggagaagctgacggctgcatctgttggtgtccaaggctcaggttggggttggcttggtttcaataagcaacggggacacttacaaattgctgcttgtccaaatcaggatccactgcaaggaacaacaggttacatttagatagggttgagtgttgttccagtttggaaaacgagtccactattaaagaacgtggactccaaggtcaaagggcgaaaaaccgtctatcagggcgatggccactacgtgaaccatcacccaaatcaagttttttggggtcgaggtgccgtgaaagcactaaatcggaacctaaagggagcccccgatttagagcttgacggggaaagccgggcgaactgtggcgagaaaggaagggaagaaagcgaaaggagcgggcgctaggcgtggcaattgtgtagcgtcactggcgcccccttctttctaacaggccttattccactgctggggattgatgtgtgggagcacgcttactaccttcagtataaaaatgtcaggcctgattatctaaaagctatttggaatgtaatcaactgggagaatgtaactgaaagatacatggcttgcaaaaagtaa

SEQ ID NO: 158128 - DNA, 371 bp, Homo sapiens
  misc_feature (1)...(371): n = a,t,c or g
gctgaattttaggacaaacggatgttatagataagctggtcccattatctaatagcttaccaaagaaaaaaatataatgtatacagtggttgaaaaagtaggagttacaaaaaaatgtgtttgcattttaacttttcaggagatgttacagcccagatagctcttcagcctgcactgaagttcaatgggggggggcattatcaatcatagcattttttggacaaacctcagccctaacggtggtggagaacccaaaggttggtatatattggtgcacccttatctacattttgtgcacagtaggaatcgattgttgatttactggaggtaacctatacctggttttttgttttttttgtggncgggttttg

SEQ ID NO: 158129 - DNA, 1023 bp, Homo sapiens
tttcgtcggccctgctccccgcgctttcttaaggcccgcgggcggcgcaggagcggcactcgtggctgtggtggcttcggcagcggcttcagcagatcggcggcatcagcggtagcaccagcactagcagcatgttgagccgggcagtgtgcggcaccagcaggcagctggctccggttttggggtatctgggctccaggcagaagcacagcctctcccgacctgccctacgactacggcgccctggaacctcacatcaacgcgcatatcatgcatctgcaccacagcaagcaccacgcggcctacgtgaacaacctgaacgtcaccgaggagaagtaccatgaggcgttggccaaggggagatgttacagcccagatagctcttcagcctgcacttgaagttcaatggtggtggtcatatcaatcatagcattttctggacaaacctcagccctaacggtggtggagaacccaaaggggggagttgctggaagccatcaaaacgtggactttggttcctttgacaagtttaagggagaagctgacggctgcatctgttggtgtccaaggctcaggttggggttggcttggttttcaataaggaacggggacacttacaaattgctgcttgtccaaatcaggatccactgcaaggaacaacagggccttattccactgctggggattgatgtgtgggagcacgcttactaccttcagtataaaaatgtcaggcctgattatctaaaagctatttggaatgtaatcaactgggagaatgtaactgaaagatacatggcttgcaaaaagtaaaccacgatcgttatgctgagtatgttaagctctttatgactgtttttgtagtggtatagagtactgcagaatacagtaagctgctctattgtagcatttcttgatgttgcttagtcacttatttcataaacaacttaatgttctgaataatttcttactaaacattttgttattgggcaagtgattgaaaatagtaaatgctttgtgtgattg

SEQ ID NO: 158130 - DNA, 436 bp, Homo sapiens
ctctggcaggggtgccagtctcaggcccggcgtgcgccctccatcagtgtcatgggagccatattcgggcccaggctccacaccaccccctccctccagcaggagcaaagacgtgggaaaaccagcccagagctgggtccgaggcggctccacccagcctaacacgggacagctgccgaaagaggggctgagtacgccccacccagtccctagagctggaatcccttcctccagacaggcccttctaagctcagggaacccggggactcgggcacccagcgccccagcactccgccccgaggcccaggcaagtccagcggagtttccaggcgcaccattcctgagctaggtggggagaggctgggtggcgcccgtttccaggagcccccaccccagccggcagcgagcttcccgggagcagccgctacccaggcgc

SEQ ID NO: 158131 - DNA, 394 bp, Homo sapiens
cccggctcgagccggcagcgctgttggcaccaaccttgctttgcctgccaggcctgtggccaggccctgataaacctcatctacttctaccatgatggacaactctactgcggccgtcatcatgcagagttgctgcgcccgcgctgcccggcttgtgaccagctgatcttctcctggcgctgcaccgaggcggagggacagcgctggcatgagaaccacttctgttgccaggactgcgccgggcctctgggcgggggacgttatgccctgcctgggggaagcccctgctgccccagctgcttcgagaaccgctactcggatgcaggctcgagctgggccggtgcactggaaggtgacgcattccttggggagactggactcgaccaactgaagg

SEQ ID NO: 158132 - DNA, 1608 bp, Homo sapiens
atgggaggccacctggcaaatgttcccacaggaacttctcttcaacaaacagggcttatggaaaaacattttacatctggtaaacaactcttaaaaacccttcagaataacattccacaaaccacagagaggacgcacaatgggtggcaccaggcatggctgttggttttcagctgtgtcaggtctttctacgtagctgctctgtttgctgtgggcctgggttgtggcattcattggttctgcttggctgtcttttctgtctgtgcaggacattccacagccgtggtcagtctgcctggctcccagcaacacctctcagcgaacatgtttgtagccctgcactcctactcagcccatggacccgatgagctggacctgcaaaagggagaaggcgtcagggtcctggggaagtgccaggacggctggctcaggggcgtctccttggtcaccgggcgagtcggcatcttcccaaacaattacgtcatccccattttcagcacaccctcacagttatccgggtgtagggaggtggggccaactttagttaagcctgtagttcacaaaatgggtgtgtatgggtgggaagaaggcagcatttcagaaggtgatccacggcaaagccgtcccttcaaatccgtctttgtgcccactgccatagtcaaccccgtgagaagcacagccggccctgggactttaggacaagggtctcttcggaaagggcggagcagcatgagaaagaatggatccctgcagagacccctccagtccgggatccccactctcgtggtaggctccctcagacgcagccccaccatggtccttcggcctcagcagttccaattctaccagccacaggggatcccctcctccccctcagccgtggtggtggagatggggtccaagcctgccctcacgggggagcccgccctcacgtgcatcagcaggggcagtgaggcccggatccactccgcggccagctccctcattatggaagacaaagaaatccccatcaagagtgagcctctgccaaaaccgcccgcatctgccccaccatccatcctggtgaaaccagaaaactcaagaaatggcatcgaaaagcaagtcaaaaccgtgagatttcagaaatacaagccctcctcccaccaaacattacactcccatatcccacctccggaaagcctgaacagcctagcctccctcaatgcgttccagcctgaagcagcgtccttgggcccagagaggaccgtcctatttgcccaccgaagtggctgccactccggacagcagacagacctccggagaaagtcagctcttggcaaggccacaaccctggtgtccaactgcctcaaggcacgcagaccgtgtttcccagcaaatgaacctacggggtggcttttcctaggaccccaaagaggtgaattgcatttaaatacagtctgcctccactgagggcatcctgccattctttggggacttgagcatgggtccttgttcttcctatttcacctccaggaaagcaaaagtgggagcagaaattcctgccctgggtgggaggatagatggcgtggccttccaaacatacaaacataatgatttgatgccacaaag

SEQ ID NO: 158133 - DNA, 1576 bp, Homo sapiens; identical to SEQ ID NO: 158113

SEQ ID NO: 158134 - DNA, 1576 bp, Homo sapiens; identical to SEQ ID NO: 158113

SEQ ID NO: 158135 - DNA, 514 bp, Homo sapiens
  misc_feature (1)...(514): n = a,t,c or g
ctatcccaaagtgagaagaacaattactattcaagccgttttagccctgacagccagtatattgacaacaggagtgtgaacagtgacagggcttcacagggngagagagagcaccccgactgaaccacccgcctgagcagatagactctcactcaagactacctcatagcgcacacccctcgggaaaaccaccatccgctccagcctcggcacctcagaatgtatttagtacgactgtaagcagtggttataacaccaaaaaaataggcaagaggcttaatatccagcttaagaaaggtacagaaggtttgggattcagcatcacttccagagatgtaacaataggtggctcagctccaatctatgtgaaaaacattctcccccggggggcggccattcaggatggccgacttaaggcaggagacagacttatagaggtaaatggagtaggatttagtgggcaaatcccaagaggaagttgtttcgctgttgagaagcaccaagatggaaggag

SEQ ID NO: 158136 - DNA, 515 bp, Homo sapiens
  misc_feature (1)...(515): n = a,t,c or g
ggtagtccaggcggccccaatgaaaaccccagtttgacngcanacncgnccggnaatnngggnngacccacgcgtccgcgccgcaggcattctgtatgagtttacctggaaccagttctgtgactggtatctcgagctgaccgggccggtaatgaacggtggcaccgaagcaaaactgcgcggtactcgccatacgctggtgactgtactggaaggtctgctgcgcctcgcgcatccgatcattccgttcatcaccgaaaccatctggcagcgtgtgaaagtactttgcggtatcactgccgacaccatcatgctgcagccgttcccgcagtacgatgcatctcaggttgatgaagccgcactggccgacacagagtggttgaagcaggcgatcgttgcggtacgtaacatccgtgcagaaatgaacatcgcgccgggcaaaccgctggagctgcttgtggctggtttgcacgcggaatccaaacacgtcggtaaatgaaaaccgtggtttcttg

SEQ ID NO: 158137 - DNA, 505 bp, Homo sapiens
  misc_feature (1)...(505): n = a,t,c or g
ggagcctgtcaagaagatatttaactatattatacatgtgtttcgaaacatcatggatttcaaactcttccttgtgtttgtggcaggagtttttcttttcttttatgcaaggaccctgagtcaaagccctactttctattactcctcgggaactgtgctaggtgttctaatgacattagtctttgtcttgctgttggtgaaaagattcattccgaagtatagcaccttttgngctctaatggttggttgttggtttgcctcagtttatattgtatgccagttgatggaagatctgaagtggctgcggtatgataacaggatatatgtattaggctatgtcttgatagttggatttttcagcttttgttgtttgttacaagcatgggccccttgcagacgacaggagcagaagtcttctgatgtggatgctgcgactcctctccctggttctggtctatgctggtgtggccgtgcctcagtttgcctatgcagccataatcctccg

SEQ ID NO: 158138 - DNA, 417 bp, Homo sapiens
  misc_feature (1)...(417): n = a,t,c or g
ggagcctgtcaagaagatatttaactatatgatacatgtgaatcgaaacatcatggatttcaaactcttccttgtgtttgtggcaggagtttttcttttcttttatgcaaggaccctgagtcaaagccctactttctattactcctcgggaactgtgctaggtgttctaatgacattagtctttgtcttgctgttggtgaaaagattcattccgaagtatagcaccttttgggctctaatggttggttgttggtttgcctcagtttatattgtatgccagttgatggaagatctgaagtggctgtggtatgaaaacaggatatatgtattaagctatgtcttgatagttggatttttcagctcttgtggttggtacaagcatgggcccccttgcagacgacaagagcagaaatcttn

SEQ ID NO: 158139 - DNA, 426 bp, Homo sapiens
cccgaaggtttaacgccccattagaatggccgtgaagcagaagatttctatgttgtgtcacgtcaaccctgaacaggtcatatgtatccatgatgtttcttccacataccgagttcctgtgcttttagaggaacaaagcattgtgaaatattttaaggagagattgcacctgcccatcggtgattctgcaagtaatttgctttttaagtggagaaatatggctgacaggtatgaaaggttacagaaaatatgctccatagccctcggttggcaaatacaccaagctcagagactgctacgcctctgtgttcaaagccctggaacactcagccctggccatcaaccacaagttgaatctgatgtacatagactccattgatctggagaagatcactgaaaccgaggaccctgtgaaatttcatgaag

SEQ ID NO: 158140 - DNA, 266 bp, Homo sapiens
ggcacgagggggagggttgctggccatgctgtatctgcagctcgtaaccgcactggttgaggcaggtatgcgtatgtgtggcactgcccccagggaccaggcctagagactccgctttgttgcagacaccagtggagcctattttcgccgggaaggattaggtagcaactacctaggtggtcgtagccccactgaggtaagctgagtggggtgggacatgctggcaaggagacatagaataattgtcacgaaacaatcaggctttt

SEQ ID NO: 158141 - DNA, 1047 bp, Homo sapiens
tcctaatataatctggatagggaatctttcttgggtatatgtttgcaggaattttctaccctgaagtttgcctatttattctctttttttttttttttgagatggagtctcactttatcacccaggctggagtgcagtggcacggatctcggctcactgcaacctccgcctcccaggttcatgccattctcctgcctcagcctcccgagtagctgggattacaggtgcccaccaccatgcccggctaattttttgttatctttactagagacggggtttcaccatgttgggccaggctggtcttgaactcctgacctcaagtgatccacccgccttggcctcccaaagtgctgggattacaggtgtgagccaccgtgcctggtgaaacttttttttatttttatttttgagaaagagtttcactcttgttgcccctgctagagtgcagtggcctgatcttggctcacagaaacatccgcctcctgggttcaagtgattctcctgtatcagcctcccgtgtagctgggatttcaggcatgtgccaccacacccagccaatttttgtatttgtagttgagatgaggttttactatgttggccaggctggtctcgaagtcctgacctcaggtgatccgcccgtctcggccgcccaaagtactgggattacaggcttgagccaccgcgcccagccaagttctgtgaggttctgacaaggaaaatctggtcatataattacagataatcccagtaagaataggaggaagtcagtatgattttatgggacttaaaaaaaaattaactcagtatgtatgaaagtggaaggaaacaggaaatacaaacaagaatgaatataaaacagtagtagactaaaacagatgatgaactgagtctgaaaaatgcaggtgggcacagtggctcacgcctgtaatcccaggactttgggaagctgaggtgggaggattgcttgaagccaggagttatgtggaccagtttggaccacacagcaaagaccctatctctgttaaaaaaaattttttttttttaaag

SEQ ID NO: 158142 - DNA, 894 bp, Homo sapiens
tttttttttttttttttaactaaagtccatagtttattcagatttttttctttttgaaacgggatctcactctgttgcccaggctagagtcacatacttgattttcacaacggcttaaaggaaaacaagagacaagtagattccctgcccacacctctgctgaaggaagacaaagtatgctccaagtgcctcctacccagggccagaggcagatggggacaaagcagaggagcacagctctgagggcatcccagaccgcaaagaaaataaggtgcacctgccccaaagctcagccaagactcctttccactgtgactcccaaatggagggccccaggtgctgtgtaaacttctcctctcagaggagctgagttctgtctccctcccttcactgacccggcctcccaggtgctgagtgtcacagatctcaactgctcccacttgaagcaggaccctgagatgtgagactcggcccaggccacgtacctaagcccttcctgtgtcacactcctgtccttatagcacccctctggacacagcttctccatctcctcagtggcacatacaattggttggcagttataatccactcatgtccttctagaatgcctcctgtaacttagaggcttggtgagctgaaacctatttcaaagactcccattctgctaggattctacatgctaatcaggctcctatatatgcgcaccagaaggaagcaaggtggaggccagctgcttgaccttctggctgtctgtggtgacaaagtggtggaaatacaggacctttgaaagcacgggtaggctgggcacggtggctcatacctgtaatcccagcaccttgggaggccaaggcgggtggatcatgaggtcaggagtccaagaccagcctggccaac

SEQ ID NO: 158143 - DNA, 452 bp, Homo sapiens
tctccggttcctcaactcattgtccccaccgtcctatcagtggtgctcctagagccctttcttggggctccgctccccgcaaatcgactgtggacacatctgtgggctccgcgggcttggaagcagagtccgtggcaggctccggcggcttggaagactcccgtcctcgctggggattggaagctgtggagcccctggcgcgtacaccaggcctgacattcggcttcacgataaggcgtgccctgcggaacatggcggaggcagggggcccggggaggcagcctcacggccgctcacagccccgagccccggcggctgcccggaaaggggattaggaactacgccctccccacaaagccgcaccgccagctcagggggcagctaccgtagtttcactgacccgccgccgcctcctcctatctgccaccaccgccgctttttcttgaccctgc

SEQ ID NO: 158144 - DNA, 421 bp, Homo sapiens
agctctgcagatcttttgagctacaattagccacagtgttgctctgagacctgcaaagctcccagggcggacagcagcctcgggtgcaatcctggagccctccagggagggggatacctcagttaccatgtgccaaagcattatacaactatgaaggaaaagagcctggagaccttaaattcagcaaaggtgacataatcattttgcgaacacaagtggatgaaaattggtaccatggggaagtcaatggaatccatggcttttttccccaccaactttgtgcagattattaaaccgttacctcagcccccacctcagtgcaaagcactttatgactttgaagggaaagacaaggaagcagacaaagattgccttccatttgcaaaggatgatgttctgactgtgatccgaagagtggatg

SEQ ID NO: 158145 - DNA, 492 bp, Homo sapiens
attgacactgttgaacaccattacgccaagcttggcacgagggaacttctaccccctggaggggggccgggtgctgctggacggcaagcccattagcgcctacgaccacaagtacttgcaccgtgtgatctccctggtgagccaggagcccgtgctgttcgcccgctccatcacggataacatctcctacggcctgcccactgtgcctttcgagatggtggtggaggccgcacagaaggccaatgcccacggcttcatcatggaactccaggacggctacagcacagagacaggggagaagggcgcccagctgtcaggtggccagaagcagcgggtggccatggcccgggctctggtgcggaaccccccagtcctcatcctggatgaagccaccaacgctttggatgccgacagccgagatctgatccaacatgccctctcttgggaacctgagaaaacacagggattttttatcccccccggtttggcccg

SEQ ID NO: 158146 - DNA, 909 bp, Homo sapiens
cgaaggcaaagtggaggagcctgaaaacccagctgccaaggagaaatgtgagggcaaagaagaggaagaagaaaccgatggcagcgggaaggagagcaagcaggaatgtgaggcagaggccagctctgtgaaaaatgaactgaaaggtgttgaggtcggcgcaaacactgggtccaaatctatttcagagaaaggttccgaagaggatgaagaggaaaagctggaggatgacgaataagtcggaagagtcttcccagcccgaagcaggagctgtctctagagggaagaattttgatgaagaaagcaatgcttccatgagcactgctagagatgaaacccgagatggattctacatggaggacggagatccttcagtagctcagctccttcatgaaagaacatttgccttctcgttttggcctaaggatagagtaatgataaaccgcttagacaacatctgtgaagcagtggttgaaaggcaaatgggccagtaaataggcgccagatgtttgatttccaaggcctcatcccaggttacacacccaccacagtggacagccccttgcagaagaggagctttgctgagctctccatggtcggccaagccagcattagtgggagtgaggacatcactacgtctcctcagttgtcaaaggaagatgccctcaacctctctgtccctcgccagcggaggaggaggaggagaaaaatcggaaattgaggccggaaagagctgccaagaggcgaaatctcatggagatggttgcccagcttcgagagtctcaggtggtctcagaaaatggacaagaaaaagttgtagatttatcaaaggcctcaagagaggcaacaagctctacctcaaatttttcatctctttcttcaaaagtttatcttgcctaatgtctcaac

SEQ ID NO: 158147 - DNA, 381 bp, Homo sapiens
tcttttccatttttatttttttagccaatttccaaagccctaaatcacattttcccttagactgaaactctagaaaaacattattattattattatttattattttttgagacaggggtcttgcctcatttgcccaaggcttggaggtgcagtggcacaatctcagctcactgcaaccttccacctccagtgttgaggcgattcgtccgtgccttggccttccaaggggctgcgattacaggcccgtgccaccacaccaggctaatttttgtattgttagtagagacgggttttaccatgttggccaggctggtcttgaactcctgacctcaagtgatccgcccacctcgcaatcccaaagtgctgggattacaggcgtga

SEQ ID NO: 158148 - DNA, 389 bp, Homo sapiens
  misc_feature (1)...(389): n = a,t,c or g
gaaaataaagaggaaggacaacttcccagttcattttatgaagctagtattatcctgacactaaaaccagataaagacagtacaaaaaaatcctttacagaccaacatcctcatgaattttgatgcaaaaaatatttaacaaaatgtttacaaatagaattcagcaatacatagaaagaattatacactnnnnnnnnnnnnnnnnnnnnnnnnnnnnnnnnnnnnnnnnnnnnnnnnnnnnnnnnnnnnnnnnnnnnnnnnnnnnnnnnnnnnnnnnnnnnnnnnnnnnnnnnnnnnnnnnnnnnnnnnnnnnnnnnnnnnnnnnnnnnnnnnnnnnnnnnnnnnnnnnnnnnnnnnnnnnnnnnnnnnnnnnnnnnnnnnnnnnnnnn

SEQ ID NO: 158149 - DNA, 2837 bp, Homo sapiens
atggcggcggccgtagcggctccactcgccgccgggggtgaggaggcggcagccacgacctccgtgcccgggtctccaggtctgccggggagacgcagtgcagagcgggccctagaggacgccgtggccaccgggaccctgaacctgtctaaccggcgcttgaagcacttcccccggggcgcggcccgtagctacgacctgtcagacatcacccaggctgacctgtcccggaaccggtttcccgaggtgcccgaggcggcgtgccagctggtgtccctggagggcctgagcctctaccacaattgcctgagatgcctgaacccagccttggggaatctcacagccctcacctacctcaacctcagccgaaaccagctgtcgctgctgccaccctacatctgccagctgcccctgagggtcctcatcgtcagcaacaacaagctgggagccctgccccctgacatcggcaccctgggaagcctgcgacagcttgacgtgagcagcaacgagctccaatccctgccctcggaactgtgtggcctctcttccctgcgggacctcaatgtccggaggaaccagctcagtacgctgcccgaagagctgggggacctccctctggtccgcctggatttctcctgtaaccgcgtctcccgaatcccagtctccttctgccgcctgaggcacctgcaggtcattctgctggacagcaaccctctgcagagtccacctgcccaggtctgcctgaaggggaaacttcacatcttcaagtatttgtccacagaggccgggcagcgtgggtcggccctgggggacctggccccttctcggcccccgagtttcagtccctgccctgcagaggatctatttccgggacatcggtacgatggtgggctggactcaggcttccacagcgttgatagtggcagcaagaggtggtctggaaatgagtcaacagatgaattttcagagctgtcattccggatctcagagctggcccgggagccccgggggcccagagaacgcaaggaggatggctcagcggacggagaccctgtgcagattgacttcatcgacagccatgtccccggggaggatgaagagcgaggcactgtggaggagcagcgaccacccgaattaagccctggggcaggggacagggagagggcaccaaacagcaggcgggaggagccggcaggggaggagcggcggcgcccggacaccttgcagctgtggcaggagcgggaacggcggcagcagcagcagagcggggcgtggggggccccgaggaaggatagcctcttgaagccagggctcagggctgttgtgggaggggccgccgccgtgtccactcaagccatgcacaacggctcgcctaagtccagtgcctcccaagcagggggctgcagcggggcagggagcccccgcccctgcccctgcctcccaagagccccttcccatagctggaccagcgacagaacctgctccacggccacttggctccattcagagaccaaacagcttcctcttccgttcctcctctcagagtggctcaggcccttcctcaccagactctgtcctgagacctcggcggtacccccaggttccagatgagaaggacttaatgactcagctgcgccaggtccttgagtcccggctgcagcggcccctgcctgaggacctggccgaggctctggccagtggggtcatcctgtgccagctggccaaccagctacggccgcgctccgtgcccttcatccatgtgccctcccctgctgtgccaaaactcagtgccctcaaggctcggaagaatgtggagagttttctagaagcctgtcgaaaaatgggggtgcctgaggctgacctgtgctcgccctcggatctcctccagggcactgcccgggggctgcggaccgcgctggaggccgtgaagcgggtggggggcaaggccctaccgcccctctggcccccctctggtctgggcggcttcgtcgtcttctacgtggtcctcatgctgctgctctatgtcacctacactcggctcctggatccccgttccccccaggtggcctgggaggtggccccctcgaggatgactccactagcgccctgggaccccaagtatgaagccaaagcaggacctcggccggtgtgggtgagttgggggcaaacctgtgggactggctggggtgctcagggagctgtgcggtggcctgaggctccagtgctctgtcctcctcaccctagggggccaactgtagctcaggagcctcgttctcaggccggacgctgtgtcacccctcattctggccgctgtatgaagcagcctcgggcaggggtctcaggcccgtggcccctgccacagggcactggaatggacagcaggcgcccccagatgcagggttcccggtggtgtgctgtgaagatgtcttcctctcggaccctctgctgccccgggggcagcgtgttcccctgtacctgtccaaggccccccagcagatgatgggctccctgaaactgctgccgccgccccccatcatgtctgccagggtgctcccccgcccatcaccctcccggggcccctccactgcctggctcagcgggccggagctgatcgctctcactggcctgctgcagatgagccagggggagcctaggcccagctcctccgcggttggccccccagaccatacctctgacccacccagcccctgtggtagccccagcagttctcagggtgctgacctctctctcccacagaccccagacacccattgtccatagccttctcagggcagagtgggctggttgtgttgacaataaaacagtgttggtttgca

SEQ ID NO: 158150 - DNA, 719 bp, Homo sapiens
agacctccgccggtaccccaggttccagataagaaggacttaatgactcagctgcgcagggtccttgagtcccggctgcaacgggcccctgcctgaggacctggccgaggctctggccagtggggtcatcctgtgccagctggccaaccagctacggccgcggctccgtgcccttcatccatgtgccctcccctgctgtgccaaaactcagtgccctcaaggctcggaagaatgtggagagttttctagaagcctgtcgaaaaatgggggtgcctgaggagtcactgtgccagccccaccacatcctggaagaggagggggccccgggaaggggccctccggctaatcatcgctgctgtcgtccaacgccctgctggaccggccttaggggtgaaggtgggggcacagggccccccccgcccgggaccccgggagcagaagacgcgcctgggctccgcgctttcagaaaagcacgtggtgagggtggcctgggcctgggcacgccttggcctgccgcgcctggctgcctctggggtcgagggtctgggtggaaggacctgcgggtgtcgcaggtgtcgtgtcagccgcaataaacagaagccagaagccctctggaaaagggggtgtaagatcaaaaaaaaactctaaattggggggggcccttttaaaaagttcctggggggggccccctatttcccgcgggcggggaatataatttt

SEQ ID NO: 158151 - DNA, 450 bp, Homo sapiens
  misc_feature (1)...(450): n = a,t,c or g
aatcgagatccctagtccagcgtggtggaattcccctgggggggtggcgcatgggagttaggaggactggccaggtggggcccactatgcacccacccccagtgtcaggtgcttctcctctcctcctccaccacctcctcctcctcctcctcatcatcatcctcacttgttgaggacgtcctgtgtgccaagtggtttatatgcccagcnnnnnnnnnnnnnnnnnnnnnnnnnnnnnnnnnnnnnnnnnnnnnnnnnnnnnnnnnnnnnnnnnnnnnnnnnnnnnnnnnagctcaacaagttgcctaagttccaagtttcctctcccaactctcctaccctctcctcttccttctcctttctcccattcttccctgcctcttccctaactagacaattttttattgagtgtctcccaggtgcaggcatgagccaggtgctgggaaaatn

SEQ ID NO: 158152 - DNA, 459 bp, Homo sapiens
cagcagatcgtccgtggcatgaaccaggtgctggatgtgccgctgactgtgaagatccgcacaggcgtccaggagcgtgtgaacctggcgcaccgcctgctgcccgagctgcgggactggggcgtggcactcgtcacggaaatggggacatcttgtcatttgaggatgccaaccgcgccatgcagactggtgtcaccgggatcatgattgcccgtggcgccctgctcaagccgtggctcttcacggagatcaaggagcagcggcactgggacatctcgtcgtccgagcgcctggacatcctgcgggacttcaccaactacggcctggagcactggggctcggacacgcagggcgtggagaagacccggcgctttctgctcgagtggctgtccttcctgtgccggtacgtgcccgtggggctgctggagcggctcccacagaggatcaacgagcggccgc

SEQ ID NO: 158153 - DNA, 837 bp, Homo sapiens
ctggacatccgtggcaaactttacctggcccccctcaccacgtgtgggaacctgcccttccgacggatctgcaagcgcttcggggcggatgtgacatgtggagagatggccgtctgcaccaacctgctgcagggccagatgtccgagtgggccctactcaaacgccaccagtgtgaggacatctttggcgtccagctgtggagtgggggtgatgccctgatccacctctgggggctgatggccgtggcggggaccgtgcctcgcagacagacttggctccttccggggaggccccgagagaggaggccactggctcagggctcctcagtggggaggcaacggccaagtgggtacagttcggactctcccctcaccctcctgttctgccactacccacctacagctggaggcgccttccccgacaccatgaccaagtgtgccgagctgctgagccgcaccgtggaggtggactttgtggacatcaacgtcggctgccccatcgacctcgtgtacaagaagggtgggggctgtgccctcatgaatcgctccaccaagttccagcagatcgtccgtggcatgaaccagcccacacacggcatcctcagctgggagcggcaggcgtcctttggtttcctctctgtcacctcccaccccccaagcggttttgcagccgtccaggtggctgtggcccgggtcttcctgggttgtccctgctccctgcacagccctgccccgtgcctgtgtcctaggtggcgaaaagacagtttccaggaggtcatcgacgccgagtatgtgttactggaggtgaacgggcagttctcatactcctattcctga

SEQ ID NO: 158154 - DNA, 528 bp, Homo sapiens
gcggccgccctactacctgggccgcgactacctggagacgctgatggccagccagaaggcagccgactggatccgcatcaggtgcctgggtgggctggagttggggagctgcagtcgggggcccggggtcacggagggtactttgcaggtcctgggcctgacctcgctttccacctgctctcccacagcgagatgctccttgggccagtgccccccagcttcgccttcttgccgaagcacaaggccaacgcgtacaagtagcctcaggctttcccaggggcaccctggggcgaggagagtacaataaattttattcttttaaaatccaggcctttctgtgaccctgaagcagcccctcctcagcccccaccttccccaaacctcttagctgccttcatggggccctgccccaagctgggtgctgctggtgcccagagaggccttgacccccaagaaggtagcgggttgaggacccggggggcctcagcctgtgtgggtgtggatcagggcagcctgcctggaggaggc

SEQ ID NO: 158155 - DNA, 1112 bp, Homo sapiens
atgagccaccaagcccggcccatcatcacagaaagttctgtgggacaaggttattcgggagatgtcagctccatctgcaaagtcctagaggagtttggggtgacattaagaacactgcccgctacagggactgccccaccccccacccagctgaagtcatcagagttagcaaataaaaatccaagacatccagttaagtttggatttcagatagatcatgaatcacggcttggcgtgctggatgtgccgctgactgtgaagatccgcacaggcgtccaggagcgtgtgaacctggcgcaccgcctgctgcccgagctgcgggactggggcgtggcactcgtcacgctccacggccgctctcgggagcagcgctacaccaagctagccgactggcagtacatcgaggagtgcgtgcaggccgccagccccatgcccctgttcggaaatggggacatcttgtcatttgaggatgccaaccgcgccatgcagactggtgtcaccgggatcatgattgcccgatgggaggagcagagagcgatgtcaggagttgcagctgcgttgcggcagaggggactggaaattgctgctgctgtgggatctgatgattgtgggttgaaagtcctgggctttggccagtggcgccctgctcaagcccggggctcttcacggaggatcaaggagcagcggcactgggacatctcgtcgtccgagcgcctggacatcctgcgagacttcaaacaactacgggcttgaagcactggggctcggaacacgcaggggcgtgaaaaagacccggccgctttctgctcgagtggctgtccttcctgtgccggtacgtgcccgtggggctgctggagcggctcccacaagaggatcaacgagcggccgccctactacctgggccgcgactacctggagacgctgatggccagccagaaggcagccgactggatccgcatcagcgagatgctccttgggccagtgccccccagcttcgccttcttgccgaagcacaaggccaacgcgtacaagtagcctcaggctttcccaggggcaccctggggcgaggagagtacaataaattttattcttttaaaaaaaacctcgtgccg

SEQ ID NO: 158156 - DNA, 1056 bp, Homo sapiens
  misc_feature (1)...(1056): n = a,t,c or g
gcccagcaggtccccgcagggccgggcactagcacccctcccagcagccccgtgcggacctgcgggcccctgacggatgaggacgtggtcaggctgcggccctgtgagaagaagcggctggacatccgtggcaaactttacctggcccccctcaccacgggtgtgatttttgttcttccgacggatctgcaagcgcttcggggcggatgtgacatgtggagagatggccgtctgcaccaacctgctgcagggccagatgtccgagtgggccctactcaaacgccaccagtgtgaggacatctttggcgtccagctggagggcgccttcccccgacaccatgaccaagtgtgcccgagctgctgagccgcaccgtggaggtggactttgtggacatcaaacgtcggctgccccatcgacctcgtgtacaagaagggtggtgggctgtgccctcatgaatcgctccaccaagttccagcagatcgtccgtggcatgaaccaggtgctggatgtgccgctgactgtgaaagatccgcacaggcgtccagggagcgtgtgaacctgggcgcaccgcttgcttgcccgagctgcggggactggggcgtggcactcgttcacgctccacgggccgctttcggggagcagcgctaacaccaagctagctgactggcagtacatcgaggagtgcgtgcaggccccgcagccccatgccccctgttcggaaatggggacatcttgtcatttgaggattgccaaccgcgcccatgcagaattggtgttcaacggggatcatgattgcccgtggcgccctgctcaaaccnggggctcttcacggagatcaaggagcagcggcactgggacatctcgtcgtccgagcgcctggacatcctgcgggacttcaccaactacggcctggagcactggggctacggacacgcagggcgtgagagaagacccggcgctttctggctcgagtggctgctccttcctggtgccggatacgtgccccgtggggctagactggagcggctcccacagaggatcaacgagcggacgca

SEQ ID NO: 158157 - DNA, 368 bp, Homo sapiens
ttcttttgggtcaggctgtgaaatacggagttgaatcctggtccttatggtggaaccacccaggaagctatatgagaaaaagcttttgaggctgagggagcaaggaccagaatcaagatgttctactcctgtgcccacaatttcttcttcagcagaaaatgcaaggcagaatggaagtaatgattctggcagatacagtgtcaatgaagaagactctaaaatagagctcaagcttgagaagagagatccgctaaagggcagagcaaagactccagtaacacgcaagcaaagaagagttgagctcagtgagagttattctcaagctggaatggatgagggtgtatggtccagtggatcttctaaaggcg

SEQ ID NO: 158158 - DNA, 1761 bp, Homo sapiens
gcattgatggatgagattctcatgctccaggatgaaatcaatgagctccagtcctctctcgcagaggagctggtatccgagtcttgtgaggccgaccctgcggagcagctggccttgcagtccacgctcactgtcttagccgagcgaatgtccaccatcaggatgaaagcctcggggaaacggcagcttttggaggagaagttgaatgatcagctggaggaacaaaggcaggaacaggccctgcagaggtatcgctgtgaagccgatgagctggacagctggctcttgagtaccaaggccactctggacactgcgctgagtccacccaaggagcccatggacatggaggcccagcttatggactgccagaatatgctggtggaaatagagcagaaggtggtggctttatcagaactgtcagtccacaatgagaacctgctgctggagggcaaagctcacaccaaggacgaggccgagcagctggctggaaagctgagaaggctcaaggggagcctgctggagctgcagagagccctgcatgataagcagctcaacatgcagcagggaacagcacaggagaaggaggagagcgatgttgacctaacagccacgcagagccccggcgtccaggaatggctggcccaagctcgcaccacatggacccagcagcggcagagcagtctccagcaacaaaaagagttagaacaggaattagccgagcagaagagtctccttcgctcagtagccagtcgtggagaggagattctaattcaacattcggcggcagagacctctggtgatgctggcgaaaaacctgatgtgttatcccaggagttggggatggaagaagaagaaatcatccgctgaagaccagatgagaatgaaatgggaaagcctacatcaagaatttagtaccaagcagaaactactacagaatgttctggaacaggaacaagagcaagtgctttatagcaggccaaatcgactcttgtctggtgtgccactgtacaaaggggacgtgccaacccaagataaatctgcagttacatctttgctggatggactgaaccaagccttcgaggaggtttcatcccagagtggaggggcaaagaggcagagtatacacttggagcagaagttgtatgatggagtctcagccacctctacttggttggatgacgttgaagaacgtttatttgttgccacagcacttttaccagaagaaacagagacttgtctcttcaaccaagagattcttgccaaagacattaaggaaatgtctgaagaaatggataagaacaaaaacttgttttcccaagcttttccagagaatggtgataatcgagatgttattgaagatactttgggttgtcttttgggcaggttatccttgctagactcagtagtgaatcaacgatgtcatcagatgaaagaaagacttcagcaaatactaaatttccaggtaagtaagatattatcaaaggatacgtgaccattctctaggtattcagtaatagtcagtcacgagtctgtgttacagacctggttgttgtttttctaaatggggtaatgaagaacaagagcattgtagaaaatgaagggggttgaattaaaggattagaagctaaagattttttgctcctagaaatggaaggttgagaaaaccacccacttcaaaataaggactgaatagaattcaatcaataaaagtccccattcccggatcattataattataatttttagttactaataccggag

SEQ ID NO: 158159 - DNA, 1258 bp, Homo sapiens
atagacacccctggacgcctgcggaattcgccacgagcacatgtggccaggagagaggaattttaaaatatttatatactctaaattagtttgttgcaaaataccattctaattaatgcttttatgtcattctcatgaaactaatctgaaagagtaaacttagttttctatttttagatattgtttcaacataccaaataccaaaataaaattaaataattttaaagaacataacacaacttatacatccaaatgcctattgttttcttaaaagtagtcacccccgtcagtgactttttagcataaggttaggagacagattcttatcttttcagcatgcatttgatttttacaaattttcaaaggctgcttgataccttaatcaggccaatatattagctaattaaattaagtcatactgttaaaacatgatatttatagaattaaaagttaaaaaatagtctaagggtttatcttaagttttatcttaaaaaaattagaaaaatgttttgagctatgttattgttggaaggtgtggttattccacggtaaatgttacgatataccactcatttgcatgtgtaaggttcagagtacacttataatttatgtgcacagattttcattataaagtcattctcttcaattgacatatttttacttgctatttttgtacttattatgccactggcagattcaccttattaagtgaaactctttattgctctgttttcagtagaaaaatcacttttcaaaattaatacttcatctgtgtataagcatattcttttggtttctaagatttgctgtcatatttttaaagttgagttttaaagaattaaaataatttttgttgttgttattttctcatggtttaccattgaatatacctgtataataaaggtgcaggatgggaggcaggatagtggaataattaattccatagactagaatcagattgcctggattagtatttcagctttattgcctactagcaatatgactttgacaagctatttaacctctcattcagtttcctcatctgtaaagtggcagttacagtaatacttaaccttatagtggtttggggattttttttttttttttgagacacggtctcactctgtcacccaggctgggttgcagtgagctgagattgtgccactgcactccagcctgggtgacagagtaagactgtctccaaaaacaaaaaacaaaaaaacagccgctgaaagactgaaaaagaaaaaaaaaaaaa

SEQ ID NO: 158160 - DNA, 445 bp, Homo sapiens
  misc_feature (1)...(445): n = a,t,c or g
ntttgatgtcatncgaacnacnngcnnnaatagtcgacccacgcgtccggtgaccattccaagcctatcatttgctccaaggttttatttttttgccaactctctgccctccaaagggccgaccaccttgatgcctgtgaacacagcggccctgacagtgcctgccaacccagcatctgtcatcacagtgccctccaagttgccaactagctcaaagccccctggtgcagtgccttctaatgcgctcaccaatccagcaccatccaaattgcccatcaactcaacccgtgctggcatggtgccatccaaagtgcctactagcatggtgctcaccaaggggtgtgccagcacagtccccactgacgggagcagcataaatgaggagaccccaatggctcctacacccgccggtgccgttggaagcagcttagcctggctagacact

SEQ ID NO: 158161 - DNA, 416 bp, Homo sapiens
cgacccacgcgtccgagttcattggcctggcagggtcaggtgctgctacggtcatttttgtatcagcttatgaacttaatggcttgttttctgtgctgatgttggcctggagcttcctacccatctacattgctggtcaggtagacatgtatgcgggtgccatcttcatccagcagtctttgcacctggatctgtacctggccatagttgggctactggccatcactgctgtatacacggttgctggtggcctggctgctgtgatctacacggatgccctgcagacgctgatcatgcttataggagcgctcaccttgatgggctacagtttcgccgcggttggtgggatggaaggactgaaggagaagtacttcttggccctggctagcaaccggagtgagaacagcagctgcggg

SEQ ID NO: 158162 - DNA, 2118 bp, Homo sapiens
atgaacaaccatgtcaagctaatttttaaaattttatcatccttgaacaccacgctgccttcaactagtgcctggtcatccattcgtgcctccaactacaacgttcccctcagcagtacagcacaaagcacttcaggttccagctggggtgagagcagctcagggagaataacaaattggcttgttctaaaaaaccttacacctcagatcgatggctcaactctgcgcactctgtgcatgcagcacggcccgctgatcacattccacctgaacctccctcacggaaatgctctggtccgctacagttcaaaagaagaggtagtgaaggcacaaaagtctctgcacatgtgtgtactggggaacactactattcttgctgagtttgccagtgaagaggagatcagtcgtttctttgcacaaagccagtctctgaccccttctcccggctggcagtctctcgggagctcgggggcgaaacctgtgtatggatttcagtgtatgacttcagatcatgctccaacttgccaggtggatgaaccggggaatgacgacaaggtcaaattggggcccttgacccagaggatcaaattcaggttgaatggcatgaagaagcagcaggttgaagtgtttgaaaacacagactctgaaatcagactggattcgagtcccagctttgtcacttgtcagccatgtgactttggacacgacttaaactctcagagccatcactccccctgtaaagatccagaggtctcgttcaggaccatggagagcggcaccagcagccctcagcctccacagttagatcccctggatgcgtttccccagaagggcttggagcctggggacatcgcggtgctagttctgtacttcctctttgtcctggctgttggactatggtccacagtgaagaccaaaagagacacagtgaaaggctacttcctggctggaggggacatggtgtggtggccagtgggtgcatccttgtttgccagcaatgttggaagtggacatttcattggcctggcagggtcaggtgctgctacgggcatttctgtatcagcttatgaacttaatgcgcacgctctaaagcttccacgtgtgaggcatgccaagaaatttggattccaaatccccattgtcgccttcaaagatacttttgtgcaagaagttacaccctttgtaggagctatatcaacgtgcaagttagtccatgggactgtaccttgtcagagacagttgcccgaaggcatcaatgtgctcaaggacagtgtgaaatatgcagtttttgttaatgacctaactgcattagcagtgacacaaaccgggcttggtggacacgtttcaaggacaggtactcatgcccactggacacagcacattcagccgatcccgcgtctacaagaacgcatacaggatcctgaggagcagcctaggcgtattgacggacatcggtgcaaggtcacttgtcgtatgatcccggtattggcgctgcggacgggcagttcggggggaacgagctctctgccctgcaaggagcagtgcccaacagaaaaaacgagaacacaaacattaatcgttcttcgggaccctcctgtgtccgctatcaaatcgcctcgtggtgtgcgcactcctgtccccgggcgacagaacgcagaccccccaagagccaaacagaaacaaaggaaagcaaccatgggcctcatgtgtttgccctacctcctacctgcggagtgccgagctgtgacagcccattttacccgaccgtttctccgcttctctcggccgccgctcttcagtcacctcacctccgcaggccccggccgggaagtgaatccccactcggcaaccccttccgggagcaccacgcccactggcccccaagatggaggccctagcaactggacccgcagattgggcagtctgtccgttccccagtttggtgccgtcttgtggcacaacgggcgcacaagtcgaaatcatattgggccaacgcaacaagtggacagaactcgtacagacacccccgtatgtcagattgcacctagtggtcatagtcatcgccagaaaagaaatgagctcatagacccgctctgtgacatgagaaaggctatctga

SEQ ID NO: 158163 - DNA, 664 bp, Homo sapiens
tctctctttgccagtaatgttggaagtggacatttcattggcctggcagggtcaggtgctgctacgggcatttctgtatcagcttatgaacttaatggcttgttttctgtgctgatgttggcctgggtcttcctacccatctacattgctggtcaggtcaccacgatgccagaatacctacggaagcgcttcggtggcatcagaatccccatcatcctggctgtactctacctatttatctacatcttcaccaagatctcggtagacatgtatgcaggtgccatcttcatccagcagtctttgcacctggatctgtacctggccatagttgggctactggccatcactgctgtatacacggttgctggtggcctggctgctgtgatctacacggatgccctgcagacgctgatcatgcttataggagcgctcaccttgatgtgctacagtttcgccgcggttggtgggatggaaggactgaaggagaagtacttcttggccctggctagcaaccggagtgagaacagcagctgcgggctgccccgggaagatgcctttcatatttttcgaaaatccgctgacatctgatcttccgtggccgggggtcctatttggaatgtccatcccatccctctggtactggtgcacggatcagggtggctga

SEQ ID NO: 158164 - DNA, 577 bp, Homo sapiens
caccgccagccacaccagccccaggttttccaggggggcccgggcctccaaggtcaccgacgggcctgccacgacagccacaaggtagccttcagcagccagccgcgccccctgctcctttgaaaagcagtggtaggccccggcatggcggggctgggcagccatcacaaccagggcctggagccgggcatcgtagaggaaggacccgggctgttccgcaggcaggtcccggcccccaaaggtccagcgggcatgggccaagttggaggagaggtggcagggcagcaccaggtctgtgcccgccaccaccgtgatgtttttgggagtgggcctgactttcttactgccacggaggttgcagatgcctgaagtgtccgaggtcatcacatgctggatcagtagagatccagagtggccacccacggccacacagcggctggtgttgacgctccaggcgcaataggggtcccgggcgaggacacagtctgcacaggagcgacacttcatgcagtcggccacgggcagctgcaccagctgagagcgggagccggcaaagagcagcttcttgctctgagcc

SEQ ID NO: 158165 - DNA, 660 bp, Homo sapiens
gacggctggctgctcaaggctgtgagcctggggcctggggttcacctgattgaggagctgcagctgtttgaccaggagcccatgagaaagcctggtgctatctcagagcaagaagctgctctttgccggctcccgctctcagctggtgcagctgcccgtggccgactgcataaagtatcgctcctgtgcagactgtgtcctcgcccgggacccctattgcgcctggagcgtcaacaccagccgctgtgtggccgtgggtggccactttggatctttactgatccagcatgtgatgacctcggacacttcaggcatttgcaacctccgtggcagtaagaaagtcaggcccactcccaaaaacatcacggtggtggcgggcacagacctggtgctgccctgccacctctcctccacttggccccggggttcagtggtattttatacttgccttcttcctgtacagggctgggaaaggctgtgtgaggggaaaaaagggaaagggtgggcctgctgtggacaatggcatactctcttccagccctaggaggagggctcctaacagtgtaacttattgtgtccccgcgtatttatttgttgtaaatatttgagtatttttatattgacaaataaaatggagaaaatgaaaaaaaaaaaaaaaaa

SEQ ID NO: 158166 - DNA, 631 bp, Homo sapiens
ttttttttttttttttcttagccccatcagagcaatcgtttcattttctccattttatttgtcaatataaaaatactcaaatatttacaacaaataaatacgcggggacacaataagttacactgttaggagccctcctcctagggctggaagagagtatgccattgtccacagcaggcccaccctctcccttctctcccctcacacagcctttcccagccctgtacagggaagaaggcaagtataaaataccactgaaccccggggccaagatgtgagggccccacccaacccttccccccaaacacacagcaggctccattttccttccccccaccctgaaaacattcacaggccttggagcaggactaggcccaccccaagccctgcactccctctgaaggggcacagcaccctgtccaccccacctccatatgtacatcgctgcccgacattcgggggcagtggggggtaggagagacaaagtgatacgacccgttcccgttcatagctccaatgactcatcaggaggacacatgccatgggaagatttgacggagaaaggaaggctatgcacgtacgagcaggtgacatgtacgcaactataagcacacagaaacccatgtgcaat

SEQ ID NO: 158167 - DNA, 455 bp, Homo sapiens
aggtgacacagggcacagggagagaagcctaggactgctacgggagaagcacacttggggccctccccacccacaggcaacaccacaggctgctgtgcccagctcaaggtacacccagcctggtcctcagtgggtgggtcactgtccagggacagcctccaagcagaggggagcacccacgccctgcagcaggtctcagtcagcttctacatctgggtgtccctgacataggactgggacagtctggtctggactgtgaggtcacacccaaaccctcctattccttcccagggacaagtggggcagggccccctggcacgatgggctcctcactgccagggaatggaaattgggacgaggaagcacacacattgccccagggacaagaaggcatgaatgaaggtggggtcccgtggagactgatatttaggtaaaaatcgagctcagccggggtt

SEQ ID NO: 158168 - DNA, 496 bp, Homo sapiens
gtcttcatgccatgtcattttacatgatactttgtaggttttgatgagaaagttggtatttttaatgcactcaaaaattggttttagttagagagtttgcttatcaatataactttcagatcagttaattaagataaaaggcatacactgtccatagatcagaggattaaataacttagcattgtttttctgtttgtaaacagaaaatcttattacattcttacacagagtgtgacacatttaatatttgctagaaaatgcatcttagaaattaaattattaagagttagtggtgaggaattttaaatttaatgttctatgatatagcacaacacagatttatttatttatttatgaaatggaatcttgctctgtcacccaggctggagtgcagtggcgtgatcttggctcactgcaacctccgcctcttgggtgcaagcaatgctcctgcctcagcctccctagtagctggggattgcaggtgcctgccactaca

SEQ ID NO: 158169 - DNA, 372 bp, Homo sapiens
atggagaaagaggaaccgggagtggaaaggaagaaggaaaaccgagtaaaggaggttattcataagaacaggaaaggggccgaggggcctccagctggagccgcactgccgctcgggggccggggcgaaggtccctgccggagcctcccggaggagcggctgccccgcgggcgggggaacggtgcggccaactcgcgggggcgagcccggagccggcggagaccggaacccgggaacccaggccccgcggcgctagcgctgccagaaaactcgctgcggccgcgccggtcggcctacttcgccccggctgtccgcgcgcgggacgtagaagagcgccctggccgggaaagagattatctgagccgagagtga

SEQ ID NO: 158170 - DNA, 366 bp, Homo sapiens
cagatgcagagactccaggctcagggccgctgagaaaggccaggcccagtgggtacactgaccacacccacgcagggacctcacccccctgcaggccccttgcagaccgggttcacttgggttcacttggccctatccaggcccatgcacttggagaccagcctggttccctgcccgaccacccccagctgggtccatcaccccacctggtttttgcacgcacacactggtcagtttggacccgggccgtgactgcccctccccccccaccggagactgtgattccctgtgtcctccacatccagacgccagcccaggaataaaggcattttgtgcacagggaaaaaaaaaaaaaaaaaaaaaaaa

SEQ ID NO: 158171 - DNA, 462 bp, Homo sapiens
catccgggcccggaactacaagctgcgcaaggtcatggtggatggggacatcccgccccgggtcgaagaaggacgctcacgagctcatcctggactttatccgctcacggcctccactgaagcaggtctctgagaggcggctgcgccgtttgccaccaaagcaaaggtccctgcatgagaagatcctggaggagatcaagcaggagcggaggctgcgcccggtgcggggcgagggctgggctgcccgcgggtttggctctctgccctgcatcctcaacgcctgctccggagatgccaagtccacctcctgcatcaacctgtcagtcacagatgctgggggcagcgcccagcgcccgcggccccgcgtgctgctcaaggcgcctaccttggctgaaatggaagagatgaatacatctgagataagagcccagggtccccggaatgtcacagcccacaaccaag

SEQ ID NO: 158172 - DNA, 1002 bp, Homo sapiens
gacgggacccggcgtgcccatgtgtcaggtgggcgaggactacggggagccggcgcctgaggagccgcccccggcgccgcggcccagccgtgagcagaagtgtgtgaagtgcaaggaagcgcagcccgttgtggtgatacgagccggagatgccttctgcagggactgtttcaaggccttctacgtccacaagttcagagccatgctgggcaagaaccggctcatcttttcaggcgagaaggtgctcttggcgtggtctggggggccttcgtccagctccatggtctggcaggatcttgagggcctgagccaagattttgccaaaagactgcgctttgtggcaggagtcatcttttttgacgagggagcagcctgtggccagagcctagaggagagatcaaagaccctggccgaagtgaagcccattctgcaagcaactgggttcccatggcatgtggtggccttagaggaggagctagtgggatccgagggggcctacaaggcggccgtggacagcttcctccagcagcagcatgtgctggggggccgggggtggtcctggcccgactcaaggggaggaacagccaccccagcccccgctggacccccagaacctggcaagaccgcctgcccctgcccagactgaggctctttcccaactgttctgctcagtgaggacactgactgccaaggaggagcttctgcagaccctgcggacccacctgatcctccacgtggcccgagcccacggctactccaaggtcatgactggggacagctgcacacgcttggctatcaagctcatgaccaacctggcgctgggtcgaggggccttcctggcctgggatacgggcttctcggatgagcggcacggggacgtggtggtggtgcggcccatgcgggaccacaccctgaaggaggtcgctttctacaaccgcctgttctccgttccttctgtcttcacaccagccgtcgacaccaaggcccctgaaaaggccagca

SEQ ID NO: 158173 - DNA, 397 bp, Homo sapiens
agcccctgatacccccgactcctcaaagtttcagcgttcaaagactacaagggcccactggacccccaaaggggcaagatcgaggataaagttaacaagtccaaggtcatcctgaaagaacccggcctcgaggatttgggcacctactcagacatagtcactgatgccgatgaagacatctccgcaagccacacgctaaccgaggaagagctggagaaactgaagaagctgagtcatgagatcagaaacccagggatcaaactgatctccggctggaacattgacatcctggagcgaggggaggcgcggctttggctggaattagaaaagttatgtccagccgctgagctacatctaatcgttcacaacaaggaaatctttaggttgccgaaccgca

SEQ ID NO: 158174 - DNA, 849 bp, Homo sapiens
cagaaaaaggagctgggtcatgtcaatggactggtggacaaatctggcaaacggactacatcccccagcagtgacactgacttgttggacagatcggccagcaaaactgaactaaaggccattgcccatgcccggatcctggaaaggagagccagcaggcctggcacacccacatccagcgccagcacagagactcccacctttgagcagaatgatgtcgacgaagacatcattgacgtggatgaggaaccagtagcagcggagccagactatgtgcagccccagctgaggcggccctttgagctgctgattgctgccgccatggagcggaaccccacccaatttcagttgcccaatgaactgacttgtacccctgcactaccaggttctagcaagaggagaagaaaggaggaaaccacagggaaaaatgttaagaagacacagcagtgaattagatcacaatggtctcgttcccttacccgtcaaagtctgcttcacgtgtaacaggagatgccgcgtggctcctctcatccagcgtgactattgccctctcctgtttcacatggattgcctcgagccgccactcactgccatgcccctgggcagatggatgtgttcgaatcacatcgaacatgtggtgctgaaccacaataatatgacactgagctatcggtgccaggtgtttgatcgttttcaagacaccgtttcgcagcatgtcgtcaaagtggacttcctgaaccgaatccacaagaagcacccccctaaccggcgtgtgctccagtcggtcaaaagaagaagcttgaaggttcctgatgctataaaatctcagaaccaagtttccaccccctc

SEQ ID NO: 158175 - DNA, 444 bp, Homo sapiens
  misc_feature (1)...(444): n = a,t,c or g
atgaaaaaaaaaaaagaagaagaagaagaggaagaagaggaagaagaggaggaggaggaggaaaaggaggaggaagaggaggaggaagaagaggaggaggaagaagaagaagaggaaaagaagaagaaaaagaaacataatatttttaaaattctatctaatctttatattttcattatcattttttattgtagtaaaaaacnnnnnnnnnnnnnnnnnnnnnnnnnnnnnnnnnnnnnnnnnnnnnnnnnnncatattgttactattgtgaaaaagatcttcagaactttttcatgtgcagatctgaaactatccattaaannnnnnnnnnnnnnnnnnnnnnnnnnnnnnnnnnnnnnnnnnnnnnnnnnnnnnnnnnnnnnnnnnnnnnnnnnnnnnnnnnnnatacnnnnnnnnnnnnnnnaaataaaaaacagtgtttc

SEQ ID NO: 158176 - DNA, 774 bp, Homo sapiens
taaaaaggactaggctgggcatgatggctcatgccgcaatctcagcactctgggaggccaaggtggacgggtcacaaggtcaggagttcgagaccagcctgacctcaagtgatctccctgtcttggccctcccaaagtgctgagaccacaggcacgagccaccacgcccggcctggatgtttttttttaaaaatgagcataaatcgtaagtatctacctcataagtgagttagtacaagaaaagcacccaagcctggccgacagagcgagaccgtgtctcagaaaacaaacaaaccaaaaaacaaaaacaaaaaaaccctaaggaggaaagtggcattctatttccagcattttttcccctcatccccattatgggagctacagcttaagaatcaatttcagctctaatcccttagccttacaatcaccagtatctgcctttgacgtcctctgagaccctgctctccttcgtgcagggagtgccatgccctcgtgggtgacagcgtgctgacagagtggactgtgaatattcttcaagtacttgtggtcctgggtcatcaggggttgcattctacccagttacagagggtttcccatcgaggaagccagcagcatcagagaagttggaaggggggctttcctccgtgtgtaagggccggccttgctaacccgaaacatttcctagaaatgtgctgcttgctaacagccgctgcttcactttcagctttcagagtccactgctgaatacctcttaatggagaaggaactggatga

SEQ ID NO: 158177 - DNA, 1476 bp, Homo sapiens
ctgactgtgatccgaagagtggatgaaaactgggctgaaggaatgctggcagacaaaataggaatatttccaatttcatatgttgagtttaactcggctgctaagcagctgatagaatgggataagcctcctgtgccaggagttgatgctggagaatgttcctcggcagcagcccagagcagcactgccccaaagcactccgacaccaagaagaacaccagaaagcggcactccttcacttccctcactatggccaacaagtcctcccaggcatcccagaaccgccactccatggagatcagcccccctgtcctcatcagctccagcaaccccactgctgctgcacggatcagcgagctgtctgggctctcctgcagtgccccttctcaggttcatataagtaccaccgggttaattgtgaccccgcccccaagcagcccagtgacaactggcccctcgtttactttcccatcagatgatccctaccaagctgcccttggaactttgaatcctcctcttccaccaccccctctcctggctgccactgtccttgcctccacaccaccaggcgccaccgccgctgctgctgctgctggaatgggaccgaggcccatggcaggatccactgaccagattgcacatttacggccgcagactcgccccagtgtgtatgttgctatatatccatacactcctcggaaagaggatgaactagagctgagaaaaggggagatgtttttagtgtttgagcgctgccaggatggctggttcaaagggacatccatggcataccagcaagaatagggggtttccctggcaatttatgtggcaccagtcacaagggcggtgacaaatgcttcccaagctaaagtccctatgtctacagctggccagacaagtcggggagtgaccatggtcagtccttccacggcaggaggggcctgcccagaaagctccagggaaatggcgtggctgggagtccccagtgttgtccccgcagctgtggtatcagcagctcacatccagacaagtcctcaggctaaggtcttgttgcacatgacggggcaaatgacagtcaaccaggcccgcaatgctgtgaggaccagttgcagcgcacaaccagggaacgcccccacggcagcagtgacacccatccaggtacagaatgccgccggcctcagccctgcatctgtgggcctgtcccatcactcgctggcctccccacaacctgcgcctctgatgccagggctcagccacgcacactgctgccatcagtatcagtcgagccagtgcccctctgggcctgtgcagcagctgctccactgacttccccaagcatcaccagtgcttctctggaggctgagcccagtggccggatagtgaccgttctccctggactccccacatctcctgacagtgcttcatcagcttgtgggaacagttcagcaaccaaaccagacaaggatagcaaaaaaa

SEQ ID NO: 158178 - DNA, 7154 bp, Homo sapiens; identical to SEQ ID NO: 148414

SEQ ID NO: 158179 - DNA, 6589 bp, Homo sapiens
atgacactccacgccacccggggggctgcactcctctcttgggtgaacagtctacacgtggctgaccctgtggaggctgtgctgcagctccaggactgcagcatcttcatcaagatcattgacagaatccatggcactgaagagggacagcaaatcttgaagcagccggtgtcagagagactggactttgtgtgcagttttctgcagaaaaatcgaaaacatccctcttccccagaatgcctggtatctgcacagaaggtgctagagggatcagagctggaactggcgaagatgaccatgctgctcttataccactctaccatgagctccaaaagtcccagggactgggaacagtttgaatataaaattcaggctgagttggctgtcattcttaaatttgtgctggaccatgaggacgggctaaaccttaatgaggacctagagaacttcctacagaaagctcctgtgccttctacctgttctagcacattccctgaagagctctccccacctagccaccaggccaagagggagattcgcttcctagagctacagaaggttgcctcctcttccagtgggaacaactttctctcaggttctccagcttctcccatgggtgatatcctgcagaccccacagttccagatgagacggctgaagaagcagcttgctgatgagagaagtaatagggatgagctggagctggagctagctgagaaccgcaagctcctcaccgagaaggatgcacagatagccatgatgcagcagcgcattgaccgcctagccctgctgaatgagaagcaggcggccagcccactggagcccaaggagcttgaggagctgcgtgacaagaatgagagccttaccatgcggctgcatgaaaccctgaagcagtgccaggacctgaagacagagaagagccagatggatcgcaaaatcaaccagctttcggaggagaatggagacctttcctttaagctgcgggagtttgccagtcatctgcagcagctacaggatgccctcaatgagctgacggaggagcacagcaaggccactcaggagtggctagagaagcaggcccagctggagaaggagctcagcgcagccctgcaggacaagaaatgccttgaagagaagaacgaaatccttcagggaaaactttcacagctggaagaacacttgtcccagctgcaggataacccaccccaggagaagggcgaggtgctgggtgatgtcttgcagctggaaaccttgaagcaagaggcagccactcttgctgcaaacaacacacagctccaagccagggtagagatgctggagactgagcgaggccagcaggaagccaagctgcttgctgagcggggccacttcgaagaagaaaagcagcagctgtctagcctgatcactgacctgcagagctccatctccaacctcagccaggccaaggaagagctggagcaggcctcccaggctcatggggcccggttgactgcccaggtggcctctctgacctctgagctcaccacactcaatgccaccatccagcaacaggatcaagaactggctggcctgaagcagcaggccaaagagaagcaggcccagctagcacagaccctccaacagcaagaacaggcctcccagggcctccgccaccaggtggagcagctaagcagtagcctgaagcagaaggagcagcagttgaaggaggtagcggagaagcaggaggcaactaggcaggaccatgcccagcaactggccactgctgcagaggagcgagaggcctccttaagggagcgggatgcggctctcaagcagctggaggcactggagaaggagaaggctgccaagctggagattctgcagcagcaacttcaggtggctaatgaagcccgggacagtgcccagacctcagtgacacaggcccagcgggagaaggcagagctgagccggaaggtggaggaactccaggcctgtgttgagacagcccgccaggaacagcatgaggcccaggcccaggttgcagagctagagttgcagctgcggtctgagcagcaaaaagcaactgagaaagaaagggtggcccaggagaaggaccagctccaggagcagctccaggccctcaaagagtccttgaaggtcaccaagggcagccttgaagaggagaagcgcagggctgcagatgccctggaagagcagcagcgttgtatctctgagctgaaggcagagacccgaagcctggtggagcagcataagcgggaacgaaaggagctggaagaagagagggctgggcgcaaggggctggaggctcgattacagcagcttggggaggcccatcaggctgagactgaagtcctgcggcgggagctggcagaggccatggctgcccagcacacagctgagagtgagtgtgagcagctcgtcaaagaagtagctgcctggcgtgagcggtatgaggatagccagcaagaggaggcacagtatggcgccatgttccaggaacagctgatgactttgaaggaggaatgtgagaaggcccgccaggagctgcaggaggcaaaggagaaggtggcaggcatagaatcccacagcgagctccagataagccggcagcagaacgaactagctgagctccatgccaacctggccagagcactccagcaggtccaagagaaggaagtcagggcccagaagcttgcagatgacctctccactctgcaggaaaagatggctgccaccagcaaagaggtggcccgcttggagaccttggtgcgcaaggcaggtgagcagcaggaaacagcctcccgggagttagtcaaggagcctgcgagggcaggagacagacagcccgagtggctggaagagcaacagggacgccagttctgcagcacacaggcagcgctgcaggctatggagcgggaggcagagcagatgggcaatgagctggaacggctgcgggccgcgctgatggagagccaggggcagcagcaggaggagcgtgggcagcaggaaagggaggtggcgcggctgacccaggagcggggccgtgcccaggctgaccttgccctggagaaggcggccagagcagagcttgagatgcggctgcagaacgccctcaacgagcagcgtgtggagttcgctaccctgcaagaggcactggctcatgccctgacggaaaaggaaggcaaggaccaggagttggccaagcttcgtggtctggaggcagcccagataaaagagctggaggaacttcggcaaaccgtgaagcaactgaaggaacagctggctaagaaagaaaaggagcacgcatctggctcaggagcccaatctgaggctgctggcaggacagagccaacaggccccaagctggaggcactgcgggcagaggtgagcaagctggaacagcaatgccagaagcagcaggagcaggctgacagcctggaacgcagcctcgaggctgagcgggcctcccgggctgagcgggacagtgctctggagactctgcagggccagttagaggagaaggcccaggagctagggcacagtcagagtgccttagcctcggcccaacgggagttggctgccttccgcaccaaggtacaagaccacagcaaggctgaagatgagtggaaggcccaggtggcccggggccggcaagaggctgagaggaaaaatagcctcatcagcagcttggaggaggaggtgtccatcctgaatcgccaggtcctggagaaggagggggagagcaaggagttgaagcggctggtgatggccgagtcagagaagagccagaagctggaggagaggctgcgcctgctgcaggcagagacagccagcaacagtgccagagctgcagaacgcagctctgctctgcgggaggaggtgcagagcctccgggaggaggctgagaaacagcgggtggcttcagagaacctgcggcaggagctgacctcacaggctgagcgtgcggaggagctgggccaagaattgaaggcgtggcaggagaagttcttccagaaagagcaggccctctccaccctgcagctcgagcacaccagcacacaggccctggtgagtgagctgctgccagctaagcacctctgccagcagctgcaggccgagcaggccgctgccgagaaacgccaccgtgaggagctggagcagagcaagcaggccgctgggggactgcgggcagagctgctgcgggcccagcgggagcttggggagctgattcctctgcggcagaaggtggcagagcaggagcgaacagctcagcagctgcgggcagagaaggccagctatgcagagcagctgagcatgctgaagaaggcgcatggcctgctggcagaggagaaccgggggctgggtgagcgggccaaccttggccggcagtttctggaagtggagttggaccaggcccgggagaagtatgtccaagagttggcagccgtacgtgctgatgctgagacccgtctggctgaggtgcagcgagaagcacagagcactgcccgggagctggaggtgatgactgccaagtatgagggtgccaaggtcaaggtcctggaggagaggcagcggttccaggaagagaggcagaaactcactgcccaggtggagcagctagaggtatttcagagagagcaaactaagcaggtggaagaactgagtaagaaactggctgactctgaccaagccagcaaggtgcagcagcagaagctgaaggctgtccaggctcagggaggcgagagccagcaggaggcccagcgcctccaggcccagctgaatgaactgcaagcccagttgagccagaaggagcaggcagctgagcactataagctgcagatggagaaagccaaaacacattatgatgccaagaagcagcagaaccaagagctgcaggagcagctgcggagcctggagcagctgcagaaggaaaacaaagagctgcgagctgaagctgaacggctgggccatgagctacagcaggctgggctgaagaccaaggaggctgaacagacctgccgccaccttactgcccaggtgcgcagcctggaggcacaggttgcccatgcagaccagcagcttcgagacctgggcaaattccaggtggcaactgatgctttaaagagccgtgagccccaggctaagccccagctggacttgagtattgacagcctggatctgagctgcgaggaggggaccccactcagtatcaccaggtcaggaggcagccttcctccctatgtctgtttatggagtgcctgctgtttatcaggctgtatcctagtgagataaataagatgtgatctaaatttattcttagagaagaataaagaaaaacgggtattataccagatatctatttagggcacagttggaataaaaagcaagtggtcaagaaaggcttcgtggaagctatcgctcctgctgagtcctgaaagcatccataggtgtgtgtgccaggttgacgagaagagcagtgtgaacagaggctgtgaaagagcctgactaagctgagatgtgaggccaggaaggcccattggagaccggctattaagacttgatcctaaaggcattgaggaaaccttggtggctgtaattgaaaggtttaggagaaaaaaaaaggaaccttggaagaatttgaaactgaagagtacatggttaatttgcatcttaaaaagattattctaatagctagtatagaagttaagactggaaaaatgtttttattaaacacttacatttacttattttgtgctagacataaagcactcatgacaattatacctgatttatcccccaacactcgcagtggaacccgccgttctccgcgcattgccaccaccacagccagcgccgccactgctgccgccattggtgccacccctcgagccaagggcaaggcaaagcactaaagggccagtaccagtgagtggccccacctgtgtccccgatgctgccgtcacctggtcctccgcctactgtccctctcagtgccttctctcagctcccaggccaacagtagccaaacccctagagacagtgatgcctgcccgcaccctggcctggtccctggtccttcactggcgccttctcggagctggcccagggggcctggagcatggacagtgtgggcgctctccctaccttgcctccttttttcttaaagcaaagtcacttctccatcacaaccagatttgaggctggttttgatggctgggtccttgggcctggccagtcttcctcttagcctctggatctagaagggaccataagaggagtaggccctggttcctgctgtcctggtggctgggcccagcaggggccctcactcttgaagtccaggactgggtctgacctggtgggagcacctgccagaggatgctctttcccaggacggatgggccctgtgtctcaggagtggggttgggggacagccttcagcagcagctcacaccctaccttccccagacttgcactggggtgggatttggagtgatgggaaggtttttaagggccggggatggatcttttctaaatgttattacttgtaaataaagtctatttttctcccgtgaaaaaaaaaaaaaaa

SEQ ID NO: 158180 - DNA, 7251 bp, Homo sapiens
gcccacgaagaggtacgattccggagaatcgcgaggcagagcgggagcgcgcagccaggtggaaactaattctaagccagactgctggagatcaccctgttctagtgtgtggaggcttccaccaggagtctggagtgcaatggcacgatctcggctcactgcaacctccacctcccaggttcaagcgattctcctgcctcagcctcccaagtagctgggattacaggcgcattggagtgactgtctggcatcaccaagatgacactccacgccacccggggggctgcactcctctcttgggtgaacagtctacacgtggctgaccctgtggaggctgtgctgcagctccaggactgcagcatcttcatcaagatcattgacagaatccatggcactgaagagggacagcaaatcttgaagcagccggtgtcagagagactggactttgtgtgcagttttctgcagaaaaatcgaaaacatccctcttccccagaatgcctggtatctgcacagaaggtgctagagggatcagagctggaactggcgaagatgaccatgctgctcttataccactctaccatgagctccaaaagtcccagggactgggaacagtttgaatataaaattcaggctgagttggctgtcattcttaaatttgtgctggaccatgaggacgggctaaaccttaatgaggacctagagaacttcctacagaaagctcctgtgccttctacctgttctagcacattccctgaagagctctccccacctagccaccaggccaagagggagattcgcttcctagagctacagaaggttgcctcctcttccagtgggaacaactttctctcaggttctccagcttctcccatgggtgatatcctgcagaccccacagttccagatgagacggctgaagaagcagcttgctgatgagagaagtaatagggatgagctggagctggagctagctgagaaccgcaagctcctcaccgagaaggatgcacagatagccatgatgcagcagcgcattgaccgcctagccctgctgaatgagaagcaggcggccagcccactggagcccaaggagcttgaggagctgcgtgacaagaatgagagccttaccatgcggctgcatgaaaccctgaagcagtgccaggacctgaagacagagaagagccagatggatcgcaaaatcaaccagctttcggaggagaatggagacctttcctttaagctgcgggagtttgccagtcatctgcagcagctacaggatgccctcaatgagctgacggaggagcacagcaaggccactcaggagtggctagagaagcaggcccagctggagaaggagctcagcgcagccctgcaggacaagaaatgccttgaagagaagaacgaaatccttcagggaaaactttcacagctggaagaacacttgtcccagctgcaggataacccaccccaggagaagggcgaggtgctgggtgatgtcttgcagctggaaaccttgaagcaagaggcagccactcttgctgcaaacaacacacagctccaagccagggtagagatgctggagactgagcgaggccagcaggaagccaagctgcttgctgagcggggccacttcgaagaagaaaagcagcagctgtctagcctgatcactgacctgcagagctccatctccaacctcagccaggccaaggaagagctggagcaggcctcccaggctcatggggcccggttgactgcccaggtggcctctctgacctctgagctcaccacactcaatgccaccatccagcaacaggatcaagaactggctggcctgaagcagcaggccaaagagaagcaggcccagctagcacagaccctccaacagcaagaacaggcctcccagggcctccgccaccaggtggagcagctaagcagtagcctgaagcagaaggagcagcagttgaaggaggtagcggagaagcaggaggcaactaggcaggaccatgcccagcaactggccactgctgcagaggagcgagaggcctccttaagggagcgggatgcggctctcaagcagctggaggcactggagaaggagaaggctgccaagctggagattctgcagcagcaacttcaggtggctaatgaagcccgggacagtgcccagacctcagtgacacaggcccagcgggagaaggcagagctgagccggaaggtggaggaactccaggcctgtgttgagacagcccgccaggaacagcatgaggcccaggcccaggttgcagagctagagttgcagctgcggtctgagcagcaaaaagcaactgagaaagaaagggtggcccaggagaaggaccagctccaggagcagctccaggccctcaaagagtccttgaaggtcaccaagggcagccttgaagaggagaagcgcagggctgcagatgccctggaagagcagcagcgttgtatctctgagctgaaggcagagacccgaagcctggtggagcagcataagcgggaacgaaaggagctggaagaagagagggctgggcgcaaggggctggaggctcgattactgcagcttggggaggcccatcaggctgagactgaagtcctgcggcgggagctggcagaggccatggctgcccagcacacagctgagagtgagtgtgagcagctcgtcaaagaagtagctgcctggcgtgacgggtatgaggatagccagcaagaggaggcacagtatggcgccatgttccaggaacagctgatgactttgaaggaggaatgtgagaaggcccgccaggagctgcaggaggcaaaggagaaggtggcaggcatagaatcccacagcgagctccagataagccggcagcagaacaaactagctgagctccatgccaacctggccagagcactccagcaggtccaagagaaggaagtcagggcccagaagcttgcagatgacctctccactctgcaggaaaagatggctgccaccagcaaagaggtggcccgcttggagaccttggtgcgcaaggcaggtgagcagcaggaaacagcctcccgggagttagtcaaggagcctgcgagggcaggagacagacagcccgagtggctggaagagcaacagggacgccagttctgcagcacacaggcagcgctgcaggctatggagcgggaggcagagcagatgggcaatgagctggaacggctgcgggccgcgctgatggagagccaggggcagcagcaggaggagcgtgggcagcaggaaagggaggtggcgcggctgacccaggagcggggccgtgcccaggctgaccttgccctggagaaggcggccagagcagagcttgagatgcggctgcagaacgccctcaacgagcagcgtgtggagttcgctaccctgcaagaggcactggctcatgccctgacggaaaaggaaggcaaggaccaggagttggccaagcttcgtggtctggaggcagcccagataaaagagctggaggaacttcggcaaaccgtgaagcaactgaaggaacagctggctaagaaagaaaaggagcacgcatctggctcaggagcccaatctgaggctgctggcaggacagagccaacaggccccaagctggaagcactgcgggcagaggtgagcaagctggaacagcaatgccagaagcagcaggagcaggctgacagcctggaacgcagcctcgaggctgagcgggcctcccgggctgagcgggacagtgctctggagactctgcagggccagttagaggagaaggcccaggagctagggcacagtcagagtgccttagcctcggcccaacgggagttggctgccttccgcaccaaggtacaagaccacagcaaggctgaagatgagtggaaggcccaggtggcccggggccggcaagaggctgagaggaaaaatagcctcatcagcagcttggaggaggaggtgtccatcctgaatcgccaggtcctggagaaggagggggagagcaaggagttgaagcggctggtgatggccgagtcagagaagagccagaagctggaggagagctgcgcctgctgcaggcagagacagccagcaacagtgccagagctgcagaacgcagctctgctctgcgggaggaggtgcagagcctccgggagggaggctgagaaacagcgggtggcttcagagaacctgcggcaggagctgacctcacaggctgagcgtgcggaggagctgggccaagaattgaaggcgtggcaggagaagttcttccagaaagagcaggccctctccaccctgcagctcgagcacaccagcacacaggccctggtgagtgagctgctgccagctaagcacctctgccagcagctgcaggccgagcaggccgctgccgagaaacgccaccgtgaggagctggagcagagcaagcaggccgctgggggactgcgggcagagctgctgcgggcccagcgggagcttggggagctgattcctctgcggcagaaggtggcagagcaggagcgaacagctcagcagctgcgggcagagaaggccagctatgcagagcagctgagcatgctgaagaaggcgcatggcctgctggcagaggagaaccgggggctgggtgagcgggccaaccttggccggcagtttctggaagtggagttggaccaggcccgggaaaagtatgtccaagagttggcagccgtacgtgctgatgctgagacccgtctggctgaggtgcagcgagaagcacagagcactgcccgggagctggaggtgatgactgccaagtatgagggtgccaaggtcaaggtcctggaggagaggcagcggttccaggaagagaggcagaaactcactgcccaggtggaagaactgagtaagaaactggctgactctgaccaagccagcaaggtgcagcagcagaagctgaaggctgtccaggctcagggaggcgagagccagcaggaggcccagcgcttccaggcccagctgaatgaactgcaagcccagttgagccagaaggagcaggcagctgagcactataagctgcagatggagaaagccaaaacacattatgatgccaagaagcagcagaaccaagagctgcaggagcagctgcggagcctggagcagctgcagaaggaaaacaaagagctgcgagctgaagctgaacggctgggccatgagctacagcaggctgggctgaagaccaaggaggctgaacagacctgccgccaccttactgcccaggtgcgcagcctggaggcacaggttgcccatgcagaccagcagcttcgagacctgggcaaattccaggtggcaactgatgctttaaagagccgtgagccccaggctaagccccagctggacttgagtattgacagcctggatctgagctgcgaggaggggaccccactcagtatcaccagcaagctgcctcgtacccagccagacggcaccagcgtccctggagaaccagcctcacctatctcccagcgcctgccccccaaggtagaatccctggagagtctctacttcactcccatccctgctcggagtcaggccccccctggagagcagcctggactccctgggagacgtcttccttggactcgggtcgtaagacccgctccgctcgtcggcgcaccacgcagatcattaacattcaccatgaccaagaaagctagatgtgggaagagccagacaggcgccaaacttatcgttctacagcaacgcggtctgctcctgcttcccaggctagcctgcgagccaccctcctctacttagtctctaactcgcctgggtttctcccgattatggcaactcagccctgctcagcttgcctggctaccgccccaccactcgcagttctgctcgtcgttcccaggccggggtgtccagtggggcccctccaggaaggaacagcttctacatgggcacttgccaggatgagcctgagcagctggatgactggaaccgcattgcagagctgcagcagcgcaatcgagtgtgccccccacatctgaagacctgctatcccctggagtccaggccttccctgagcctgggcaccatcacagatgaggagatgaaaactggagacccccaagagaccctgcgccgagccagcatgcagccaatccagatagccgagggcactggcatcaccacccggcagcagcgcaaacgggtctccctagagccccaccagggccctggaactcctgagtctaagaaggccaccagctgtttcccacgccccatgactccccgagaccgacatgaagggcgcaaacagagcactactgaggcccagaagaaagcagctccagcttctactaaacaggctgaccggcgccagtcgatggccttcagcatcctcaacacacccaagaagctagggaacagccttctgcggcggggagcctcaaagaaggccctgtccaaggcttcccccaacactcgcagtggaacccgccgttctccgcgcattgccaccaccacagccagtgccgccactgctgccgccattggtgccacccctcgagccaagggcaaggcaaagcactaaagggccagtaccagtgagtggccccacctgtgtccccgatgctgccgtcacctggtcctccgcctactgtccctctcagtgccttctctcagctcccaggccaacagtagccaaacccctagagacagtgatgcctgcccgcaccctggcctggcccctggtccttcactggcgccttctcggagctggcccagggggcctggagcatggacagtgtgggcgctctccctaccttgcctccttttttcttaaagcaaagtcacttctccatcacaaccagatttgaggctggttttgatggctgggtccttgggcctggccagtcttcctcttagcctctggatctagaagggaccataagaggagtaggccctggttcctgctgtcctggtggctgggcccagcaggggccctcactcttgaagtccaggactgggtctgacctggtgggagcacctgccagaggatgctctttcccaggacggatgggccctgtgtctcaggagtggggttgggggacagccttcagcagcagctcacaccctaccttccccagacttgcactggggtgggatttggagtgatgggaaggtttttaagggccggggatggatcttttctaaatgttattacttgtaaataaagtctatttttctcccgtgaaaaaaaaaaaaaaa

SEQ ID NO: 158181 - DNA, 1487 bp, Homo sapiens
  misc_feature (1)...(1487): n = a,t,c or g
ttttttttttttttttagaagttaagactggaaaaatgtttttattaaacacttacatttacttattttgtgctagacataaagtcactcatgacaattatacctgatttgtcccccaacaaccctctgaggtaaggtttattctgtctccctttaaacagaatgnaatctggggcatagaggggcagtcacttgcccaaggttccccagtggtagaagctggggtttgaacccctgggcaccctggcctgagttcttggcttgtcaccactcatcttcctctgtcagtgcccatgatgagtctagggtgagaggagatgaagcagaccaggggaaaggacatgaagcatgggagtgggggtgtgggttagttgctgttcaggaagcttgggtgattggggctcgccaaggcagggacgacattgggatttatgccccacgttcatggccttgggggcctgagtggggggcgttccctattcactgaaatgggagatgcaggaggaagaacagagaagtgggcttagattgggacgtgtttgctgtgaagcagccttgttcatctggtggggatgggacatctggggctgggcattgctcactatgaggagctattaggagaagccaggggagtggactgaaaggaaggcccaggtcaagtgctttccttggtacctctgaaaaatcagagagatgggctgcttgacctcatctgcttgtagtaaggatgggaaatggtcactttcaaaaagggctggacaaaatgccttctagcgtgaaggactgtacctcagcaggtttcctttccatagcaagctgcctcgtaccacagccagacggcaccagcgtccctggagaaccagcctcacctatctcccagcgcctgccccccaaggtagaatccctggagagtctctacttcactcccatccctgctcggagtcaggcccccctggagagcagcctggactccctgggagacgtcttcctggactcgggtcgtaagacccgctccgctcgtcggcgcaccacgcagatcatcaacatcaccatgaccaaggtcaggctgctgggacaggggctgcagggcagcaattcccacttcctctcaagggcatctttgcaatagggcactcagtcaggagcagggagggatgagcagccagtccatgttacagtgggaaagctgagaggtcttaaaaagggcagtgacttggttaagggcacttctgaagaaaaaggcagggctaggattagatccctgcctcctgactaaggctagcattctctccatgcgtagcactgagcctgtgcagggtgaagggagagaacgtggcgaagctgcagcccatcctgtgcctcccagcatgccccatgcagctgagaggcattgttgctgcccagtggactgcctgacaggctgcaggcccttgcctttgtttccacatcttgaaggggaggttgggagggaattcccggcactgact

SEQ ID NO: 158182 - DNA, 530 bp, Homo sapiens
tgggtgacagagcaagactccatctcaaaataaataaaaaataaaacactgggtacaattttgctaatagtggcttattcacagatataaataaagtattagcataaatcgtagccttaaaaaagccttttatatgtccttttatatagaattttacatggtcttcaaaaaatagtatgtaattgagaaaaagattagaagggaatatgtagaaatagaaagaattatgttagagtgataggattatgtaattttttcttagtattttctcagttcatcaaactttctattataccctgattatactgattatattacctcctacgctgactcaaaatctttttttttttcccctcaggtggcgacatgtctaagaatgtgagccagtcacagatggcaaaattgaaccaacaaatggccaaaatgatggatcctagggttcttccatcacatgggtggtatggcaggacttcagtcaatgatgaggcagtttcaacagggtgctgctggcaacatgaaaggcatgatgg

SEQ ID NO: 158183 - DNA, 1954 bp, Homo sapiens
atggttctagcagaccttggaagaaaaataacatcagcattacgctcgttgagcaatgccaccattatcaatgaagaggtattgaatgctatgctaaaagaagtctgtaccgctttgttggaagcagatgttaatattaaactagtgaagcaactaagagaaaatgttaagtctgctattgatcttgaagagatggcatctggtcttaacaaaagaaaaatgattcagcatgctgtatttaaagaacttgtgaagcttgtagaccctggagttaaggcatggacacccactaaaggaaaacaaaatgtgattatgtttgttggattgcaagggagtggtaaaacaacaacatgttcaaagctagcatattattaccagaggaaaggttggaagacctgtttaatatgtgcagacacattcagagcaggggcttttgaccaactaaaacagaatgctaccaaagcaagaattccattttatggaagctatacagaaatggatcctgtcatcattgcttctgaaggagtagagaaatttaaaaatgaaaattttgaaattattattgttgatacaagtggccgccacaaacaagaagactctttgtttgaagaaatgcttcaagttgctaatgctatacaacctgataacattgtttatgtgatggatgcctccattgggcaggcttgtgaagcccaggctaaggcttttaaagataaagtagatgtagcctcagtaatagtgacaaaacttgatggccatgcaaaaggaggtggtgcactcagtgcagtcgctgccacaaaaagtccgattattttcattggtacaggggaacatatagatgactttgaacctttcaaaacacagccttttattagcaaacttcttggtatgggcgacattgaaggactgatagataaagtcaacgagttgaagttggatgacaatgaagcacttatagagaagttgaaacatggtcagtttacgttgcgagacatgtatgagcaatttcaaaatatcatgaaaatgggccccttcagtcagatcttggggatgatccctggttttgggacagattttatgagcaaaggaaatgaacaggagtcaatggcaaggctaaagaaattaatgacaataatggatagtatgaatgatcaagaactagacagtacggatggtgccaaagtttttagtaacaactcaggaagaatccaacgattagcaagaccatcgtgtgtatcaacgagtgatgttcaagaacttttgacacaatataccaagtttgcacagatggtaaaatagatgggaggtatcaaaggacttttccaaaggtggcgacatgtctaagaatggagccaggtcacagattgcaaaaattgaaccaacaaatggccaaaatgatggatcctaggggttcttcatcacatgggtggtatggcaagacttcagtcaatgatgaggcagtctcaaacagggtgctgctggcaacatgaaaggcatgatgggattcaataatatgtaaagaaaatgtccttaatataaactgactcagttgaatacctaatttgctgagacctcagcgtttcccttctttttgcgaattggggggaaagtgtatttttcttgcttatcatgcactctttccttttcatctcgcccgcttttcccctcctttctttttcccttccttctttcctcccctttaaataaaagggagaaatacatggtttttgggggaaatcattatatggtttgctttagattttgttctgttttcaccatcataacacttaagttaaatcatgatgtaaaattttagtacttaaaggtttttaattatctcgaaggccaagcattgcatttgtaaacagtcctggtcagtagttaaataatgtttcaattaaagtgctgtaaaataaacttcaaagtggttataagttaaaaaaaaaaaaaaagg

SEQ ID NO: 158184 - DNA, 449 bp, Homo sapiens
acttctatcctccatcaggggacctgtttctgaggaagtagttcggtctgttcaatcgtctgccctatcccccacagcacccaaaaccccattattccaggatccctggggccccgccccaccaggccctcaaaatccctccactgtttctgtctcccctttactgctggggtccctcctccaagtctcccggggctcccaagcgctgcccctccagcatctccactccgcccccttccgcaaccccgccccgcacactcactggttcctggccgggacagcgctgtcagaaagatggtgaagcccaaagctaccaggtgcgccaagatcccactgcctctccgcagccagcgggtcagtctcggctccccagctggagcgggaaccagacctacctccaggggctgcatggccgtggcccgcgggcccgtacactccagctgcccggg

SEQ ID NO: 158185 - DNA, 358 bp, Homo sapiens
atctactcatccattcatccactcatccacccacctatccacccattcacccacctggccaccatttcttccttcctttattttttcctttctttttttccttctctccttccttccacccatccacccacccactcattcacctgtctacctatccacccatccatccatccgtctacccacctgtccctctatccctgtccgtctattcttccatccatctacccactcctgagtacttcctcttccagcctgtggcccatggagatcacatggtagaatatcctctatgccaggggagcagagtccaatacctcgtctttggaagtcaccctcctccaagcccccatttccttgg

SEQ ID NO: 158186 - DNA, 1671 bp, Homo sapiens
atgctggtccacactcaacctccagaagttcatcaatacaaccattcaagtgctgctaccaggtcccggttccagcgacttcagctccagttaatttggggctggagtcaagtgctgcccatgagtgcattctaccagatcatcattcaggcatcagggttgcggctccatgcatgtgtgacacctggtgctgggacccactctttgccattcctgcccagtgtaggtaatttaccaagcaacaagggaaacagccgtgtttactgtttctttgcagctgatctgtttgatattttgctccccatgctgaacatttatcaagaatttgtgcgtaatcaccagtacagcctgcaagttctcgccaattgtaagcaaaacagagattttgacaaactcttaaaacagtatgaagccaatccagcctgtgaggggaggatgctggagacattcttgacctatcccatgtttcagatccccagatatatcatcacactccatgagctccttgctcacacaccccatgagcatgtggaaaggaaaagcctggagtttgccaaatcaaagctagaggaactatccagaatgatcgtggagggctgtgacatcttgctggacaccagccaaacgttcatccgccaagggaccatgaaaaacagcaacacaatcatagtaaagcacgagtggggcaggcagttacattctgactggacgctcctcctcagcggcccggacattctctgcagctccaaggaggaccggtcggcctggcccacggccgtggcagtgccaagtgctgacgatacccaggccaaggcccaggagaaacttgcgttgctcaaagccctttcacataagactggggaccatgtccgaacagtcctagagtctgcaccagcggaccgagcaggagtggaaagctcccctgcagcggacaccacagaactttcaccttgcagatccccctcaactcctcggcacctccgctatcgacagcctggaggacagacggcggacaatgcccactgctctgtttcaccggcttctgcttttgcaatagccacagctgcagcaggacatgggagtccaccagaagaggaagatgatatctgccttcctacttcacaggctcgttgtaatgaatacgtaggtcttcgtaaatccataatgctagtacagaaaaaagacaaaaagaacatcacttgcaggtcattaacacccagtgaggaaggacttgggaccattgttaaagtactggtctttagtgaaataatgtttaacctggattttaaaatagtggtggagcctcctgacgctgccgccttcactgttgtcttgttagcaccctcacgccaggagaaagctgcctggatgagtgacatcagtcagtgtgtggacaatatacgatgtaatggtttaatgactatagtgtttgaagagaattccaaagtcactgtgccacatatgattaaagcaaaagttaatggctgtaccatgtcccaccttgataactccctgactcttcccttcactgacactgagcagggcaggtcctcaagctggactgccgggcacgtgaaagccccatgtcccctgcacgcacagctccctctgcttgcctcactcttcctccaggaacttcaagcctttgctcgaatgtcaccgtatccttga

SEQ ID NO: 158187 - DNA, 2250 bp, Homo sapiens
atgaccatactgccaaaagcaatctacaaattcaatgcaattcccatcaaaataccaccatcattcttcacagaattagacaaaataattctaaaactcatatggaaccaaaaaggagcccacatagccaaagcaagactaagcaaaaagaacaaatctggagacatcacactacctgatttcaaactatactataaggccacagtcaccaaaacagcgtggtactggtacaaaaataggcatgtagaccaatggaacagaatagagaacccagaaataaatccaaatacttacagccaactaatcttcaacaaaagaaacaaaaacgtaagatgcagagaagggacagctgtacagcggatgttgtcatcaaaggtgtctgaagcagggtatatctgcaaccaggccctacctaccatgactggagtaaggcgcttggctctagagacagcctctctgggggacagtccactagcccatgctaaggccactgatttcgaactcaacaatgaactaaagatgaatgtcctaagacgtgctagaagaagtttagcgagacccagaccttcttccccaagaaaggaaagccgccgcgaatatcctcaggcagtctattttagctcagtccatgtttttgcaagtccttccctgatgcagcaacaccagatgttggtttgtgatgtgttagcaactggcctggccctttcacaagatgaccaagatgacatccacctaaaattagaggatataattcaaatgaagcattccctacgagtgagtgccaaccccccacagcagcagggctcggctgctctagctgtcttagaagttgacattattcctaaggcaggttgtgtgtatgtctgtcccctcagttcctgtttaatttggggctggagtcaagtgctgcccatgagtgcattctaccagatcatcattcaggcatcagggttgcggctccatgcatgtgtgacacctggtgctgggacccactctttgccattcctgcccagtgtaggtaatttaccaagcaacaagggaaacagccgtgtttactgtttctttgcagctgatctgtttgatattttgctccccatgctgaacatttatcaagaatttgtgcgtaatcaccagtacagcctgcaagttctcgccaattgtaagcaaaacagagattttgacaaactcttaaaacagtatgaagccaatccagcctgtgaggggaggatgctggagacattcttgacctatcccatgtttcagatccccagatatatcatcacactccatgagctccttgctcacacaccccatgagcatgtggaaaggaaaagcctggagtttgccaaatcaaagctagaggaactatccagagtaatgcacgatgaagtcagcgacactgaaaacataaggaaaaaccttgccatcgaaagaatgatcgtggagggctgtgacatcttgctggacaccagccaaacgttcatccgccaagggaccatgaaaaacagcaacacaatcatagtaaagcacgagtggggcaggcagtacattctgactggacgctcctcctcagcggcccggacattctctgcagctccaaggaggaccgaagaggaagatgatatctgccttcctacttcacaggctcgttgtaatgaatacgtaggtcttcgtaaatccataatgctagtacagaaaaaagacaaaaagaacatcacttgcaggtcattaacacccagtgaggaagcaagtgatccaagagagagattgaccaagatgaaaggtgctaagctcaattctagtgcccctgccctgagaaacagattccctgctgtgggaagcaaacctctgttacctatgagtaacctggtggcctcccagataatgaactatgctgatgtcagctcccgtgccaacgccatcgagaaatgggtggcagtggcggacatctgccgatgcctgcacaactacaacggcgtgctggagatcacctcggccttaaacagaagtgccatctacagtgctgctgcggccgcggtcgtgtgggctgggtggagaggggtaaaactaaaactacatttcccagactcccttgcagctatggttctggatgtaaattcagttccactaatagatgcacttggaaagacacagaaggcggaagtaggggccatcttcctatggctgaaagtcagtcatggcgatgtgagtgctttggggcaatgtcagcacccagctttaggattctag

SEQ ID NO: 158188 - DNA, 3711 bp, Homo sapiens
atgcagaagagcgtgcgctacaacgaggggcacgccctgtacctggcctttctggcgcgcaaggagggcaccaagcgcggcttcctgagtaagaagacggccgaggcgagccgctggcacgagaagtggttcgccctctaccagaatgtgctcttctacttcgagggcgagcagagctgccgcccggcgggcatgtacctcctggagggctgcagctgcgaacgaacgcccgcgccacccagggccggcgccgggcagggaggcgtccgagacgcgctggacaagcagtattactttactgttctttttggccatgaaggtcagaagccactggagctgcgctgtgaggaggagcaggatggtaaagagtggatggaggccattcaccaagccagttatgcagacattttgattgagagggaagtattaatgcagaagtacattcatctagttcagatcgtagagacagaaaaaattgcagctaaccaactccgacatcaacttgaagatcaagacacagaaatcgaaaggcttaaatcagagattattgctcttaataaaaccaaagaacgaatgcgaccttaccaaagcaaccaagaagacgaagatccagacatcaagaagattaaaaaggttcagagcttcatgcgaggatggttgtgcagaaggaaatggaagaccatcgtgcaggattacatttgttctcctcatgctgaaagtatgaggaagagaaaccagattgtgttcaccatggtggaggcagagtcagagtacgttcaccagctctacatcctggtcaatggctttctccggcccctgcgtatggccgccagctccaagaagccccccatcagccacgacgacgtcagcagtatttttcttaacagtgaaacaatcatgtttcttcatgaaatatttcatcaaggactaaaggcaaggatagcaaactggcccactttaattttagctgatctgtttgatattttgctccccatgctgaacatttatcaagaatttgtgcgtaatcaccagtacagcctgcaagttctcgccaattgtaagcaaaacagagattttgacaaactcttaaaacagtatgaagccaatccagcctgtgaggggaggatgctggagacattcttgacctatcccatgttccagatccccagatatatcatcacactccatgagctccttgctcacacaccccatgagcatgtggaaaggaaaagcctggagtttgccaaatcaaagctagaggaactatccagagtaatgcacgatgaagtcagcgacactgaaaacataaggaaaaaccttgccatcgaaagaatgatcgtggagggctgtgacatcttgctggacaccagccaaacgttcatccgccaaggttctcttattcaagtaccttccgttgagagggggaaacttagtaaagttcgcctgggttcgttgtctttgaaaaaggaaggagagagacaatgcttcttatttacaaaacactttttaatatgtacaagaagttcaggagggaagcttcatctgctcaagacaggtggggttctgtctctaatagactgcacattgattgaggagccagatgcaagcgatgatgactctaaaggttctgggcaagtgtttgggcacctggattttaaaatagtggtggagcctcctgaccgtgccgccttcactgttgtcttgttagcaccctcacgccaggagaaagctgcctggatgagtgacatcagtcagtgtgtggacaatatacgatgtaatggtttaatgactatagtgtttgaagagaattccaaagtcactgtgccacatatgattaagtctgatgcccgtcttcataaagacgacactgacatttgcttcagtaaaacactcaactcctgcaaagtgccccagatccgttatgccagcgtggagcgcctcttggaacgactgacagacttgcggtttcttagtattgatttcctcaacacctttctgcacacctatcgtattttcactactgccgctgtggtgctggggaaactctccgacatatacaagaggcctttcacctccatccctgtcaggtcattggaattgttttttgctaccagccagaacaacagaggtgaacatttggtggatggcaaatccccacgtctgtgtcgcaaattctcttccccgccaccactggctgtgtccagaacatcttccccagtgagggccagaaagctgtctttgacttctcccttgaactcaaagataggagcattggacctgacaacttccagcagtcccaccaccaccacccagagtcccgctgcgtctccaccaccacacactggtcagataccactggatctcagcagaggcctctcttctccagagcaaagcccgggaacggtagaagagaatgtcgataacccacgcgtggatctgtgtaacaagctaaaacgaagtattcaaaaagcagtcctagagtctgcaccagcggaccgagcaggagtggaaagctcccctgcagcggacaccacagaactttcaccttgcagatccccctcaactcctcggcacctccgctatcgacagcctggaggacagacggcggacaatgcccactgctctgtttcaccggcttctgcttttgcaatagccacagctgcagcaggacatgggagtccaccaggctttaacaacaccgagagaacatgtgataaagagtttattatacggagaacggctaccaatcgagttctgaacgtcctccgtcactgggtctcaaagcacgcacaggatttcgaactcaacaatgaactaaagatgaatgtcctaaatttgctagaagaagttttgcgagacccagaccttcttccccaagaaaggaaagccgccgcgaatatcctcagggccctttcacaagatgaccaagatgacatccacctaaaattagaggatataattcaaatgactgactgcatgaaggccgaatgctttgagtccttgtcggccatggagctggcagaacagatcaccctcctggaccatgtcattttcagaagcattccctacgaggagtttcttgggcaggggtggatgaagctggataaaaacgaaagaactccttacattatgaaaaccagccaacacttcaatgacatgagtaacctggtggcctcccagataatgaactatgctgatgtcagctcccgtgccaacgccatcgagaaatgggtggcagtggcggacatctgccgatgcctgcacaactacaacggcgtgctggagatcacctcggccttaaacagaagtgccatctacaggctgaagaaaacctgggccaaggtctctaagcagacaaaagctctaatggacaaacttcaaaagactgtttcctctgaaggaagatttaaaaatcttagagaaacccttaaaaattgtaaccctcctgcagttccttatcttgggatgtacttgacagacctggcatttattgaagaaggaacaccaaactttactgaggaaggccttgtcaatttctccaaaatgagaatgatatcacacatcatcagagagatacgccagttccagcagacttcctacagaatagatcatcagccaaaggtcgcacagtacttgcttgacaaagaccttatcatagatgaagatacgctatatgagctgtcactcaaaattgaacctcgactccctgct

SEQ ID NO: 158189 - DNA, 972 bp, Homo sapiens
agcctggagtttagccaatcaaagttacagtatctatcaagagttaagcatcgatgaagtcagcgacactgaaaacataaggataaaccttgccatcgaaagaatgatcgtggagggctgtgacatcttgctggacaccagccaaacgttcatccgccaatgggaccatgaaaatcagcaacacaatcatagtaaagcacgagtggggcaggcagttacattctgactggacgctcctcctcagcggcccggacattctctgcagctccaaggaggaccggtcggcctggcccacggccgtggcagtgccaagtgctgacgatacccaggccaaggcccaggagaaacttgcgttgctcaaagccctttcacataagactggggaccatgtccgaagtgaaaacagctgtctgttgttcccatttttcatcagcacttccggatccgccccacacgatataatttgattcaactggtaactcccgttgccagatgaaatgtctctgatggacacttgccacgctttggtaatgcagaagctgtcgtgtttgcgaagtgtgctttgggggcatcactcgataaattaagcttttgaagagttgaagatatttgtgccggaaactgtggagaagcaacagcctgacagtgcctatttctcctcggctgttatttcaaaatgcaagacgtaaaccacatcccaagttatttttttagtgcttaggtcctctgggggaggggagaatgccccaggcaattgatttgagacaatatattgcacacatttataattttgaatttggtgaggagtggaatataaatttggaactcaaattaatcgttaatgtagtttctgtttataatgtgccaatacatttgaagatatttgtgttgccattgcctaccataatgtactgcttaaaatctctttttacctcatcaagaacaagacaatgttttgtgcacattaatttt

SEQ ID NO: 158190 - DNA, 1756 bp, Homo sapiens
atgggactggctgccgtgcagcagggggtggcgcttgtgagggaggctcgggccgcactggagcccacagagagagggggaggctcaggcatggcaggctgcaggtcccgagccctgccctgcggggaggcagctaaggcctggcgagaaatcgagcacagcagctcctggcccaggtgctaagctccccccaactgcccgtggccagcggggacggccggccgcgctgagtgccgggcccaccgagcccgccgagcccacgcccacccggaactcgggctggcccgcaagcgccccgcctgtgcgcgctggggacaaccgttgctgggtgtcccagggcctgaggcaggacggtactccgctgacaccttccctttcggccttgaggttcccagcctggtggccccaggacgttccggtcgcatggcagagtgctacggacgacgcctatgaagcccttagtccttctagttgcgcttttgctatggccttcgtctgtgccggcttatccgagcataactgtgacacctgatgaagagcaaaacttgaatcattatatacaagttttagagaacctagtacgaagtgttccctctggggagccaggtcgtgagaaaaaatctaactctccaaaacatgtttattctatagcatcaaagggatcaaaatttaaggagctagttacacatggagacgcttcaactgagaatgatgttttaaccaatcctatcagtgaagaaactacaactttccctacaggaggcttcacaccggaaataggaaagaaaaaacacacggaaagtaccccattctggtcgatcaaaccaaacaatgtttccattgttttgcatgcagaggaaccttatattgaaaatgaagagccagagccagagccggagccagctgcaaaacaaactgaggcaccaagaatgttgccagttgttactgaatcatctacaagtccatatgttacctcatacaagtcacctgtcaccactttagataagagcactggcattggggatctctacagaatcagaagatgttcctcagctctcaggtgaaactggcgataggaaaaacccgaaggagtttgggaaagcaccccagagagttgggaataatggatgacattttgaaaaaaattttaggatattaatttcacaagtgcaacagggcacttcttagtggacaccagcaacccagcatatagagaagatattgaagcctctaaagatcacctaaaacgaagccttgctctagcagcagcagcagaacataaattaaaaacaatgtataagtcccagttattgccagtaggacgaaccaagtaataaaattgatgacctcgaacctggtatttaacatgctgtgtaattctagatctaaactctatgaatatttagatattaaatgtgttcccacccagagatgagagaaaaagctgcctacagtattcaatacattaaaaaatatgtgtagatcaaggagagtcacagccttattaaaagtttattaaacaataatataaaaattttaaacctacttgatattccataacaaagctgatttaagcaaactgcattttttcacaggagaaataatcatattcgtaatttcaaaagttgtataaaaatattttctattgtagttcaaatgtgccaacatctttatgtgtcatgtgttatgaacaattttcatatgcactaaaaacctaatttaaaataaaattttggttcaggaaaaaaaaaaaaaa

SEQ ID NO: 158191 - DNA, 342 bp, Homo sapiens
tcaaagagaggtcgcgtgagaagacaggcggtggcggagatcttcagagagaggtcgcccgagaagacaggcggtggcggagatcttcagagagaggacgcccgagaagacaggcggtggcggagatcttcagagagaggacgcctgagaagacaggcggtggcggagattttcagagagagggatgcccgagaagacaggcggtggcggagatcttcagagagaggacgcccgagaagacaggcggtggcggagatcttcagagagaggacgcccgagaagacaggcggtggcggagatcttcagagagagagatgcccgagaagacaggcggtggcggag

SEQ ID NO: 158192 - DNA, 338 bp, Homo sapiens
  misc_feature (1)...(338): n = a,t,c or g
annnnnnnnnnnnnnnnnnnnnnnnnnnnnnnnnnnnnnnnnnnnnnnnnnnnnnnnnnnnnnnnnnnnnnnnnnnnggacaaaannnnnnnnnnnnnnnnnnnnnnnnnnnnnnnnnnnnnnnnnnnnnnnnnnnnnnnnnnnnnnnnnnnnnnnnnnnnnnnnnnnnnnnnnnnnnnnnnnnnnnnnnnnnnnnnnnnnngaaatccatatatttatagccaactgttttttgacaaaggaaccaagaatattcactggggatagggacagtctcttcaataaatgctgctcggaaaacttgatatccattattcagaaaaataaaactagacccc

SEQ ID NO: 158193 - DNA, 666 bp, Homo sapiens
ggagacccgggggccggccccggggaccacaaccgcttcgactgcggcccgcagccgccgccgccgcccaagtgcgagctcttgcatgtggccatcgtgtgtgcggggcataactccagccgagacgtcatcaccctggtgaagtccatgctcttctacaggaaaaatccactgcacctccacatggtgactggcgccgtggccagaaacatcatggagacgctcttccacacatggatggtgcctgctgtccgtgtcagcttttatcatgccgaccagctcaagccccaggtctcctggatccccaacaagcactactccggcctctatgggctaatgaagctggtgctgcccagtgccttgcctgctgagctggcccgcgtcattgtcctggacacggatgtcaccttcgcctctgacatctcggagctctgggccctctttgctcacttttctggtgtgatcctgctgcggctggaccggctccggcaggctggctgggagcagatgtggaggctgacagccaggcgggagctcctagcctgcctgccacctcactggctgaccaggacatcttcaacgctgtgatcaaagagcactcggggctagtgcagcgtctgccttgtgtctggaatgtgcagctgtcaaatcacacactggccgagc

SEQ ID NO: 158194 - DNA, 1289 bp, Homo sapiens
gtattaatttccccaccacatccggcctcgacggagacccgggggccggccccggggaccacaaccgttccgactgctgcccgcagccgccgccgccgcccaggtgcgagctcttgcatgtggccatcgtgtgtgcggggcataactccagccgagacgtcatcaccctggtgaagtccatgctcttctacaggaaaaatccactgcacctccacttggtgactgacgccgtggccagaaacatcctggagacgctcttccacacatggatggtgcctgctgtccgtgtcagcttttatcatgccgaccagctcaagccccaggtctcctggatccccaacaagcactactccggcctctatgggctaatgaagctggtgctgcccagtgccttgcctgctgagctggcccgcgtcattgtcttggacacggatgtcaccttcgcctctgacatctcggagctctgggccctctttgctcacttttctgacacgcaagcgatcgggcttgtggagaaccagagtgactggtgacctgggcaacctctggaagaaccacatgccctggcctgccttgggccggggatttaacacaggcgtgatcctgctgcggctggaccggtttcggcaaggctgggtgggagcaaatgtggaggcttacagccaggcgggagctccattagcctgcctgccacctcactggctgaccaggacatcttcaacgctgtgatcaaggagcacccggggctagtgcagcgtctgccttgtgtctggaatgtgcagctgtcagatcacacactggccgagcgctgctactctgaggcgtctgacctcaaggtgatccactggaactcaccaaagaaggttttgggtgaagaacaaccatgtggaattcttccgcaaaatctacctgatccttctggagaaccaaggaaacctgctgctggaagaagtttttttgtgccccagccagccccccacctggtgctgaccaattgcagcaggcccctgccacaactggacgaggaagacccctgctttgagttccggcagcagcagctcactgtgcaccgcgggcatgttacttttcctgccccatgaaccgccacccccccggcctcacgatgtcacccttgtggcccagctgtccatggaccggctgcagatgttggaagccctgtgcaggcactgccctggccccgtgagcctggccttgtacctgacagacgcagaagctcagcagttcctgcatttcgtcgaggccaatggggtggggatcgatagagtcaa

SEQ ID NO: 158195 - DNA, 1026 bp, Homo sapiens
gtctgtggcccctctctcaccaaccccagcatgatgattgatgacctcctgactccatgctcaccaggggacccaggagccatggagatgacttggatggatgtccctggggacaaactcttagagcctgtggtttgcatggctgtcattatttgtatcaaaaacaaagaatttgaaaaggcttcaaaaattttgaagaaacatatgtccaaggaccccacaactcagtgtgacaatctaaaaacttgtcacacttcacatggatctgtcatggcggaaacagcggttatcaatcacaagaaacgtaaaaatagcccgcgaatcgtccagtcaaacgacctcactgaggcggcatatagtctctcccgggatcaaaaacgtatgctgtatctgttcgttgaccagatcagacaatctgatggcaccctacaggaacatgacggtatctgcgagatccatgttgctaaatatgctgaaatattcggattgacctctgcggaagccagtaaggatatacggcaggcattgaagagtttcgcggggaaggaagtggttttttatcgccctgaagaggatgccggcgatgaaaaaggctatgaatcttttccttggtttatcaaacgtgcgcacagtccatccagagggctttacagtgtacatatcaacccatatctcattcccttctttatcgggttacagaaccggtttacgcagtttcggcttagtgaaacaaaagaaatcaccaatccgtatgccatgcgtttatacgaatccctgtgtcagtatcgtaagccggatggctcaggcatcgtctctctgaaaatcgactggatcatagagcgttaccagctgcctcaaagttaccagcgtatgcctgacttccgccgccgcttcctgcaggtctgtgttaatgagatcaacagcagaactccaatgcgcctctcatacattgagaaaaagaaaggccgccagacgactcatatcgtattttccttccgcgatatcacttccatgacgacaggatag

SEQ ID NO: 158196 - DNA, 954 bp, Homo sapiens
atggcgaccgcggcgactatcccatcggtagccacggccacagcagcggctctcggcgaggtggaggatgaagggctcctggcgtcgctgttccgggaccgcttccccgaggcccagtggcgcgagcggcccgatgtgggccgctacctccgggagttgagcggctcggggctggagcggctgcggcgcgagcccgagcgcctggcggaggagcgggcgcagctgctgcagcagacgcgcgacttggccttcgctaactacaagaccttcatccgcggcgccgagtgcaccgagcgcatccaccgcctgtttggcgacgtggaggcgtcgctcggccgcctgctcgaccgtttgcccagcttccagcagagctgcagaagcccgcgggcggctcggaacgctgtttctatcatggccgcgggagccgggacggcgggccccgcttccggcccgggcgtcgtgcgtgacccagcggcgtcacagccgaggaagcggcccggccgggagggcggggagggcgcgcggcgatcggacacgatggcgggaggaggcgggagtagcgacggcagcgggcgggcagctggcaggcgggcgtcccgcagtagcgggcgggcccggcgggggcgccacgagccggggctggggggcccggcggagcgcggcgcgggggaggcacggctggaagaggcagtcaatcgctgggtgctcaagttctacttccacgaggcgctgcgggcctttcggggtagccggtacggggacttcagacagatccgggacatcatgcaggcgctcacattcttccgtggcactcttgatcaatcaagcaaacaagaactttccctagacctttcttcagagagcataaagaacatccaagtcaatattacctattctttgagatccagggactgtgctaattttgacattttatatgatattaaaccattttaa

SEQ ID NO: 158197 - DNA, 694 bp, Homo sapiens
gaggcagcctttgcaaaactggaccagaaggatctggttcttctactcaagctctcccagcatcaccagccctcaaaaacaagagacccagaaaagatgaaaacgaaagttcagccccggctgacggtgagggtggctcggaactgcagcccaaagaacaaggcccatgacaataagcaaaattggtcttgggaggaggacagccagattactgagcccagcgcaggcctcaactcctcccaggaggccgtttcagcgccaccatccaagcccaccgttttcaaccaacccctccctggagagaagaatcccaagtatgaagaccttctttgtagaaattttggggctggttggtggtcctggttgggcctggtattacttccgggaattaaggaaactttcagctaagttactcaccaccaaggcttgctcagactgctagaacttgacgcaggagtggccagtgacgacgtagccatccctgccggttctgaagccccgcatgtgggcttccaagccttgcactagggcatgagtgggaatggaaaggtttcagagcctcctactcatcgctgctttcatttttagcaaacatctgagtgtcttgacttctaaacattagtcttgtgtgttaaaagaaatttgtttgcattgggccacattatactttgacccttaaaaagagaaaaaaaaa

SEQ ID NO: 158198 - DNA, 1866 bp, Homo sapiens
  misc_feature (1)...(1866): n = a,t,c or g
ggaattcggcacgagggacggcgggccccgcttccggcccgggcgtcgtgcgtgacccagcggcgtcacagccgaggaagcggcccggccgggagggcggggaggcgcgcggcgatcggacacgatggcgggaggaggcgggagtagcgacggcagcgggcgggcagctggcaggcgggcgtcccgcagtagcgggcgggcccggcgggggcgccacgagccggggctggggggcccggcggagcgcggcgcgggggaggcacggctggaagaggcagtcaatcgctgggtgctcaagttctacttccacgaggcgctgcgggcctttcggggtagccggtacggggacttcagacagatccgggacatcatgcaggctttgcttgtcaggcccttggggaaggagcacaccgtgtcccgattgctgcgggttatgcagtgtctgtcgcggattgaagaaggggaaaatttagactgttcctttgatatggaggctgagctcacaccactggaatcagctatcaatgtgctggagatgattaaaacggaatttacactgacagaagcagtggtcgaatccagtagaaaactggtcaaggaagctgctgtcattatttgtatcaaaaacaaagaatttgaaaaggcttcaaaaattttgaaaaaacatatgtccaaggaccccacaactcagaagctgagaaatgatctcctgaatattattcgagaaaacgaacttggcccatcctgttatccagaacttttcatatgagaccttccagcagaagatgctgcgcttcctgggagagccacctggatgacgccgagccctacctcctcacgattggatttatggccaaaaaggctttgaaatctgagtccgctgcctcaagtacagggaaggaagataaacagccagcaccagggcctgtggaaaagccacccagagaacccgcaaggcagctacggaatcctccaaccaccattggaatgatgactctgaaagcagctttcaagactctgtctggtgcacatgactcttaggtcagccttatctaacgtggtccataatgatctggttcttcctactcaagctctcccagcatcaccagccctcaaaaacaagagacccagaaaagatgaaaacgaaagttcagccccggctgancggtgagggtggctcggaactgcagcccaagaacaagcgcatgacaataagcagattggtcttggaggaggacagccagagtactgagcccagcgcaggcctcaactcctcccaggaggccgcttcagcgccaccatccaagcccaccgttctcaaccaacccctccctggagagaagaatcccaaagtacccaaaggcaagtggaacagctctaatggggttgaagaaaaggagacttgggtggaagaggatgaactgtttcaagttcaggcagcaccagatgaagacagtacaaccaatataacaaaaaagcagaagtggactgtagaagaaagcgagtgggtcaaggctggagtgcagaaatatggggaaggaaactgggctgccatttctaaaaattacccatttgttaaccgaacagctgtgatgattaaggatcgctggcggaccatgaaaagacttggcatgaactgaaacaggctttcatttccacagaattcacaggagcatggttcctaattaattagcccctgatagcctgctctttctttctttttcttttttttttttttttgagacagagtctcggctctgtccacccagggctgggagttgcagtggcgtgatctcggctcactgcgacctccgtttccggggttaacgcaattttcttgcttaagcctcccgagaagctggaaca

SEQ ID NO: 158199 - DNA, 503 bp, Homo sapiens
  misc_feature (1)...(503): n = a,t,c or g
gcaaatgaagcagaatgaaactactgcaatgaagaaacaacaggaattaatggatgaaaactttgacctgtcaaaaagactgagtgagaacgaaattatatgtaatgctctgcagagacagaaagagagattggaaggagaaaatgatgtatccaagaaagttcttcccccagcccgctctccatcaagaaatgccctatctgcaaagcagattgatatttgtgatcacaccttggagcaacagcagatgcagcccctttgtttcaattgtccagtttgtgacaagatcttcccagctacagagaagcagatctttgaagaccacgtgttctgccactctctctgagtatcccaacctccttggatgtatacagagattttattagaatagaaccctatagcttctaccatgagttatatgagtcaagatcctgcctaacctgaaattattagggatttactcagcctgctgcggctaacagtggagttatgtcnctgattga

SEQ ID NO: 158200 - DNA, 449 bp, Homo sapiens
tcgctggaggggacgtcacatgtcattatttcttcacccagcattttattcctcgtcgaaaggatgggattggcatcgttagagtggggtggaagacaacccgtgagtattacaccttcatgtgggttactttgcccattgacctaaacaacaaatcagctaaacagcaggaagtccaattcaaaggtgagaaaaatactggatcaaaggtgttgaagacagtagccaagactaattaattcccttcagcttgagctttctggggcagataaaaagatttccagaattttacttttctgaatagatcttattttggatgaaaaattatgttgtgttttcagcttactacctgcccaaggatgatgagtattaccagttctgctatgtggatgaggatggtgtggtccgtggagcaagtattcctttccaattccgtccagaaaatgagg

SEQ ID NO: 158201 - DNA, 2717 bp, Homo sapiens
caggcgggtcgggctctcccttgggtgcttagccccgcccccgtcccactctgccctgttgctgtcgcgccgctgctggttgctgtccctggacccctaccatggaggagaccatcaaagatccccccacatcagctgtcttgctggatcactgtcatttctctcaggtcatctttaacagtgtggagaagttctacatccctggaggggacgtcacatgtcattataccttcacccagcatttcatccctcgtcgaaaggattggattggcatctttagagtggggtggaagacaacccgtgagtattacaccttcatgtgggttactttgcccattgacctaaacaacaaatcagctaaacagcaggaagtccaattcaaagcttactacctgcccaaggatgatgagtattaccagttctgctatgtggatgaggatggtgtggtccggggagcaagtattccctttccaattccgtccagaaaatgaggaagacatcctgggttgttaccactcagggagaggttttatgagatcgatttgcacaacaaggagctttgcagagaaaaccaggagctgaaggacagctgtatcagcctccaagaagcagaactcaagacatgcaggctgagctccaaaagaagcaggaggagctagaaaccctacagagcatcaataagaagttggaactgaaagtgaaaagaacagaaggacctatttgggacgacagagctgcttcaacctgaaagaaccaaaaccagaagattgtcctcagaaaatggagaagatggggaatcagagtgggatccagcttcagggccaagctgtcaactcaagagaaagaaatgaagaagcttgtcaagggagatcaagataagccagagcagttagagcagctgaaaaaggaaaatgaccacctctttctccagtttaactgaccagaggaaggaccagaagaagctcgagcagacagtggagcaaatgaagcagaatgaaactactgcaatgaagaaacaacaggaattaatggatgaaaactttgacctgtcaaaaagactgagtgagaacgaaatttatatgtaatgctctgcagagacagaaagagagattggaaggagaaaatgatcttttgaagagggagaacagcagattgctcagttacatgggtctggattttaattcttttcccgtatcaagtacctacttcagatgaaggaggcgcaagacaaaatcccgggacttgcctatggaaacccatattctggtatccaagaaagttcttccgccagcccgctctccatcaagaaatgccctatctgcaaagcagatgatatttgtgatcacaccttggagcaacagcagatgcagcccctttgtttcaattgtccaatttgtgacaagatcttcccagctacagagaagcagatctttgaagaccacgtgttctgccactctctctgagtatcccaacctcttggatgtatacagagattttatagaatagaacctatagcttctaccatgagttatatgagtcaagatcctgcctaacctgaaattattaagggatttactcagcccctgctgccgctaacaagtggagttatgtcacctgatcttgaaggtcactgttaaagggcttctgctgccatccttgtgggttgctacctttaagtcgcataactctagctgtatcatcctctcacctgtcattcttctgagggtctcaggacaaggggccctgggatggagccaacctgggtattcaccaacaggcctgactggatactaagtgattaagttttccaagttgtcccactgcccattcaaagtccagcccctggagtgtatttgttctcagtcctaaccctggggcccagagattggtcccgaggttgagaattccttcctcctcatccttggtgttgctttctccaaatgattgttttagactagccaaaaatgcctgtggcaaaagagctcagaaatccaatttggataccaaaggtttctcatgttaatttctcagcccccaaagaagcaccctactccctgaaccctagacagggaagtattggttccagtcacagaaagcttttcctggggtaccctctggttagcactttcctactctctgatatttcctatgtacgatagctttttattgttgtaaatcctttccttaatggttaaataggattgttagcaactatgggtttgcagttttctgagtaggtgagttttgaatatgggtaaatcagaataatgagacaacttgttaatctctttaatactaaaaataaattactcttctatttcagggacttaggtaatttaaaataaaccttcaatttatggtcttctgttttgaagctcatgggaaaattgtgatcaaaagggctatgggaagggcagaccccgccaatgatttctcttcacctgtcttaagattaaataaaaaagagtgtcctggcagttatcttgaggtggggaaggaggtgatgaaacattagtttgtgaaatccaaggccctggctttctttctttctttttttttttttttttttttgaaacagtctctctctgtcacccaggctggcgtgcaatggcgcagttgactcactacagcctctgcctcccaggttcaagcgattctcatgccttagcctcccaagtagctgggattacaggtgtgtgccgcaatgcccagctaat

SEQ ID NO: 158202 - DNA, 415 bp, Homo sapiens
ggctcgttttgagattaagaaactccagaaaggaacttaatgtttttctatttgagtttactccaggaagagatacagcagatggtgtatctcaggagctcttctctgctggcttggtggatggtcacgatgtatttatagtggctgctaatttacagaagattgtagatgatcccaaagctttaaaaacattgacatttaagttggcttctggctgtgatgggtcggagattcctgatgaagtgaagctgattgggtttgctcaagtgagtgtcagctgatgtatgtcccttgatgtcaccctgatctgtcatgccccaccgccacccctactccctttaaccctccctctttctgcccatttcctcccaccccctcactcccatttcctagcaaaatcagaagattgtgaacg

SEQ ID NO: 158203 - DNA, 1127 bp, Homo sapiens
atgaggcctggaagtctcactgatgtgacacttgagccaagatctgaaggaggtaaggaaaagagtattccagaaagaaggaacggcccatgcaaagatcccggggcagcagcatgcaagctatgccttacatctgttctctttgccaccaacaggcacatgtacttgcataacctgctgctgagacagggtgtctcccgtgcctctaggcagagtgcactgacccaaagttcaggaacacctgccatgtatcagtgcagcaaaacctattacattttccaaggcatccaagttgattatcaggaagttacacacactggacctctaagcatagaaggttcaatgttggatatcataaaatacatttgtcaaccgaggagaacacaagaatggagttctggaagaggcaataatagcaacaattcttaaagaggtttttggaaggcttagactatctacacagaaacggtcagattcacagaaactccagaaaggaacttaatgacatacgatttgagtttactccaggaagaggccctaaaggaaatgatggtgaatgtgatgagaagcataccacagtcctaatgagggttgagcagcagtgggatcatacagaaaggaagacacaaactcagatgtccacagaagccaaagtgaatgatacagcagatggtgtatctcaggagctcttctctgctggcttggtggatggtcacgatgtagttatagcctgcccctccaggaatcttagactcttcataggcatcatctccacctttccaggtgctcaggccaaaaccctgggcattgtccttgacttttctttctctcatacttcacatccaactcatctgaatgtgcccaggatcctgcctttgctcaccatctcacatcccatcacgtttcaagcccctctcaactcccagttgagttcttgtattcatccctttgctgccattccagcttctgtacttgcctcccttcagcctgtcctcatctcaacagccagagatccaggcactagtcattattccagtgctctaggattcattggtcaacaaattcctgcgtacatggagcttagtcctgtgataggtgaactctgtctcagcaaagtcactgaatga

SEQ ID NO: 158204 - DNA, 1933 bp, Homo sapiens
agcagcaactggaaaacaagcattgcattgcatcaggatgtctatgaaatggacttcagctcttctgctgatacagctgagctgttactttagctctgggagttgtggaaaggtgctggtgtggcccacagaattcagccactggatgaatataaagacaatcctggatgaacttgtccagagaggtcatgaggtgactgtattggcatcttcagcttccatttctttcgatcccaacagcccatctactcttaaatttgaagtttatcctgtatctttaactaaaactgagtttgaggatattatcaagcagctggttaagagatgggcagaacttccaaaagacacattttggtcatatttttcacaagtacaagaaatcatgtggacatttaatgacatacttagaaagttctgtaaggatatagtttcaaataagaaacttatgaagaaactacaggagtcaagatttgatgttgttcttgcagatgctgttttcccctttggtgagctgctggccgagttacttaaaataccctttgtctacaggcctcgcttctctcctggctacgcaattgaaaagcatagtggaggacttctgttccctccttcctatgtgcctgttgttatgtcagaactaagtgaccaaatgactttcatagagagggtaaaaaatatgatctatgtgctttattttgaattttggttccaaatatttgacatgaagaagtgggatcagttctacagtgaagttctaggaagacccactacgttatctgagacaatggcaaaagctgacatatggcttattcgaaactactgggattttcaatttcctcacccactcttaccaaatgttgagttcgttggaggactccactgcaaacctgccaaacccctaccgaaggaaatggaagagtttgtccagagctctggagaaaatggtgttgtggtgttttctctggggtcgatggtcagtaacacgtcagaagaaagggccaatgtaattgcatcagcccttgccaagatcccacaaaaggttctgtggagatttgatgggaataaaccagatactttaggactcaatactcggctgtacaagtggataccccagaatgatcttcttggtcacccaaaaaccagagcttttataactcatggtggagccaatggcatctataaggcaatctctcctagaatccctatggtgggcgttccattgtttgcagatcaacctgataacattgcacacatgaaggccaagggagcagctgttagtttggacttccacacaatgtcgagtacagacttactcaatgcactgaagacagtaattaatgatcctttatataaagagaatgctatgaaattatcaagaattcatcatgatcaaccagtgaagccccttgatcgagcagtcttctggattgaatttgtcatgcgccataaaggagccaagcaccttcgggttgcagcccacgacctcacctggttccagtaccactctttggatgtgactgggttcctgctggcctgtgtggcaactgtgatattcatcatcacaaaatgtctgttttgtgtctggaagtttgttagaacaggaaagaaggggaaaagagattaattacgtctgaggctggaagctgggaaacccaataaatgaactcctttagtttattacaacaagaagacgttgtgatacaagagattcctttcttcttgtgacaaaacatctttcaaaacttaccttgtcaagtcaaaatttgttttagtacctgtttggaaacaagaacattaagaagtccactgacagtatcagtactgttttgcaaatactcagcatactttggatccatttcatgcaggattgtgttgttttaactgttgttgaggaagctaataaataattaaattgtaaaaaaaaaaaaaaaaa

SEQ ID NO: 158205 - DNA, 945 bp, Homo sapiens
atggctgccaaactagttggaatagaatttgatccctgctgggtgaagatgcttatggagaagggtcatcagaaaaccagagaacataattatccctctatggagcaatcagaaaaagctggtgtgacagataacatacagggtaagacaaaagctttggcaggatctaggcagagtgtggctaacggaaagaattcacactgtaaagaaaatgttacatggctgttgatcattcattacgttcagcctatgaagccctacgaagtcttctggattgagtttgtcacacaccaaaaagcaaccaagtacctgtgccaactgcccacaacttcaccagatgctgttttcccctttggtgagctgctggccgagttacttaaaataccctttgtctacagcctccgcttctctcctggctacgcaattgaaaagcatagtggaggacttctgttccctccttcctatgtgcctgttgttatgtcagaactaagtgaccaaatgactttcatagagagggaagacccactacgttatctgagacaatggcaaaagctgacatatggcttattcgaaactactgggattttcaatttcctcacccactcttaccaaatgttgagttcgttggaggactccactgcaaacctgccaaacccctaccgaagaccttgggccatggatgggaccgggcaccatgaagcagagggtggcgctccctggggaggggctcaggcatggcagactgcaggtcctgagccctgccccgtgggaaggcggctgaagggtgacaattggagcacggcatggcaaagagaaggaaatcttcacatgacccatagggtcaacaggaatatagacgttcaaggtcctcaaacacattcatccagcggtccacatcctatgtcttggcttcggtgtaggacatttcctgacaaaaattgctaa

SEQ ID NO: 158206 - DNA, 2655 bp, Homo sapiens
atgtctatgaaatggacttcagctcttctgctgatacagctgagctgttactttagctctgggagttgtggaaaggtgctggtgtggcccacagaattcagccactggatgaatataaagacaatcctggatgaacttgtccagagaggtcatgaggtgactgtattggcatcttcagcttccatttctttcgatcccaacagcccatctactcttaaatttgaagtttatcctgtatctttaactaaaactgagtttgaggatattatcaagcagctggttaagagatgggcagaacttccaaaagacacattttggtcatatttttcacaagtacaagaaatcatgtggacatttaatgacatacttagaaagttctgtaaggatatagtttcaaataagaaacttatgaagaaactacaggagtcaagatttgatgttgttcttgcagatgctgttttcccctttggtgagctgctggccgagttacttaaaataccctttgtctacaggcctcgcttctctcctggctacgcaattgaaaagcatagtggaggacttctgttccctccttcctatgtgcctgttgttatgtcagaactaagtgaccaaatgactttcatagagagggtaaaaaatatgatctatgtgctttattttgaattttggttccaaatatttgacatgaagaagtgggatcagttctacagtgaagttctaggaagacccactacgttatctgagacaatggcaaaagctgacatatggcttattcgaaactactgggattttcaatttcctcacccactcttaccaaatgttgagttcgttggaggactccactgcaaacctgccaaacccctaccgaaggaaatggaagagtttgtccagagctctggagaaaatggtgttgtggtgttttctctggggtcgatggtcagtaacacgtcagaagaaagggccaatgtaattgcatcagcccttgccaagatcccacaaaaggttctgtggagatttgatgggaataaaccagatactttaggactcaatactcggctgtacaagtggataccccagaatgatcttcttggtcacccaaaaaccagagcttttataactcatggtggagccaatggcatctataaggcaatctctcctagaatccctatggtgggcgttccattgtttgcagatcaacctgataacattgcacacatgaaggccaagggagcagctgttagtttggacttccacacaatgtcgagtacagacttactcaatgcactgaagacagtaattaatgatcctttatataaagagaatgctatgaaattatcaagaattcatcatgatcaaccagtgaagccccttgatcgagcagtcttctggattgaatttgtcatgcgccataaaggagccaagcaccttcgggttgcagcccacgacctcacctggttccagtaccactctttggatgtgactgggttcctgctggcctgtgtggcaactgtgatattcatcatcacaaaatgtctgttttgtgtctggaagtttgttagaacaggaaagaaggggaaaagagattaattctctcctggctacgcaattgaaaagcatagtggaggacttctgttccctccttcctatgtgcctgttgttatgtcagaactaagtgaccaaatgactttcatagagagggtaaaaaatatgatctatgtgctttattttgaattttggttccaaatatttgacatgaagaagtgggatcagttctacagtgaagttctaggaagacccactacgttatctgagacaatggcaaaagctgacatatggcttattcgaaactactgggattttcaatttcctcacccactcttaccaaatgttgagttcgttggaggactccactgcaaacctgccaaacccctaccgaagaaatggaaggagtttgtccagagctctggagaaaatggtgttgtggtgttttctctggggtcgatggtcagtaacacgtcagaagaaagggccaatgtaattgcatcagcccttgccaagatcccacaaaaggttctgtggagatttgatgggaataaaccagatactttaggactcaatactcggctgtacaagtggataccccagaatgatcttcttggtcacccaaaaaccagagcttttataactcatggtggagccaatggcatctatgaggcaatctaccatggaatccctatggtgggcgttccattgcttgcagatcaacctgataacattgcacacatgaaggccaagggagcagctgttagtttggacttccacacaatgtcgagtacagacttactcaatgcactgaagacagtaattaatgatcctttatataaagagaatgctatgaaattatcaagaattcatcatgatcaaccagtgaagccccttgatcgagcagtcttctggattgaatttgtcatgcgccataaaggagccaagcaccttcgggttgcagcccacgacctcacctggttccagtaccactctttggatgtgactgggttcctgctggcctgtgtggcaactgtgatattcatcatcacaaaatgtctgttttgtgtctggaagtttgttagaacaggaaagaaggggaaaagagattaa

SEQ ID NO: 158207 - DNA, 2481 bp, Homo sapiens
agcagcaactggaaaacaagcattgcattgcatcaggatgtctatgaaatggacttcagctcttctgctgatacagctgagctgttactttagctctgggagttgtggaaaggtgctggtgtggcccacagaattcagccactggatgaatataaagacaatcctggatgaacttgtccagagaggtcatgaggtgactgtattggcatcttcagcttccatttctttcgatcccaacagcccatctactcttaaatttgaagtttatcctgtatctttaactaaaactgagtttgaggatattatcaagcagctggttaagagatgggcagaacttccaaaagacacattttggtcatatttttcacaagtacaagaaatcatgtggacatttaatgacatacttagaaagttctgtaaggatatagtttcaaataagaaacttatgaagaaactacaggagtcaagatttgatgttgttcttgcagatgctgttttcccctttggtgagctgctggcccgagttacttaaaataccctttgtctacaggcctcgcttctctcctggctacgcaattgaaaagcatagtggaggacttctgttccctccttcctatgtgcctgttgttatgtcagaactaagtgaccaaatgactttcatagagagggtaaaaaatatgatctatgtgctttattttgaattttggttccaaatatttgacatgaagaagtgggatcagttctacagtgaagttctaggaagacccactacgttagtctgagacaatggcaaaagctgacatatggcttattcgaaactactgggattttcaatttcctcacccactcttaccaaatgttgagttcgttggaggactccactgcaaacctgccaaacccctaccgaaggaaatggaaggagtttgtccagagctctggagaaaatggtgttgtggtgttttctctggggtcgatggtcagtaacacgtcagaagaaagggccaatgtaattgcatcagcccttgccaagatcccacaaaaggttctgtggagatttgatgggaataaaccagatactttaggactcaatactcggctgtacaagtggataccccagaatgatcttcttggtcacccaaaaaccagagcttttataactcatggtggagccaatggcatctatgaggcaatctaccatggaatccctatggtgggcgttccattgcttgcagatcaacctgataacattgcacacatgaaggccaagggagcagctgttagtttggacttccacacaatgtcgagtacagacttactcaatgcactgaagacagtaattaatgatcctttatataaagagaatgctatgaaattatcaagaattcatcatgatcaaccagtgaagccccttgatcgagcagtcttctggattgaatttgtcatgcgccataaaggagccaagcaccttcgggttgcagcccacgacctcacctggttccagtaccactctttggatgtgactgggttcctgctggcctgtgtggcaactgtgatattcatcatcacaaaatgtctgttttgtgtctggaagtttgttagaacaggaaagaaggggaaaagagattaattacgtctgaggctggaagctgggaaacccaataaatgaactcctttagtttattacaacaagaagacgttgtgatacaagagattcctttcttcttgtgacaaaacatctttcaaaacttaccttgtcaagtcaaaatttgttttagtacctgtttaaccattagaaatatttcatgtcaaggaggaaaacattagggaaaacaaaaatgatataaagccatatgaggttatattgaaatgtattgagcttatattgaaatttattgttccaattcacaggttacatgaaaaaaaatttactaagcttaactacatgtcacacattgtacatggaaacaagaacattaagaagtccgactgacagtatcagtactgttttgcaaatactcagcatactttggatccatttcatgcaggattgtgttgttttaactgttgttgaggaagctaataaataattaaattgtaaccattagaaatatttcatgtcaaggaggaaaacattagggaaaacaaaaatgatataaagccatatgaggttatattgaaatgtattgagcttatattgaaatttattgttccaattcacaggttacatgaaaaaaaatttactaagcttaactacatgtcacacattgtacatggaaacaagaacattaagaagtccgactgacagtatcagtactgttttgcaaatactcagcatactttggatccatttcatgcaggattgtgttgttttaactgttgttgaggaagctaataaataattaaattgtactttggatccatttcatgcaggattgtgttgttttaactgttgttgaggaagctaataaataattaaattgt

SEQ ID NO: 158208 - DNA, 238 bp, Homo sapiens
agcggccgcccttttttttttttttttgggcttccttttcttttcttttttttttttttttgagacagagtttcactcttgttgcccaggctgcagtgcaatggcacaatctcagctcactgcaacctctgcctcccgggctcaagcgattctcctgcctcagcctcccgagttgctgagcttccataacactttaccacccaacccattaacttctttgatcatttacttttatgtg

SEQ ID NO: 158209 - DNA, 764 bp, Homo sapiens
  misc_feature (1)...(764): n = a,t,c or g
ttgtcggtgttaacaaaatggattccactgagccnccctacagccagaagagatatgaggaaattgttaaggaagtcagcacttacattaagaaaattggctacaaccccgacacagtagcatttgtgccaatttctggttggaatggtgacaacattcgtccactgagccccctcagcagagaatatgagaatttgtaagaagtcagcacttcattagaaaattggctacacccccgacacagtagcatntgtgcnattcnntggtgggaatggtgacaacatgctggagccaagtgctaacatgccttggttcaagggatggaaagtcncccgtaaggantgcaatgccagtggaaccacgctgcttgaggctctggactgcatcctaccaccaactcgtccaactgacaagcccttgcgcctgcctctccaggatgtctacaaaattggtggtattggtactgttcctgttggccgagtggagactggtgttctcaaacccggtatggtggtcacctttgctccagtcaacgttacaacggaagtaaaatctgtcgaaatgcaccatgaagctttgagtgaagctcttcctggggacaatgtgggcttcaatgtcaagaatgtgtctgtcaaggatgttcgtcgtggcaacgttgctggtgacagcaaaaatgacccaccaatggaagcagctggcttcactgctcaggtgattatcctgaaccatccaggccaaataagcgccggctatgcccctgtatt

SEQ ID NO: 158210 - DNA, 522 bp, Homo sapiens; identical to SEQ ID NO: 150073
  misc_feature (1)...(522): n = a,t,c or g

SEQ ID NO: 158211 - DNA, 595 bp, Homo sapiens
  misc_feature (1)...(595): n = a,t,c or g
cctttgctccagtcaacgttacaacggaagtaaaatctgtcgaaatgcaccatgaagctttgagtgaagctcttcctggggacaatgtgggcttcaatgtcaagaatgtgtctgtcaaggatgttcgtcgtggcaacgttgctggtgacanaaaaatgacccaccaatggaagcagctggcttcactgctcaggtgattatcctgaaccatccaggccaaataagcgccggctatgcccctgtattggattgccacacggctcacattgcatgcaagtttgctgagctgaaggaaaagattgatcgccgttctggtaaaaagctggaagatggccctaaattcatggttcctggcaagcccatgtgttgttgagagcttctcaagactatccacctttgggtcgctttgctgttcgtgatatgagacagacagttgcggtgggtgtcatcaaagcagtggacaagaaggctgctggagctggcaaggtcaccaagtctgccagaaagctccagaaggctaaatgaatattatccctaatacctgcnaccccattcttaatcagtgggtggaagaacggtctcngactgnttgtng

SEQ ID NO: 158212 - DNA, 267 bp, Homo sapiens
  misc_feature (1)...(267): n = a,t,c or g
ccgagtggagactggtgttctcaaacccggtatggtggtcacctttgctccagtcaacgttacaacggaagtaaaatctgtcgaaatgcaccatgaagctttgagtgaagctcttcctggggacaatgtgggcttcaatgtcaagaatgtgtctgtcaagtgttggatatggttcctggcaagcccatgtgtgttgagagcttctcagactatccacctttgggtcgctttgctgttcgtgatatgagacagacagttgncggtggg

SEQ ID NO: 158213 - DNA, 349 bp, Homo sapiens
gaattcggcacgagcacctttgctccagtcaacgttacaacggaataaaatctgtcgaaatgcaccatgaagctttgagtgaagctcttcctggggacaatgtgggcttcaatgtcaagaatgtgtctgtcaaggatgttcgtcgtggcaacgttgctggtgacagcaaaaatgacccaccaatggaagcagctggcttcactgctcaggtgattatcctgaaccatccaggcgttctggtaaaaagctggaagatggccctaaattcttgaagtctggtgatgctgcaatgtcgatatggttcctgcaagccatgtgtgttgagacttctcagactatcagctttggg

SEQ ID NO: 158214 - DNA, 509 bp, Homo sapiens
  misc_feature (1)...(509): n = a,t,c or g
agagatatgaggaagttgttaaggaagtcagcacttacattaagaaaattggctacaaccccgacacagtagcatttgtgccaatttctggttggaatggtgacaacatgctggagccaagtgctaacatgccttggttcaagggatggaaagtcacccgtaaggatggcaatgccagtggaaccacgctgcttgaggctctggactgcatcctaccaccaactcgtccaactgacaagcccttgcgcctgcctctccaggatgtctacaaaattggtggtattggtactgttcctgttcagaaggctaaatgaatattatccctaatacctgccacccactccttaatcaatgggtggaagaacggtctcaagaactgtttggtttcaattgggncatttaagtttaagtagtaaaaagactgggttaatggataacaatgcatcgtaaaaccttcaagaaggaaanggagaatgttttgtggaccactttggnttcctttttggcgg

SEQ ID NO: 158215 - DNA, 654 bp, Homo sapiens
atccttaattaaattaatccccccccccccactgttcctgttggccgagtggagactggtgttctcaaacccggtatggtggtcacctttgctccagtcaacgttacaacggaagtaaaatctgtcgaaatgcaccatgaagctttgagtgaagctcttcctggggacaatgtgggcttcaatgtcaagaatgtgtctgtcaaggatgttcgtcgtggcaacgttgctggtgacagcaaaaatgacccaccaatggaagcagctggcttcactgctcaggtgattatcctgaaccatccaggccaaataagcgccggctatgcccctgtattggattgccacacggctcacattgcatgcaagtttggccgagtggagactggtgttctcaaacccggtatggtggtcacctttgctccagtcaacgttacaacggaagtaaaatctgtcgaaatgcaccatgaagctttgagtgaagctcttcctggggacaatgtgggctttcaatgtcaagaatgtgtctgtcaaggatgttcgtcgtggcaacgttgctggtgacagcaaagatgacccaccaatggaagccagctggcttcactgctcaggtgattatcctgaaccattcaggccaaataagcgccggctatgcccctg

SEQ ID NO: 158216 - DNA, 666 bp, Homo sapiens; identical to SEQ ID NO: 149821

SEQ ID NO: 158217 - DNA, 651 bp, Homo sapiens
  misc_feature (1)...(651): n = a,t,c or g
gaagctggtatctccaagaatgggcagacccgagagcatgcccttctggcttacacactgggtgtgaaacaactaattgtcggtgttaacaaaatggattccactgagccaccctacagccagaagagatatgaggaaattgttaaggaagtcagcacttacattaagaaaattggctacaaccccgacacagtagcatttgtgccaatttctggttggaacattgcatgcaagtttgctgagctgaaggaaaagattgatcgccgttctgggtaaaaagctggaagatggccctaaattcttgaagtctgggtgatgctgccattgttgatatggttcctgggcaagcccatgtgtgttgagagcttctcaagactatccacctttgggtcgctttgctgttccgtgatatgagacagacagttgcggtgggtgtcatcaaagcagtggacaagaaggctgctggagctggcaaggtcaccaagtctgcccaagaaagctcagaaggctaaatgaatattatccctaatacctgccaacccactcttaatcagtggtggaagaacggtctcaagaactgtttggttcaattgggncatttaagtttaagtagtaaaagactgggntaatgataacaatgcatcngtaaaa

SEQ ID NO: 158218 - DNA, 1105 bp, Homo sapiens
atgcagtcggaacgtggtatcaccattgatatctccttgtggaaatttgagaccagcaagtactatgtgactatcattgatgccccaggacacagagactttatccaaaacatgattacagggacctctcaggctgactgtgctgtcctgattgttgctgctggtgttggtgaatttgaagctggtatctccaagaatgggcagacccgagagcatgcccttctggcttacacactgggtgtgaaacaactaattgtcggtgttaacaaaatggattccactgagccaccctacagccagaagagatatgaggaaattgttaaggaagtcagcacttacattaagaaaattggctacaaccccgacacagtagcatttgtgccaatttctggttggaatggtgacaacatgctggagccaagtgctaacatgccttggttcaagggatggaaagtcacccgtaaggatggcaatgccagtggaaccacgctgcttgaggctctggactgcatcctaccaccaactcgtccaactgacaagcccttgggcctgcctctccaggatgtctacaaaattggtggtattggtactgttcctgttggccgagtggagactggtgttctcaaacccggtatggtggtcacctttggtccagtcaacgttacaacggaagtaaaatctgtcgaaatgcaccatgaagctttgggtgaagctcttcctggggacaatgtgggcttcaatgtcaagaatgtgtctgtcaaggatgttcgtcgtggcaacgttgctggtgacagcaaaaatgacccaccaatggaagcagctggcttccctgctcaggtgattatcctgaaccatccaggccaaataagcgccggctatgcccctgtattggattgccacacggctcacattgcatgcaagtttgctgagctgaaggaaaagattgatcgccgttctggtaaaaagctggaagatggccctaaattcttgaagtctggtgatgctgccattgttgatatggttcctggcaagcccatgtgtgttgagagcttctcagactggcaaggtcaccaagtctgcccagaaagctcagaaggctaaatga

SEQ ID NO: 158219 - DNA, 3799 bp, Homo sapiens
atgggaaaggaaaagactcatatcaacattgtcgtcattggacacgtagattcgggcaagtccaccactactggccatctgatctataaatgcggtggcatcgacaaaagaaccattgaaaaatttgagaaggaggctgctgagatgggaaagggctccttcaagtatgcctgggtcttggataaactgaaagctgagcgtgaacgtggtatcaccattgatatctccttgtggaaatttgagaccagcaagtactatgtgactatcattgatgccccaggacacagagactttatccaaaacatgattacagggacctctcaggctgactgtgctgtcctgattgttgctgctggtgttggtgaatttgaagctggtatctccaagaatgggcagaccccgagagcatgcccttctggcttacacactgggtgtgaaacgactaagttgtcggtgttaacaaaatggattccactgagccaccctacagccagaagagatatgaggaaattgttaaggaagtcagcacttacattaagaaaattggctacaaccccgacacagtagcatttgtgccaatttctggttggaatggtgacaacatgctggaagccaagtgctaacatgccctgggttcaagggaatgaaaagtcacccgtaaggatggcaatgccagatggaaccacgctgcttgaggctctggactgcatcctaccaccaactcgtccaactgacaagcccttgcgccatgcctctccaggatgtctacaaaattcggtggtattggtactgttcctgttggccgagtggagactggtgttctcaaaacccggtatggtggtcacctttgctccagtcaaccgttacaacggaagtaaaatctgtcgaaaatgcaccatgaagctttgaagtgaagctcttcctggggacaatgtgggctttcaatgtcaagaatgtgtcgtgtcaaggagtgttcgatcgtggcaacgtatagcatggtgacagcaaaatatgacccaccaatggaagccagctggcttcacttgctcagggtgattatcctgaaccatccaagaccaaaaaaacgcccggcatatgcccctggtattgggattgccacacggctcacattgcatgcaagtttgcctgagcctgaaaggaaaagattgatcgccgttctgggtaaaaagctgggaagatggccctaaatcttgaaatccggtggtgcaagtctggtgatgctgccatttgaagtctggtgatgctgccattgtttgatatggttcctgggcaagcccatgtgttgttgagagcttctcaagactatccaccttttgggtcgctttgctggttcgtgataatgaggacagacagttgcggttgggtgtcaatcaaaagcagtggacaaaaaaggctgctggagctcattgatgccccaggacacagagactttatcaaaaacatgattacagggacatctcaggctgactgtgctgtcctgattgttgctgctggtgttggtgaatttgaagctggtatctccaagaatgggcagacccgagagcatgcccttctggcttacacactgggtgtgaaacaactaattgtcggtgttaacaaaatggattccactgagccaccctacagccagaagagatatgaggaaattgttaaggaagtcagcacttacattaagaaaattggctacaaccccgacacagtagcatttgtgccaatttctggttggaatggtgacaacatgctggagccaagtgctaacatgccttggttcaagggatggaaagtcacccgtaaggatggcaatgccagtggaaccacgctgcttgaggctgtggactgcatcctaccaccaactcgtccaactgacaagcccttgcgcctgcctctccaggatgtctacaaaattggtggtattggtactgttcctgttggccgagtggagactggtgttctcaaacccggtatggtggtcacctttgctccagtcaacgttacaacggaagtaaaatctgtcgaaatgcaccatgaagctttgagtgaagctcttcctggggacaatgtgggcttcaatgtcaagaatgtgtctgtcaaggatgttcgtcgtggcaacgttgctggtgacagcaaaaatgacccaccaatggaaagcagctggcttcactgctcaagtgattattcctgaaccatccaggccaaataagcgcccggctatgcccctggtattggattgccacacggctcacattgcatgcaagtttgctgagctgaaggaaaagattgatcgccgttctggtaaaaagctggaagatggcccctaaattcttgaagtctggtgatgctggccattggttgatatggttccctggcaagccccatgtgtgtttgagaagcttctcaagactatccacctttgggtcgctttgctgttcgtgatatgagacagacagttgcggtgggtgtcatcaaaagcagttggacaagaaagctgctggagctggcaaggtcaccaagtctgcccagaaagctcagaaggctaaatgaatattatccctaataccctgggtttgtcgcctctacctataaatcttcccactattttgctacatagacgggtgtgctcttttagctgttcttaggtagctcgtctggtttcgggggtcttagctttggctctccttgcaaagttatttctagttaattcattatgcagaaggtataggggttagtccttgctatattatgcttggttataatttttcatctttcccttgcggtactatatctattgcgccaggtttcaatttctatcgcctatactttatttgggtaaatggtttggctaaggttgtctggtagtaaggtggagtgggtttggtactgttcctgttggccgagtggagactggtgttctcaaacccggtatggtggtcacctttgctccagtcaacgttacaacggaagtaaaatctgtcgaaatgcaccatgaagctttgagtgaagctcttcctggggacaatgtgggcttcaatgtcaagaatgtgtctgtcaaggatgttcgtcgtggcaacgttgctggtgacagcaaaaatgacccaccaatggaagcagctggcttcactgctcaggtgattatcctgaaccatccaggccaaataagcgccggctttgcccctgtattggattgccacacggctcacattgcatgcaagtttgctgagctgaaggaaaagattgatcgccgctgcttgaggctctggactgcatcctaccaccaactcgtccaactgacaagcccttgcgcctgcctctccaggatgtctacaaaattggtggtattggtactgttcctgttggccgagtggagactggtgttctcaaacccggtatggtggtcacctttgctccagtcaacgttacaacggaagtaaaatctgtcgaaatgcaccatgaagctttgagtgaagctcttcctggggacaatgtgggcttcaatgtcaagaatgtgtctgtcaaggatgttcgtcgtggcaacgttgctggtgacagcaaaaatgacccaccaatggaagcagctggcttcactgctcaggtgattatcctgaaccatccaggccaaataagcgccggctatgcccctgtattggattgccacacggctcacattgcatgcaagtttgctgagctgaaggaaaagattgatcgccgttctggtaaaaagctggaagatggcccagattctgaagtcctgtgatgctgccatgttgataggttcctggca

SEQ ID NO: 158220 - DNA, 362 bp, Homo sapiens
  misc_feature (1)...(362): n = a,t,c or g
agaacatatggtaaggggccgccctccnnnnnnnnnncgccgaaaagtgggcccgtaacatgcccttcttcccggatttgcagatgaccgaccaggtgtccctgctacgcctcacctggagcgagctgttcgggctcaacgcggcccaatgctctatgccgctgaacgaggctgccgttgctggccgccgccggcctgcaggcctaccccatgtctgccgaccgcagggtggccttcatggaccacatccgtattttccaggagcaggcggagaagttcagggcgctacacgtggggtcacccgagaaacagtgcctcaaagccatcgtgctgttcacgtctaacacctgggggcgtggcgg

SEQ ID NO: 158221 - DNA, 384 bp, Homo sapiens
  misc_feature (1)...(384): n = a,t,c or g
ncatttccatttcattagttcatttcatcaattaaattcatcatgtcatttaatttcacctcattatttcattttttcatttcattaggtcagttcatttcatctcattacatttcgtctaagttcatttcatctcatttcatgtcatcagttcagttcatctcatcttttcatctcatcatttcatgggatcatctcagcaactcttttcatcggatcatttcatcatttcatgtcatcgcttcatgtcgtatcttctcaggtcagttcaatttcatttcaatatttcatttcattatttcaggtcatctcatctcatcacctcatgtcatcacatctcatcatgtaatcaaaatagttcatcatctcaacatttcatctcat

SEQ ID NO: 158222 - DNA, 450 bp, Homo sapiens
ttctcccttccctgaacacaaggaagtcaccagtcaccaccacccggcagcctcacacgctgcccacacctgctgcccagggcggggaggtgaggctggagggactggcagcctgtgtctgctggggcagggacacaccagggagcctgctgctctgaaggactggccagggggacggcccgaggggcacaaagtgagatcagacccacctggacggcctgcatccagcactgtccagctcaaggggctcagtggggagagggatgggtgcccacccctgaggagaggaccaggcccccacagggcagagggctcaccatccagagccctgcgcccacccgggacacggggtaacactgccacccgcacaccagtctccagtgggatgagggctgcctcgtgccaagcttggcgtaatgaggttcggagtctcatggtccaggcccccgc

SEQ ID NO: 158223 - DNA, 448 bp, Homo sapiens
  misc_feature (1)...(448): n = a,t,c or g
gtctcgtgtgcccctggctatgtgctgaagggccaggccagcatcaagtgtgtgcttgggcacccctcgcattggagtgaccccccacccatctgtagggctgcctctctggatgggttctacaacagtcgcagcctggatgttgccaaggcacctgctgcctccagcaccctggatgctgcccacactgcagctgccatcttcttgccactggtggcgatggtgttgttggtaggaggtgtatacttctacttctccaggagacgagagaatatgaagtctccatctaggtgggggcagtctagggaagtcaactcagacttgcaccacagtccagcagcaaggctccttgcttcctgctgtccctccacctcctgtatataccacctaggaggagatgccgccaagcctgtattgcggccgctctnnnnntccaagcaacgtgcgg

SEQ ID NO: 158224 - DNA, 531 bp, Homo sapiens
tttttttttttttttttccaaaaacaccattttaataaggaaacaacagaaataaaagattgttctctggctggagcccagaccccatataatacattacatgtacaaagtggctttcagccagctcctgggcgtctccctggggctctcctaccacctgttccatgccaaattcctgggtccttggactactggctcctctccaggaatatgcccaccccctccccttatcccataacacagtgggtcaagagggagagcctgacaagtgggctgggaattgggaggaggggactattaggggtgaaggatgtttgcaacagcttaaattaaacatcgggagggaaagtctccctttccttcagggtattaggggtgggtcagtgggaaaatgggcgtgttcctgctttgggtgtgggagcatgagtgcccaggggaagcccaacctgaggtgggggtagggtccccctgaaccccttaggatctcctaaaattactgcctccactgggacagggcaggaggcagaactg

SEQ ID NO: 158225 - DNA, 1661 bp, Homo sapiens
cctcccccccaagtccccttcaccggtttggccagccaggacagccgccctgtctttccaagccccactccagccatggctgcggtacccactcagccccagtccaaggagggaccctggagtccggagtcagagtcccctatgcttcgaatcacagctcccctacctccagggcccagcatggcagtgcccaccctaggcccaggggagatagccagcactacaccccccagcagagcctggacaccaacccaagagggtcctggagacatgggaaggccgtgggttgcagaggttgtgtcccagggcgcagggatcgggatccaggggaccatcacctcctccacagcttcaggagatgatgaggagaccaccactaccaccaccatcatcaccaccaccatcaccacagtccagacaccaggcccttgtagctggaatttctcaggcccagagggctctctggactcccctacagacctcagctcccccactgatgttggcctggactgcttcttctacatctctgtctaccctggctatggcgtggaaatcaaggtccagaatatcagcctccgggaaggggagacagtgactgtggaaggcctgggggggcctgacccactgcccctggccaaccagtctttcctgctgcggggccaagtcatccgcagccccacccaccaagcggccctgaggttccagagcctcccgccaccggctggccctggcaccttccatttccattaccaagcctatctcctgagctgccactttccccgtcgtccagcttatggagatgtgactgtcaccagcctccacccagggggtagtgcccgcttccattgtgccactggctaccagctgaagggcgccaggcatctcacctgtctcaatgccacccagccctttctggggatttaaaggagcccgtctgcatcgctgcttgcggcggagtgatccgcaatgccaccaccggcccgcatcgtctctccaggcttcccgggcaactacagcaacaacctcacctgtcactggctgcttgaggctcctgagggccagcggctacacctgcactttgagaaggtttccctggcagaggatgatgacaggctcatcattcgcaatggggacaacgtggaggccccaccagtgtatgattcctatgaggtggaatacccgcccccgcccccgcccctacaaccgcattaccatagagtcagcgtttgacaatccaacttacgagactggatctctttcctttgcaggagacgagagaatatgaagtctccatctaggtgggggcagtctagggaagtcaactcagacttgcaccacagtccagcagcaaggctccttgcttcctgctgtccctccacctcctgtatataccacctagggagggagatgccaccaagccctcaagaagttgttgcccttccccgcctgcgatggcccaccatgggcctattttcttggtgtcattgcccacttggggccctttcattgggccatgttcagggggcatctgacctgtggggaagaacatagctgggagcacaagcattcaacagccagcattccttgagcctcctcatgccctggaccagcctggaacacactagcagagcaggagtacctttctccacatgaccaccatg

SEQ ID NO: 158226 - DNA, 342 bp, Homo sapiens
ggcacgaggaaagtcttatgttggccagttccttccttggatgtctgagcgaccattcttccttagcaggaccctagcactgtcacagacctggagtccattgtagtaatttgttttatttcctaccaaggtttatgaaggcgagcgtgccatgacaaaggataacaacctgcttggcaagtttgaactcacaggcatacctcctgcaccctgaggtgttcctcagattgaagtcacttttgacattgatgccaatggtatcctcaatgtctctgctgtggacaagagtacgggaaaagagaacaagattactatcactaatgacaagggtaaggaggcact

SEQ ID NO: 158227 - DNA, 335 bp, Homo sapiens
aacttctgcacgagggaagatcaccagtacgcgccattggaccctaaacacgggcacctcccaccccgcatgccgcccagcgagaggctgatggctgcagaggccgccttctacagcccaccgtaccacgacaggcccacgaacagtgaaggctgggagcataccggcctctatgaatccttccgagcaaaactgcggtccccgcggaggaaaggcccggagaagaggaacagcggaccctcgaggtctcgaaacagatccaagagccgaggacgatcctcctcacgttccaactcaagatcctcctagtcttcaggctcgtactctaggtcaag

SEQ ID NO: 158228 - DNA, 501 bp, Homo sapiens; identical to SEQ ID NO: 157703

SEQ ID NO: 158229 - DNA, 633 bp, Homo sapiens
ggcacgagtggaagcgaatgggttgggcctccagcgtagcatactgacacctacccccacccccacctgatcgccagacctcagggttttccggagctgaagaatgacacattcctgcgagcagcctggggagaggaaacagactacactcccgtttggtgcatgcgccaggcaggccgttacttaccagagtttagggaaacccgggctgcccaggactttttcagcacgtgtcgctctcctgaggcctgctgtgaactgactctgcagccactgcgtcgcttccctctggatgctgccatcattttctccgacatccttgttgtaccccaggcactgggcatggaggtgaccatggtacctggcaaaggacccagcttcccagagccattaagagaagagcaggacctagaacgcctacgggatccagaagtggtagcctctgagctaggctatgtgttccaagccatcacccttacccgacaacgactggctggacgtgtgccgctgattggctttgctggtgccccagtaatgtgggacagggcagggactcggggcgcggggagatcactctggaaggtctggggtagacaaaaggaagggtcagtctggcttctgtgacaccatctt

SEQ ID NO: 158230 - DNA, 338 bp, Homo sapiens
ggcacgagcttctacttgtacaggaaaggttacttgagtttgtccaaaggggtgccgatgtctcactatgctgggacattgctgctacttctggcaggtgtggcctgcctccgaggcattgtccgctggaccaacccccattaccggaagaccatgaccataccgtaagcatcacatcgaaaccagtcttctaaataccccaggcatgttgccaactacaactgtgacttccggagctggccagacgacttccactgcgatgaacccattacccggaatgagtctcaagggggccctatacgccggagtgtgcacactgcttctccaaagcccatgcc

SEQ ID NO: 158231 - DNA, 390 bp, Homo sapiens
attctggactgtcatactgatgacagtggaacctaccgtgctgtgtgcaccaactacaagggcgaagcttctgactatgcaacgttggacgtgacaggaggggattataccacctatgcttcccaacgcatagatgaagaggtccccagatctgatttccctgagctgacaagaacagaggcgtatgctgtttcatcatttaagaaaacatctgagatggaagcttcgtcttctgtcagggaagtgaaatcacagatgacggagacaagggaaagtctctcctcatatgaacactctgcatctgcataaatgaaaagtgctgcattataagaaaagtcactggaagaaaaatccacaaccagaaagatcaagacgactttggcggcaagg

SEQ ID NO: 158232 - DNA, 330 bp, Homo sapiens
gggtgaattcggccgaggaggcggaggagcaagccaacaccaacctgtccaagttccgcaaggtgcagcacgagctggatgaggagtagctttgccacattttgatctgctcatccagctcgtgctgcaccttgcggatgaggcagaggagcgggcggacatcgccgagtcccaggtcaacaagctgcgggccaagagccgtgacattggcacgggtggcttgaatgaggagtagctttgccacatcttgatctgctcagccctggaggtgccagcaaagccccatgctggagcctgtgtaacagctccttgggaggaagcagaataaag

SEQ ID NO: 158233 - DNA, 595 bp, Homo sapiens
  misc_feature (1)...(595): n = a,t,c or g
aatgcgtccgcaccggctggacgaagccgagcagatcgccctcaagggtttttttaagcagctgcagaagctggaagcgcgggggcgggagctggagaatgagctggaggccgagcagaagcgcaacgcagagtcggtgaagggcatgaggaagagcgagcggacgccatncaaggagctcacctaccagacggaggaggacaggaaaaaccttgctgcggcttgcaggaccttggtagacaagctgcagctaaaggcccaaggcctacaagcgccaggccgaggaggcggaggagcagagcccaacacccaacctgtgccaagttccgcaaggttgcaggcacgagctggattgagggcagaggagcgggcggacatcgccgagtcccaggtcaacaagctgcgggccaagaagccgtgacattggcacgaaagggcttgaaatgaaggaattagcttttgccacatctttgaatcttgctccacccctgggaaggtgcccagcaaatgccccatgctggagcctgtgtaacagcttccttgggagggaagcagaataaagcaattttccttgaagccgaaaaaaaaaaaaaaa

SEQ ID NO: 158234 - DNA, 1534 bp, Homo sapiens
gcggccgccgcccgcctgcgctcatagactcacgcagccccagtcccgccagtccgccaacacagtagtgccggcccccctctttccctggccctgccccccctccccgcctttggctcgctccgcctttctgccccccacccccacctcacgggtacgggccattcccggccaggaaacgccgtggcgccgcgttgggcctaactcgagtcctgccgtctcccgggagtgccgtgcgccgcagcccgggcccaggccccggcagcgcctgtgacaaggtcttcagaactactagcagataatttggggggacttcatattcagaagtctatataaaggattcctcatgtccataacatgttggatgaggctctgcagctcacccccactctcagagtggtcagtctccattaattggaccccgtgatttccaatctctgctgtgttggacgtcatgagcattgcaatccctctgggagtcaccacatcagatacatcctactcagatatggctgctggatcagaaaaggaagtggaagccccctacctttcaagacgaagtggcactacaccaggatgtgaaagtccagcgaaagagacccaaggggcctagggggcagcacacccccagaagccaagtctattccaggcagtaccacggattatggtctgggctggaaaaatcctggtgttttgaatatgttcaggtccagttcagactcttgatcccacagccacttcttgagagaggtgggggttgctataattaccctgtttctcttgccattttcacaggccctggggattcttcccccttcagcaaagcaaagcaactgtaccagatttctgggttgaatgacatccctgattaataagtggttttcttccttaaaacagaatattattaaagagcatgtatatttcttcataaagccacctaatataacttacctgtttactgagttccttaaagaggaagacttaaagctaccctgagaaatagtatataatattctggggtagtctaaaatgaaaagcagggtttgggcttattcccatataaaaaggaaaaaggagggttgggggtggggaagggttgattttgcttcttctatagcttttttcttcttttgtttttgcttgctttgttttgtttgcatgccaaaaggtatttagttatgtcagtaactgagacttacttaaccattttaccaactctttccccaaataaagtacttaaaactctccctgcattagtaggtagccagtttgtattgtgtttataggtttttataaagtcagctactaacctggtactatgtagattgtctaactgtatagatagatagcattaacatttgtggagaaattttcaacaaagaggttaaaccaatacgtttgggaattgctgggataaaagacccagagcagttaatcttacaattggtgttttccccaaagtatagacatgactgcccgtaaatactgctggggagtctaggactaattccagaaataaaaatacttctggtct

SEQ ID NO: 158235 - DNA, 389 bp, Homo sapiens
atcgcttgaactcgggagacggaggttgtggtgaggcgagatcgtggcttgcactcaagcctgggtaacaagagaaaaactctgtctaaaaaaaaaaacctcagaagacagagacaatgaatttacaaattttctaattgaatgttctaagagacaaaaggaaagaaaaatctcttcctatacttataaaggaggacttatacctctcatttattagcttgtttgagacagggtctagctttttcacccaggctggagtgtggtggcaagatcagagctcactgcagcctccaactttatggatcaagtgatcctcccacataagcaccccaaacagctggaactaaacaacacaatcagaggatagcacaatgcaatgcagacaacaa

SEQ ID NO: 158236 - DNA, 398 bp, Homo sapiens
ttttttttttgagacagtctcactctgtcacccaggctggagtgcactggcgcgatctgagctcactgcaacctctgcctcccaggttcaagcgattctcctgcctcagcctcctgagtagctgggattacaggcatgtgccaccacgcccggctaatttttgtatttttagtagagacggggtttcaccatgttggtcaggctgttctcgaactcctgacctcatgatctgcccacctcagcctcccaaagtgctggggttacaggcgtgagaccactgcgcccagcatgtttctgcagaatctcttagctttggtgccaatgcagcaacgttagtgcaacaagctgcaggagtggctaggccctcagctcagccacccgctggttatgggcagtgt

SEQ ID NO: 158237 - DNA, 1155 bp, Homo sapiens
ttttttttttttttttttgaggtggagtttcactcttgtcgcccaggctggagtgcagtagtatgatcttggctcactgcaacttctacctcccagggttcaagtgattctcctagtctacgactccggagtagctaggacatgaggcacataccaccaagcccagctgatgtgtgtatttagaatagagacggggtttcactatgttggccaggctggtctcaaatgcctgaccttgagtgatccacccgcctcggccctccccaaagagctgggattaacaggtgtgagccaccaggcccggcctccctagattaaatcttgacattttttggatcaagtaagaacccactggagcctttccctggaaaaaaagaacacatactccagtctcacacacaatttcttgggggctcacagaccctcttgaagcctatccataaaaccccctgggtgaagtccccctgcccgatagcctgagggaagacatgtgagtggatatatgtgcactaacaggggcgaagacagacctggatggtctgcaatcccagagagcatgaggcaccatgtcccaaagcttggtatgtggccctgggctcctccccctaattttatctctctgaagaagctgagttttttttttttttttttgagacggagtctccctcttgtcgcccaggctggagtgcagtggcatgatgtcagctcactgcaacctccgcctcccgggttcaagcgattctcctgcctcagcctcctgagtagctgggattacaggtgggcaccaccctgcccagctaatttttgtagcttttagtaccagccggggttttgccatgttggccaggctggtcagcaactcctagcctcaggtgatctgcctgcctcagcctcccaaagtgctggggattacaggggcgtgagccaccacgcccggccacgttctgagttttgaggatccagaaacaaaaggctggaaagcgacacttctacaggtttactgatgaagtccggagaaaatccaaaaacaaagccccactgaggggtttgtgaatttggctgttctcagtggccaggcagagtctctgctccactcttctttcccagctagcagggaagtgaaggcaaagaactgtctcagaaacaagtctctag

SEQ ID NO: 158238 - DNA, 805 bp, Homo sapiens
gtattcagacgaggtttttggtggggtctctaagccgataagatgcatagaatggggggaatgcataataaatgcagggttcattgatatattatttaccgcatgaatcaccttcctcctaaccattataggagccatgtgttcacatgtcatgtggaccagtatttaactgtggaaaccgcgggtggcatggagaaggaggcagtgtccgtgactgtgctgctctccgcagccccctgcctgctgtcctgtttcctcggctcctcggtgtctgggactgggcgttctggggtttcccaggcaggaaaacttaaaggggccagagagggtgttaaaaacacacaccacttgggcaggtgatttgaagatattaaagctagaaattgggaactaggaaaatcaaaaggaatttcaagggcatctttaacgtgacagtttggaactcattttgattgttactttaaaaaagtttattgcagttattgactctcaattttttttttttttttttttgagggcaggggggccattgtggctaatgtgagcctcaattttccgggctcaaaaaaaccccccccctcactttccaaagaaccgggaacaacaggggccgcccccccccgggaaattttttttcccccaaaaaaaacaaggcttggttttgccctccacccggggtccccccctcccccgggtccttgggccccactttggtccaaaggggaaaaagttggaattttaaaaaaacacaaagtgggccgggggcgggggttcagccctgtatccccacctttttgaaagcccg

SEQ ID NO: 158239 - DNA, 340 bp, Homo sapiens
  misc_feature (1)...(340): n = a,t,c or g
ggcacgagccaagtgttaactctaactattgcagaggtctaatgaaacctaggatgagtgggctgcaaatgatgcaaacatactgaagcaaaaagaatgccctgtgcagaagactatctatccgtggtccatgaacagatatgtgtagcgcatgagaatacgccagtaagtgacagagtccccatacgctgcccagaatccttggcgataagactaccatgcttttcagctctggaagtcgatgaaacatacggtgactaagagtataatgctgaagcattcaccttacatgcagatatatgcacactatctgagaaggagagacccatcaagaaacaan

SEQ ID NO: 158240 - DNA, 354 bp, Homo sapiens
  misc_feature (1)...(354): n = a,t,c or g
tgattgaatccagcctccatcaagtggaaagcatgcacggagcagggaatgccaagaagaattggcaacgattcaggagcatttcttttttgcaacatttcacccactcaaggattattgtctagaggtactaatttggttgaagcagataaccaagcagagtggaccgatgttcagaagaagattatcccatggaacagtcgtgtttccgacttaggacctgggagctcctgtttcaggatcgtgctgccagacttgggaaagtcaattagtaggactcattcgttgtgggccttcgcttcattcggacaaaccgaccaattttagggagggantgtggcagggacctgtgga

SEQ ID NO: 158241 - DNA, 926 bp, Homo sapiens
cttatggtgaagaaaatcttaaaacaagcatttgtacgtttttagcagttttatcacatttagacattattactcaaaatattccagaaaagaaactaattctgaagcaagcccttatagttgtgctgcagtggtgtttcaatcacaattttagtgttcgactgtatgctttagttgctcttaagaaactctggactgtgtgtaaagtgttaagtgttgaagaatttgatgccctgactcctgtgattgaatccagcctccatcaagtggaaagcatgcacggagcagggaatgccaagaagaattggcaacgcattcaggagcatttcttttttgcaacatttcacccactcaaggattattgtctagagaccatattttacatccttccacgcctttcaggccttattgaagatgaatggatcaccattgataaatttaccagattcactgatgttcctttagctgcgggatttcagtggtacctttctcaaactcaacttagtaaactaaaaccaggtgactggtctcagcaagacataggtactaatttggttgaagcagataaccaagcagagtggacccgacgttcagaagaagattatcccgtggaacagtcgtgtttccgacttagacctggagctcctgtttcaggatcgtgctgccagactttggaaagtcaattagtagactcatcgttgtggcctcgctcatcgacaaaccgaccaatttaggaggactgtgcaggacctgtgaggtatttggggcttcagtgctcgttgttggcagccttcagtgtatcagcgacaaacagtttcagcacctcagtgtctctgcagaacagtggcttcctctagtggaggtaaaaccacctcagctaattgattatctgcagcagaagaaaacagaaggttataccatcattg

SEQ ID NO: 158242 - DNA, 360 bp, Homo sapiens
tggcaacctgctccagcgatcagagcgttaaggtctgggataaaagtgaaagtggtgattggcattgtactgctagctggaagacacatagtggatctgtatggcgtgtgacatgggcccatcctgaatttgggcaggttttggctttctgcacttttgaccgatcatctgctgtatgggacgaaatattaagcgaatccagggacaacttgtgaggacatacccactgtgttaagaggactactctggaggatagcatagtatctgctacttgtgtgtagtcttttctctctcatgtgggtattatgctattatcctgtggtactttttttcctgcatgtatttgtggagttttccctg

SEQ ID NO: 158243 - DNA, 305 bp, Homo sapiens
ccctgtaatcccacctactcaggagcctgagacaggagaatcgcttgaatccgagaggcggaggttgcaatcagccgagatcaggccattgcactccagcctgggcaacaagagcgaaactccatctcaaaaaacaaacaaacaaaatgctagcaaatctaatccagcagcacatcaaaaaggtaatccaccactatcaagtaggctttacccctgggatgcaaggttagttcaacatatgcaaatcagtaagtgtaatttatcacataaacagaaccacccacaaaaacgtcgccgcggccgcg

SEQ ID NO: 158244 - DNA, 217 bp, Homo sapiens
cggccgcgtcgacgatgccgatgagtttcgagtggcagagacagtaacgcttcccacccttctatacgttacaaccgaatgtgaacactcggcagaagcagttgaccgcatagtgctcgctggtcctgtccttatgccgcctgcacaaacagtccagcatgacgttgataaaaactcggctgacctcagactccatcaccgtcatgctggactgttt

SEQ ID NO: 158245 - DNA, 351 bp, Homo sapiens
  misc_feature (1)...(351): n = a,t,c or g
agattatgagatgacaacacttttgggagaggttccatgtgacaaaagatagaataaacacagttgagagacaagaaacagattggaagatttttgcaacatacctaatgaaaaaagtataaatatccagaaaatgctacaactcctacaaattagtaaggaaaaaacaactcaatagaaaatgggcaaaagaaaagaacaagcaatcacagaaaaagaaacaaagtggccagtaaacaaaaactgttcaacctcagtaaaataagaggaatgcaaactaaaggtactatctctcacccatcagtttagcaaaaagcaataaattaaattattaatcagtacgtattagcn

SEQ ID NO: 158246 - DNA, 331 bp, Homo sapiens
ggattgatagagatattagtaatttatgtaagtgatacacctgtaaaatgagatgtttaaagtgatatttttgaacaataagcatatgggaaaatagatggaggaaatgatgtatgtgatctacaatcatctgaaggaacgaataccaaaatgaaaaataatgaagaaatgatgatcggagaggcaatggatgaaactggtcatgatggtgaaacagagaatgagggcatatctaccaaaacttcaaagcctgatgaagctgaaactaacatgttgattgcagaaatggacacttttgtttgcgacacagttgaaatgagcactgaaggta

SEQ ID NO: 158247 - DNA, 338 bp, Homo sapiens
  misc_feature (1)...(338): n = a,t,c or g
aggaatacaggtgccctccaccacgccaagttaagtctggttttatctgaatgtcaactccagnnnnnnnnnnnnnnnnnnnnnnnnnnnnnnnnnnnnnnnnnnnnnnnnnnnnnnnnnnnnnnnnnnnnnnnnnnnnnnnnnnnnnnnnnnnnnnnnnnnnnnnnnnnnnnnnnnnnnnnnnnnnnnnnnnntcctgactttaaactaaaggagtgagactagaaggtccctgtgattctgaattatgtggcttcctctggaatttctaggttttccccttgatcccagcagggttgtactgcctaagagagcttggaaagggatagagaagtctg

SEQ ID NO: 158248 - DNA, 373 bp, Homo sapiens
atatgttggcaggctgctctcgaactcctgaactcaggtgatccacccactgcagcctcccaaagtgctgggattacaggcgtgcacacaatgcccagcctttcctgactttaaactaaaggagtgagactagaaggtccctgtgattctgaattatgtggcttcctctggaatttctaggttttccccttgaatcccagcagggttgtactgcctaagagagcttggaaaggggatagagaagtctgacccaaatttgcggagcgactgagtgtatgctgccccctttctgggccttggcttcttcctcaatcatctaggcacagtcctatggactgcctgtttttgagggatgtggggaagggtctgcaaa

SEQ ID NO: 158249 - DNA, 358 bp, Homo sapiens
  misc_feature (1)...(358): n = a,t,c or g
gtccactgtcttgtaccagacctccttcagagcaataacaacccatgttactggggagtgatggataaatacgcagccgaagcactactggaaggaaaaccagagggtacctttttacttcgagactcagcacaggaagactatttattctctgttagttttagacgctatagtcgctctcttcatgctagaattgaacagaggaatcacaactttagctttgatgcacatgacccctgagtcttccattctcctgacattactgggctcctagaacattataaggacccaagcgcctgaatgatctttgaaccacttctatccactcccttaattcggactttccctttttgcctgn

SEQ ID NO: 158250 - DNA, 481 bp, Homo sapiens
attcttccaaacttaggataaatgctaaaaacattaaccatacaagcaaagattaaattagcctatattaatcataataactgtttatcgcacatgtaccccttaacctaaaagatgaagaagaaaataaaaaataaaataaaatttgaagaaaatgttaaacaaaaatgaaaccataccagtactagaagaaaaatgggtgaattcctctttaacctaggcaaaggaaaggcttctctggctcccaatctggatttaattaatcctaaagtttgtatagaatcacaaaatacctcaaatagccaaaacaatcctgagcaaagagaacaaagctggaggtatcacactaccagatgccaaaatatcctgcaaagctgtagtaaccaaaacagcattatactggcatacaaatagacatatagagcaatggaacagaatagcgaacacagaaattaatccaaatatctgtaaccaactgatt

SEQ ID NO: 158251 - DNA, 315 bp, Homo sapiens
gtgaaagccaaagctaaaaagctgcagatccagcccatccagctggaattgctgtactgttcgtacgatatgcaggaggaggacttcgcgcatagggccatggactatttccccaagattgagaacaatctctccaccagaatggaccacatggtttcttccttttgcattgagaactggcatcagttggagtcactgtccctgctgatactacataacatgccccactatgaagaggatgaggaatttgaaggcctacgccttgacatggtgcagtgacgacttactagctgctctgatgctggctgacattat

SEQ ID NO: 158252 - DNA, 415 bp, Homo sapiens
catcatcgctgtcactatcactatcatcttcggtctcagtcactttcggttttggtacaccattttcagcagtttcatcttcaattccagatggaggattagcactggcattttcttcttctggcctttcaacttcattttcatcgccatagagccactcttcctcctcatcccctccggtcccgccgctcagctccgacactaggcgctcgacctcgccggccgacatggccgccccgagcgcaacttaaacgcggcgatcaacagccccctccaaccccttccccagcctcgcagccccgaggcgcgagaagggcgggaacccgccgacgaacgaacgaagaaagctcgagactccaatcccaggaaggcgacggcagcggcggcaaagatgaagcctccagcgcagacgaca

SEQ ID NO: 158253 - DNA, 344 bp, Homo sapiens
ggcacgagcatgaatgctatgccaaagtgctctatgaattgaaacctgttggggaagagcctcagaatgtaagcaaacaaaattgtgatctttttgagcagcttggacagtacgaattctaaaatgcgctattagttcgttacaccaagaatgtaccccaagggacaactccagctcttggacaggtcttaagaaacctacgaaaagtgagcagcaaatgttgtaaacatcctgaagcaaagacaatgccctgtgcagaggactatctatccgtaatcctgaaccagttatgtgcgttgcatgatagatctgctgtaagtgaccgagtctccagatgctggaca

SEQ ID NO: 158254 - DNA, 413 bp, Homo sapiens
agagcaggatacagacaaaaatgggggagtttggccacagtcattggccaacttgggctccccagtggagaggggctggtatggccccagcgacgacgggagggacaccgcaacgcccattgctcagagctggttctagatgatttacacgtaatcactcaaaatagagccaatcacaggcccaggtgtggtggctcactcctgagtgagctgaaattcgcgccactggcactccagcctgggcgacagagcaagactctgtctcaaaaaaaaaacaaacaaacaacaacaaaaaaaaacacaaaaaaacagccgggctcagtggctcatgcctgtaatcccagcactttgggaggctgaggcaggcagatcaccttgccatcaggagttcgagaccagccgggccaacatgg

SEQ ID NO: 158255 - DNA, 363 bp, Homo sapiens
  misc_feature (1)...(363): n = a,t,c or g
gaccaagagtccaggcccccagtgtcctcaggcnctgcctcagattggaaccaggacagggccagaggcagagggcagggaggctgtgagacacgggacagctcagagcagtcacagggcacaaatggccagccgccagcagaagcttcaaaggacagctggtccagcggagggaagatggccaggtgagcccccagcccccaaaggcaaaaagcaggatatccagggtccccaagtccccaaccagcacctgctagtatgagatccctggggccacctcaattccaggagccacctcaggctctatttcctctggaagttcctattccatcaccacacaccaggaacaaaatggctcgtgcc

SEQ ID NO: 158256 - DNA, 354 bp, Homo sapiens
ggcacgagagagcatttctcttgaataatagttgtttcctataggcttttgacccttatcaatgtgatagatacctttttaagatagttacagatgtttattatacaccttatgttcttatctactacatatgagcccccttgcctctattacttcagctcactcatactcattttctctctctcttcttcctataagtactcaatatctatgctcttgtctatctgtccacagctctgcctctttccctttttatctctatctcatctcctagatattctctatgtctcttctttcatttcctttctctcatgctattcctctcttctctttcgatgtactgctcacattatt

SEQ ID NO: 158257 - DNA, 337 bp, Homo sapiens
ggcacgagtggcccctctgaaaggagtacaggaacaggaggttcggcatgagggggaagttacaaagcctgagaaagagaagggtgaggagacaaggattgagaatgggaagcttattgtagtatcagactcttgtggaagagtatatgtatctgggaaaatatattatcccatgtaggcttataatgatggtctcatcttggaaaggtatcagatcatgcccattgacatcattgtctcttatgtgtttatcatgatatgcttagattaatcttttgtgtctgatcctatattatttttatctcattataggtgtctattcttatggtcgtttatg

SEQ ID NO: 158258 - DNA, 350 bp, Homo sapiens
caaggacatccgtgtcggacacaggcaaaaccgagctcttcctccacaagcctctcctcccacggttgccccagggcagccaacggccttgcctcccacgggtcactcaggcccaaccatgggctggccaagccgcctctctcagctctccctgatcactgctcccacctccgccagtcccactgtggtcaagctgccatctggggcctgctggcctctcagctccacctttgcctcttctcctctgtccttggtgcagtgaccttgaaactctgactcagatcatgccacctctgcaatggctcccagctcagagtccagggaatgtctctccccatggcccgcaaggc

SEQ ID NO: 158259 - DNA, 376 bp, Homo sapiens
ctcacactgtctggagcccaaggacatccgtgtcggacacaggcaaaaccgagctcttcctccacaagcctctcctcccacggttgccccagggcagccaacggccttgcctcccacgggtcactcaggcccaaccatgggctggccaagccgcctctatcagctctccctgatcactgctcccacctccgccagtcccactgtggtcaagctgccatctggggcctgctggcctctcagctccacctttgcctcttctcctctgtccttggtgcagtgaccttgaaactctgactcagatcatgccacctctgcaatggcccccagctcagagtccagggaatgtctctccccatggcccgcaaggcctcgtgcc

SEQ ID NO: 158260 - DNA, 381 bp, Homo sapiens
cggacgcgtgggcgcccgcccctcaccacccctctggcctcatctcctgctcagcccagccactctgagcacactggcctccttgctgttcctctcacccctataaagctccccaaggcccctccttccctgtgtgtctccatgtctgatttctcacctctttgaagtctgctgaagtgtcactgaccaccctatttacaattgtaacctgtcccccagccctaaccctggcccttctgacccctctgaccctgtcctaccttttgttgtcatgactgattaccttctgccatgatgtgtcatttgctgttgtttcttgtcagatcctccacactgctccccccaccccgtaggtggctctttttttggaattaattaatt

SEQ ID NO: 158261 - DNA, 344 bp, Homo sapiens
aacagtggaagagtaggatcaggcaatctgatttctccactcccacctggtcctcccggtccaaggcctctggaggaggcaactccggtcctgctttctcagggcattccggaaagagaagactcattcaggaatttgaggactgatctctacatacaccagctgaagtcctaagacagccctgagatctctagcctctgtcagggagaggaggcaaccccaagacacagtgacaagcacaattcatagaatgctgcttctgaggggaaaggctgtggttttccaagcccaaccatggaggttgagatcgcctcacatgacgaggaggatgtaatccattcagc

SEQ ID NO: 158262 - DNA, 535 bp, Homo sapiens
  misc_feature (1)...(535): n = a,t,c or g
catgaccctataccggcctcgatccccgatcgacccacgcgtccgatagaannnnnnnnnnnnnnnnnnnnnnnnnnnnnnnnnnnnnnnnnnnnnnnnnnnnnnnnnnnnnnnnnnnnnnnnnnnnnnnnnnnnnnnnnnnnnnnnnnnnnnnnnnnnnnnnnnnnnnnnnnnnnnnnnnnnnnnnnnnnnnnnnnnnnnnnnnnnnnnnnnnnnnnngaatgaatgaataagtaagtgaataagtagaaataaataagcactggacaagggacacagacaaaatgtgtagaaggaaaaaagtgttaggttgaatcatatacagttgctatttttgtaagttaaaagtgatgaccgaatagacctataacaggtgaagttactacaaaaaacctcacaaagaaaagcctgagaccagatggtttcactgatgaattctgttaaacatttaaagaaggatttataccaactcttctaaaaacagttaaggagggattacatcccaccttcctctatgaggccagtataactttgn

SEQ ID NO: 158263 - DNA, 322 bp, Homo sapiens
  misc_feature (1)...(322): n = a,t,c or g
cgcacgctgaggaggatcggcggccggtgagggggaagcaagtctggtctctgtgattgaagaagtcggctctgtgctccagtgcgtgaatcacacacatacctcataatgccgggtctatgttgttgattttttctttattatattttctttggcttctttttttctgttgttttctgtctcttgtctttttattctccgtttttttcgtttgtttcttccgtttcgttcgtgtaattctgggtatttannnnnnnnnnnnnnnnnnnnnnnnnnnnnnnnnnnnnnnnnnnnnnnnnnnnnnnnnnnatcttatttattt

SEQ ID NO: 158264 - DNA, 366 bp, Homo sapiens
  misc_feature (1)...(366): n = a,t,c or g
cggacgcgtgggaaaaaaaaatctgtgaaactgaagactggctatttgaaattattcatcagaggattnnnnnnnnnngaatgaaaagaaataaagaaagcctacaggatgtataaaacaccatcaagagaactaatataaggattattggagtcataaaggagaagagagaaaagggtagaaaacttatttaagaaataatggctgaaaactctccaaatctaggaaaagatatgagcatccaggtatatgaagctcaaagatccccatacaggatacattccaaaaagacttcaccaaaacacatgataatcaaactgtcaaaagcaaaatcaagacgatgaataaaccaccaatcactaagag

SEQ ID NO: 158265 - DNA, 320 bp, Homo sapiens
cgcacatggtggcaggcgccgtggcagggatcctggagcactgcgtgatgtaccccatcgactgcgtcaagacccggatgcagagtctacagcctgacccagctgcccgctatcgcaatgtgttggaggccctctggaggattataagaacggagggcctatggaggcccatgagggggctgaacgtctcagcatcatgcgcagggtctgcctacgctctttattttgcttgttccgattagttatttctatgtcgtgtgatgttaccatcctggcgtctcttatctgtgtcgtctatgtggtttctggctgttttcctt

SEQ ID NO: 158266 - DNA, 355 bp, Homo sapiens
agtggcctcaggacggaggaaaaacctcctttccaaagtgactggtctggaagttccagagggaagtacaccagatcgtccctgctcagggagacagagtctaaatcctccagttacaagttttccaaatcccagtcagaggaacaggacacctcctcctaccacgaggcaaatggcaactctgtaagaagcacttcacggatctcatcttcctccaccagggagggcagagagatgcacaagttctccaggtccacgtacaacgagacctcaagtttccgacaggagagcccagagccctacttcttacgtcggaccccataggccttagaaggggaccaaggccctaaacctg

SEQ ID NO: 158267 - DNA, 356 bp, Homo sapiens
  misc_feature (1)...(356): n = a,t,c or g
cgaagccggagcgcatacttgaatcacaatgaataaacagcgcctgttaaaagaaactgtggacgacacagtagaagtgagcgatttcactgtaagcagatccaatgctcatgaggcatttaacacagcttttaccacgcttgctgcttgcgcggccagtatcggttaggtacttttgtacctatatctgactacatgcccctgctagtgtaaaaccaagagacagaataatatgctacaccaaagcaatgccaattcatcgattctcagacctggccccgctagtgatgcctccgctgatgaacggaatgcatgtgcacgtaaaagagcggtgcttttggaacccctgaaggatn

SEQ ID NO: 158268 - DNA, 264 bp, Homo sapiens
cggagtgttggtacacaaggcacatgcccccacacccagcacagtgtttcttttataattatgcctggaatttgtatttcttcccatacagataccttcacttgctggatggaaatgaaaattacccgtgtcttgtggatgcagacggtgatgtgatttccttcccaccaataaccaacagtgagaagacaaaggtagggtggcatgtgtgtgaacatggtgtgtcttctaggctgttccctgtagaattaacacaagtctgcg

SEQ ID NO: 158269 - DNA, 386 bp, Homo sapiens
ctagaacaaatgttgcagttgctgatgtctacatttgataactgttcttttctgaaatgtttttttcttttaaggttaagaaaacgacttctgatttgtttttgaaagtaacaagtgccaccagtctgcagatttgcaaggatgtcatggatgccctcattctggtgagtgtggggtggctcctcctgagaaacgcttttgagcgtgagtggtgctctgctccttgacttcccacccgtcctgcttgcctcttttttgcttactgtgttggcagacagcagcatgtcttccctgggtcacctctcatctccaggttaaaaaggtattttttatttgcagaaaatggcagaaatgaaaaagtgctctttagaagataaagaggaagg

SEQ ID NO: 158270 - DNA, 771 bp, Homo sapiens
ctgcagctggaggccgaggagcagaggaagcagaagaagcggcagagtgtgtcgggcctgcacagataccttcacttgctggatggaaatgaaaattacccgtgtcttgtggatgcagacggtgatgtgatttccttcccaccaataaccaacagtgagaagacaaaggttaagaaaacgacttctgatttgtttttggaagtaacaagtgccaccagtctgcagatttgcaaggatgtcatggatgccctcattctgaaaatggcagaaatgaaaaagtacactttagaaaataaagaggaaggatcactctcagatactgaagccgatgcagtctctggacaacttccagatcccacaacgaatcccagtgctggaaaggacgggccctcccttctggtggtggagcaggtccgggtggtgggatctggaagggagcctgaaggtggtgtacccgtccaagggccgacctgggccactgcccctccccacgtgactgtcgtgcgctgacgccaggggccgcctgtccgcgtttgtttgggccggttttgcggaggtttctatgcgggcaatgctgaaattatccgttagattttcaccccagtttttttgttggttttttttttttgagatggagtctcgctctgtcgccaggctggagtgcagtggcgtgatctcgaatcacttgaacccaggaggcagaggttgcagtgagctgagatcacgtcattgcactccatcctgagccacaagagcaaaactccgtcttca

SEQ ID NO: 158271 - DNA, 340 bp, Homo sapiens
gcacgcgagcgtaactaactctcaggatctaagctaccaaacctgcataacctattttggtttacagacctgatgtggacccataggtggccaaagactatgccagcttccggaactacacgtaaggtcccctcctggaccgtgtcttcaccacctactagctcatgcacactcaccagacagtggacttcattaggagcaggcatgcccagtttgggggcttctcctacgggaaaatgacagtcatggaggtcgaggacctgctggatgggctgatggatgagtcggacccggacttaaatttcctcaaatccttccatgcctaaaagatagcgtatgg

SEQ ID NO: 158272 - DNA, 1352 bp, Homo sapiens
atggcctttataagaaagaaccagactgacttaatagagctgaaaaatgctctacaagaatttcataatgcaatcacaagaattaaccgcactgtgggaggccaaggtccatccggcgatgctgggtctggacgagctcgggaggagtggttgtggccattgcacacaggcggatctgaggttcggcgacgccgctggtcgcgacccgggacaggacaacgacaggaacaccgccgagcccgcgttcccccccccgcccagagtcatggcggcagcagccgctctgagggcgcctgctcagagcagtgtgacctttgaagacgtggctgtaaacttttccctggaggaatggagtcttcttaatgaggctcagggatgcctgtaccatgatgtgatgctggagaccttgacacttatatcctccctgggtaagcgtcagacacttcacactagagaaaggccttatgagtgtattgaatgtgggaaagcctttgctgaaaagtccagtctcattaaccacaggaaagttcactctggagcaaagcgttatgaatgcaatgaatgtgggaagtcctttgcttatacatctagtctcattaaacacaggaggattcacactggagagaggccttatgagtgcagtgaatgtgggagatcctttgctgaaaactccagtcttattaaacacttgagagttcacacaggagaaaggccttatgaatgcgttgagtgtggaaaatcatttcgccgaagctcttcactcttgcagcatcagagagttcacactagagaaaggccttatgaatgtagtgaatgtgggaaatcctttagcttaaggtccaacctcattcaccatcagcgagttcatactggagaaaggcatgagtgcgggcagtgtgggaaatcctttagccgaaaatctagccttattatacatctgagagttcacactggagaaaggccttatgagtgcagtgactgtgggaaatcctttgctgaaaactccagccttattaaacacttgagagttcacactggagaaaggccatatgaatgcattgattgtggaaaatcatttcgccacagttcttcgttccgtcgccatcagagagttcatactggaatgaggccttataagtgaagcaaattttggaaattctcttgcccaggctttttgctccttcaaggccagagagttcacaccggatcaaggtgttatgagtgtgacaaatggggaatattctttagctagaatgctagcttctttacataaaagagtgctcccactgaagaagtgccttttgagtgcaatgaatgtgagaaagccttcagccctctctcattggttacca

SEQ ID NO: 158273 - DNA, 353 bp, Homo sapiens
caatcttctttaccaattttggatccatacagaggtcatcaataaccttggtcctttggaactgattcttaatactcgtagccatcatagggttcatgatggcagaaatcgttattgcatagacaaaaattatgctggtgttcttattatttgggataaaagttttgggacatttgaagcagaaaatgaaaaagttgtatatggcttaacacatcccattaatacatttgaaccaatcaaagtgcagttccatcacttattttccatatggactacattctgggccacacctggattcttcaataagttttctgtcatatttaagggaccgtgatggggtccaggtaaaccag

SEQ ID NO: 158274 - DNA, 386 bp, Homo sapiens
tgactgtccgggtctgtgcatgtgaccaccatgggaacatgcaatcctgccacgcggaggcgctcatccaccccgcgggactgagcacgggggctctggttgccatccttctgtgcatcgtgatcctactagagacagtggtgctgtttgcagctctgaggcggcagcgaaaaaaagagcctttgatcatttccaaagaggacatcatagataacattgtcagatacaacgacgaaggtggcggtgaggaggacacccaggctattgatatccgcaccctgatgaatcctgtacccatctaggacacccatctacgacgttgctttgcgccctgaacctcattatactatcaccgagcgactcctacacgatcgtgttaccacccg

SEQ ID NO: 158275 - DNA, 358 bp, Homo sapiens
  misc_feature (1)...(358): n = a,t,c or g
cccacgcgtccgtattttcctgtggacgccggggaagcacagcaccacccccgcacctgccgtcggcctttgagagctttgtggtcttcccatcatgaacgctggaaagtgacattgtgtacacactgcagcttgggggnnnnnnnnnngtattgctgcacatattatatttttgtactgtttattccatagtcctcatgtggtcttactttgatttttattacttgtattattctctttggttctatctcgttctttcttttctttaccattgttttttctataattatagtaactacttttaagtttagactgttgtattctatcatttttctttcgtatttattatgttagttat

SEQ ID NO: 158276 - DNA, 265 bp, Homo sapiens
agtaaaacccagcccatgacccctaacaggggccctctcagccctcctaatgacctccggcctagccatgtgatttcacttccactccataacgctcctcatactaggcctactaaccaacacaccacctgtccaaaaaggccttcgatacgggataatcctatttattacctcagaggttttttcttcgcaggatttttctgagccttttacactccagcctaggcctacccccaattaggagggactgcccaacaggataccg

SEQ ID NO: 158277 - DNA, 789 bp, Homo sapiens
ggaattcggcacgaggcctatcatatagtaaaacccagcccatgacccctaacaggggccctctcagccctcctaatgacctccggcctagccatgtgatttcacttccatctcaaaaaaaaaaaaaaaatcggctcatcttttattgctgttggttgagatgaatctactgatgaagaaaactgtactttgcttacattcagaataaggctttcaaaactgtgggtgtgctgttttcgtgagccttctacttgaccaccaaagacagtatttttgcagctgtatcaaatgaaccgagttggaggaaattgtataggagtatatcttaatggcactacagcaaactgtgttaaatttgggtttttggcaaagattgaagaaaaactgggattcaaaatgtactgcagctgtcaccaccaagcatgaactttcactgattacccataacctactggaaatcttcagccttgctgtcagcataggaccactgtggggaaacagtacattcccattcccagtttgcccctgctttttgaagatctaaatgccattccatgttttctgttacatattgaagtttcttggttgccaaagaaaaacggattctgctgaacttgtggacagaacaaccccaaggttggaagaacaatgaaaaataatctatacttgaacatttcaaaagttaaaattttcaacagagttttaacacactgaagcttaaaatacattgacactgaaatgtcaatggggcaaacaccaatttcgccgttccattatggaaatacatca

SEQ ID NO: 158278 - DNA, 1313 bp, Homo sapiens
cggactcctgcctcactcatttacaccaaccacccaactatctataaacctagccatggccatccccttatgagcgggcgcagtgattataggctttcgctctaagattaaaaatgccctagcccacttcttaccacaaggcacacctacaccccttatccccatactagttattatcgaaaccatcagcctactcattcaaccaatagccctggccgtacgcctaaccgctaacattactgcaggccacctactcatgcacctaattggaagcgccaccctagcaatatcaaccattaaccttccctctacacttatcatcttcacaattctaattctactgactatcctaagaaatcgctgtcgccttaatccaagccttacgttttcacacttctagtaagcctctacctgcacgacaacacataatggacccaccaatcacatgcctatcattatagtaaaacccagcccactgaccccataacagggctccatctcagccctcctaatgacctccggcctaagccatgtggatttcacttccaactccataacgctccctcatactagggcctactawaccaacacactaaaccatataccaatgatggcgcggatgttaacacgcagaaaagcacataccaagggccaccacacacgcacctgttcaaaaaaggcctttcgatacggggataaatcttatttatttacctcaggaagttttttttcttcgcaaggatttattcttgagccctttttaccacttcaagcctaggccccctaaccccccaatttaggaggggcacttggcccccatacagggcattcaccccggtgaaatccccctaggaagttcccacttccttaaacacatccggtattactcggcattcagggaggtattcaattcaccttgaggctcaccataggtctaattggaaaacaaccgaaaaccaaataattcaaagcactgcttatttacaattttactgggtcctctattttaccctcctaaaaggcctcagggtacttcgggtctcccttcaaccattttcggagggatctacggctcaacatttttttgtagccacagggcttccacgggacttcacgtcattattggctcaacttttcctcactatcttgtgcaatccgccaactaatattttcacttttacattccaaacatcactttgggcttcgaagccgccggcctgatactggcatattgtagcacgtggtctggaccatctactgtacgtcttcattctagtgactgatgggtcttaaaaaaaaaaaaaaaaaaaagc

SEQ ID NO: 158279 - DNA, 785 bp, Homo sapiens
ttttttttttttgacttaaaacaacacatttgttatttcaagtttctgtgggtcaggaatccaggtgtggtttagccaagtcttctggctcaaagtctcttacaagggtaaaagtaaggggtcagccaaggctctggtgtcatctgaaggctcaactggggaaggatttgcttctaagttccctcacatggctgctggcagcatgtggttcctcaccagttgttggactgtgggcctcagctcctggcttgctgttggccagccaccaccctcggttctctgccacatgggttttccataaggtggctcacaacacagcagctggtttcatgagcacaggaaagcaagagggttagagagacaaaattacagcaaaacagaaattcgcctcttataacctaatctcagaagtaacaacccatcattttttgccatattctatttatgagaagcaagtcactagatccagcccacacacaaaggaaagggattctccaagggggtgactatcagaaggtaaggatcattgggagccatttcagaagctgcctgccacagatgtcattgctttattttatgaaaataagcaccaaacacactacattcatctataaaataaagcttccctaaagacctataataaaaaagaccttaataatagaaagatatgccacgttcccggacagaagcactcaatggtgcaaagaagttgattatcactaaattaatctacaaaactaaaacaattgcaatgtccagtgggatttgtctgctagtttatctcg

SEQ ID NO: 158280 - DNA, 355 bp, Homo sapiens
ctggacagggacacttggagtcacttcatgatgctggttatgtctaagattgaccaagagtgtgaaagtccatgacagatgggcacatacagactgtgactaacatcagacagctgccagcccgtactctctatacccactggccacgtgagttttctccttaatccccgccgctagagagaatgcatacacgaggggccaggagggaagccagacagaaagctcctaggattagggataagaggaggggaaaaagcagagtccactgtttaggagaggagttggccaacggtggcgggtgggatagaataaggtgggggaaaggggagaggcaaggtgacagcggacgcgtggg

SEQ ID NO: 158281 - DNA, 358 bp, Homo sapiens
cccacgcgtccgcccacgcgtccgggcaaggtgatgaccagctggagagagatcacgaaaactgagacagatttgtcaggcaagttgtagggatcaacaactatagaatatctgaagagtcaggtcatccatataatatatttggaaaaatatttcatgactgtgcagacctagatacttcggaacactgactgtgtaagtgtgattcatttgataagaccttgaaacctactattaacctagtgagttataataggaattttgcatgaacaaacattgatgagaattttagatgtgggaaatcacctagctacagttcttgctattctaagcatgaagaacttcataatggaatgat

SEQ ID NO: 158282 - DNA, 413 bp, Homo sapiens
  misc_feature (1)...(413): n = a,t,c or g
ttttttttttttttttttccccagggccgccgcctttattcacagaccctcgagctccacagccacacagacacttagctttcaaagggcacaggaaggaaaagggacctggggaccctcccagcacaccccaaagccaaaacagacccagcagcagcacctcagggtcagcctggggtaggtgtgagaagctccccancgtgtccaggccacgggagcagcaagggtctgcggggagcccaggctggatgggggggggctgcccttgtcctgtatcctgaccacttaaaggacaaaaccagcccagtcccagcagcctgggaggcagcaaaggctccttcttctcccctcctgatcctgcagtggccaggggcaggagggtgaggggagaggaaagaggtcaggtcagggaa

SEQ ID NO: 158283 - DNA, 902 bp, Homo sapiens
ctgaagcgccggagcactcaggatgccaacaagtcctagagcgcccggtgcccctccccggcctccggaagatcaaggtgcgaggtgtcggttccctcctgtcctgtggtcctgcccctgggatgggggtgccttgctccagcgggctgcagatcccagcactggcgtgactgacggctgaggcctgcctctccttcccaagcccccttccttcatccttgggggtctcaggctgcccccatcatgggggtctgggccctgcccacccttctgccctcccccagccacctggctgcatttttgaagctgcctggcccccacgggccctgacctgacctctctcctctcccctcacgcctcctgcccctggccactgcaggatcaggaggggagaagaaggagcctctgctgccttcccaggctgcttgggaactgggctggttttgtcctttgaagatgatcatcgactacaggactaggggcaagcccacacccaatcccagcctggggcttccccgcagaccctttgctgcttccgtggcctgggacacgctggggagcttctcacacctacccctaccgtccagcctggccttttccctgaatcagcttcaaaatggccccagctctttgggcctaggatactgccgggccccccaaaggggtccccaacaaccaaggcctggcctcctggtgtctgcggtcaacagttgcccctggtcaaggggcacccaggctgaccctgaggtgctgctgctgggtctgtcttggctctggggtgtgctgggagggtccccaggtcccttttccttcctgtgccctctgaaagctaagtgtctgtgtggctgtggagctcgagggtctgtgaataaaggcggcggccctgggaaaaaaaaaaaaaa

SEQ ID NO: 158284 - DNA, 387 bp, Homo sapiens
  misc_feature (1)...(387): n = a,t,c or g
aaatatgtataattagagttttctaatttcactgttttatctctaacttttgagtggcaaacagatcaagtcttttgctcatagacttttctgtggggttattaaaatgcaaaagctttattttttttaataatgccatactccattattgtctgatgatggtatgcgaatatgattcattatttctatcttacatgtttttgctcatctttttctatttctattatatttttatctatcttcttttcattcatccatactnnnnnnnnnnnnnnnnnnnnnnnnnnnnnnnnnnnnnnnnnnnnnnnnnnnnnnnnnnnnnnnnnnnnnnnnnnnnnnnccatttctttcttctcaatttcttctctctatttttctcttgttttc

SEQ ID NO: 158285 - DNA, 354 bp, Homo sapiens
  misc_feature (1)...(354): n = a,t,c or g
cttgctcactgcaagctccannnnnnnnnnnnnnnnnnnnnnnnnnnnnnnnnnnnnnnnnnnnnnnnnnnnnnnnnnnnnnnnnnnnngtgtgcttaattctatataaagcgggaaccaggggaaatcttatgctaacgtgtaccggctactgtacctggaccccattcccaaaatttatgcggaggcatacactccataaaatgttaactccacaaatttggagacaaagagccccaagacgattcaaaaatttccggaggatagggagttcaagaacgatttttttgaaaaaacaaagaatggggacagagaaactggggcttttcacccctttcttttatttctggtaan

SEQ ID NO: 158286 - DNA, 2983 bp, Homo sapiens
ggggtgacgcaggcgcagcgcgggctgcgcgcgctactgcccatccccggttgtcccacttttgttcgcctctcttcggtcctctactcaagagctccgtctccgtctcgccctcctcgaagtcctcgtcgcgcgcccgcgacccaggtcgccctgaaatctagcccgtccgagcgcgagtccaacggccgcggccgcaccaaggccccctcagaccgtgccatgggtgacagtgatgacgagtacgatcgaaggcgcagggacaagttcagaagagagcgcagcgactacgaccgttcccgcgagagagatgaaagacgtcgaggggacgattggaatgacagagagtgggaccgtggccgtgagcgccgtagtcggggtgaatatcgggactatgaccggaatcggcgagagcgcttctcgccacctcgccacgaactcagcccgccacagaagcgcatgaggagagactgggatgagcacagctctgacccataccacagtggctatgagatgccctatgctgggggggggtgggggcccaacttatggcccccctcagccctggggccaccctgacgtccacatcatgcagcaccatgtcctgcctatccaggccaggctgggcagcattgcagagattgacctgggtgtgccgccgcccgtgatgaagaccttcaaggagtttctcctctccctggatgactcggtggatgagacggaggccgtcaagcgctataatgactacaagctggatttccggaggcaacagatgcaggatttcttcctggcgcacaaagatgaggagtggtttcggtctaagtaccacccagatgaggtggggaagcgtcggcaggaggcccggggggccctgcaaaaccgactgagggtcttcctgtccctcatggagactggctggtttgataaccttctcctggacatagacaaagctgatgccattgtcaagatgctggatgcagccgtgattaagatggaaggaggcacggagaatgatctccgcatcctggagcaggaggaggaggaggagcaggcaggaaagcctggggagcccagcaagaaagaagaaggacgggctggagcaggcctaggggacggggagcgcaaaaccaacgacaaggatgagaagaaggaagacggcaagcaggctgagaatgacagttctaatgatgacaaaacaaagaagtcggagggtgatggggacaaggaagagaagaaagaagactccgagaaggaagccaaaaagagtagcaagaagcggaaccggaagcacagtggtgacgacagctttgacgagggcagcgtgtcagagtctgagtcggagtcagagagcggccaggctgaggaggagaaggaggaggccgaagcgctcaaggagaaggagaagcccaaggaagaagaatgggagaagcccaaggacgccgcggggctggagtgcaagccgcggccgctgcataagacctgctccctcttcatgcgcaacatcgcgcccaacatctcccgggccgagatcatctccctttgtaaaaggtacccaggctttatgcgggtggcgctctcagagccccagccagagaggaggtttttccgtcgtggctgggtgaccttcgaccgcagtgttaacattaaagagatctgttggaacctgcagaacatccgtctccggagtgtgagctgagccctggtgtgaactgggacctgacccggcgcgttcgcaacatcaacggcatcacccagcacaagcagattgtgcgcaacgacatcaagctggcggccaagctgatccacacgctggatgacaggacacagctttgggcctcagaaccagggacgcctcccctgcccacgagcctgccctcgcaaaacccgatcttgaagaatatcaccgactacctgatcgaggaagtaagcgccgaggaggaggagctgctggggagcagcgggggcgctcctcctgaggagcctcctaaggaagggaacccggcagagatcaacgtggagcgggatgagaagttgattaaggtcttggacaagctcctcctttacctgcgcatcgtgcattccttggattattacaacacctgtgagtaccccaacgaggacgagatgcccaatcgctgtgggatcatccacgttcgggggcccatgccacccaaccgcatcagtcacggggaagtgctggagtggcagaagacttttgaggagaagctcacgccgttgctgagtgtgcgggagtcactctcagaggaagaggcccagaagatggggcgcaaagacccagagcaggaagtggagaagttcgtcacctccaacacgcaggaactgggcaaggataagtggctgtgtcctctcagtggcaagaaattcaagggtcctgagtttgcgcgcaaacatatcttcaacaagcatgcagagaaaattgaggaagtgagaaaggaagtcgcgttttttaacaacttcctcactgatgctaagcgcccagctctgcctgagatcaagccagcccagccacctggccccgcccagatactccccccaggtttgaccccaggactcccctacccacaccagactccccagggcctgatgccctatggtcagccccggcccccgatcttgggctatggagctggtgctgtccgccctgcagtccccacaggaggccctccatacccccatgccccgtatggtgctggtcgagggaactatgatgccttccgaggccagggaggctatcctgggaaacctcgcaacaggatggttcgtggagacccaagggccattgtggaatatcgggacctggatgccccagacgatgttgatttcttttgagccgtcccccgttcctcagtcctgtatcatccatacttgtactaccttgtcctatgaagctctgagaattttttgtacgatcagccttactgctaataaaagcacttccacagggaaaaaaaaaaaaaaaaaa

SEQ ID NO: 158287 - DNA, 3542 bp, Homo sapiens
atgaagctttgcttgcccattgctcagctcctgctgtgtggcccagttcctaacaggccatggctggcggctgagggccctggtattacagcatcaggagctagagtaggaccgagcccgattcccaccttccaggtgcccctgagccagcctccagaggatgagctggataggctgacgaagaagctggttcacgacatgaaccacccgcccagcggggagtactttggccagtgtggtggctgcggagaagatgtggttggggatggggctggggttgtggcccttgatcgcgtctttcacgtgggctgctttgtatgttctacatgccgggcccagcttcgcggccagcatttctacgccgtggagaggagggcatattgcgagggctgctacgtggccaccctggagaaatgtgccacgtgctcccagcccatcctggaccggatcctgcgggctatggggaaggcctaccaccctggctgcttcacctgcgtggtgtgtcaccgcggcctcgacggcatccccttcacagtggatgctacgagccagatccactgcattgaggactttcacaggaagtttgccccaagatgctcagtgtgcggtggggccataatgcctgagccaggtcaggaggagactgtgagaattgttgctctggatcgaagttttcacattggctgttacaagtgcgaggagtgtgggctgctgctctcctctgagggcgagtgtcagggctgctacccgctggatgggcacatcttgtgcaaggcctgcagcgcctggcgcatccaggagctctcagccaccgccccctcagaccgtgccatgggtgacagtgatgacgagtacgatcgaaggcgcagggacaagttcagaagagagcgcagcgactacgaccgttcccgcgagagagatgaaagacgtcgaggggacgattggaatgacagagagtgggaccgtggccgtgagcgccgtagtcggggtgaatatcgggactatgaccggaatcggcgagagcgcttctcgccacctcgccacgaactcagcccgccacagaagcgcatgaggagagactgggatgagcacagctctgacccataccacagtggctatgagatgccctatgctgggggggggtgggggcccaacttatggcccccctcagccctggggccaccctgacgtccacatcatgcagcaccatgtcctgcctatccaggccaggctgggcagcattgcagagattgacctgggtgtgccgccgcccgtgatgaagaccttcaaggagtttctcctctccctggatgactcggtggatgagacggaggccgtcaagcgctataatgactacaagctggatttccggaggcaacagatgcaggatttcttcctggcgcacaaagatgaggagtggtttcggtctaagtaccacccagatgaggtggggaagcgtcggcaggaggcccggggggccctggcaaaaccgactgagggtcttcctgtccctcatggagactggctggtttgataaccttctcctggacatagacaaagctgatgccattgtcaagatgctggatgcagccgtgattaagatggaaggaggcacggagaatgatctccgcatcctggagcaggaggaggaggaggagcaggcaggaaagcctggggagcccagcaagaaagaagaaggacgggctggagcaggcctaggggacggggagcgcaaaaccaacgacaaggatgagaagaaggaagacggcaagcaggctgagaatgacagttctaatgatgacaaaacaaagaagtcggagggtgatggggacaaggaagagaagaaagaagactccgagaaggaagccaaaaagagtagcaagaagcggaaccggaagcacagtggtgacgacagctttgacgagggcagcgtgtcagagtctgagtcggagtcagagagcggccaggctgaggaggagaaggaggaggccgaagaagcgctcaaggagaaggagaagcccaaggaagaagaatgggagaagcccaaggacgccgcggggctggagtgcaagccgcggccgctgcataagacctgctccctcttcatgcgcaacatcgcgcccaacatctcccgggccgagatcatctccctttgtaaaaggtacccaggctttatgcgggtggcgctctcagagccccagccagagaggaggtttttccgtcgtggctgggtgaccttcgaccgcagtgttaacattaaagagatctgttggaacctgcagaacatccgtggagctcgcagtctgatcaatcgctggtgctcaagagggaagggtcttagagctgctgtttctctggcaagcgggctccgggagtgtgagctgagccctggtgtgaacagggacctgacccggcgcgttcgcaacatcaacggcatcacccagcacaagcagattgtgcgcaacgacatcaagctggcggccaagctgatccacacgctggatgacaggacacagctttgggcctcagaaccagggacgcctcccctgcccacgagcctgccctcgcaaaacccgatcttgaagaatatcaccgactacctgatcgaggaagtaagcgccgaggaggaggagctgctggggagcagcgggggcgctcctcctgaggagcctcctaaggaagggaacccggcagagatcaacgtggagcgggatgagaagttgattaaggtcttggacaagctcctcctttacctgcgcatcgtgcattccttggattattacaacacctgtgagtaccccaacgaggacgagatgcccaatcgctgtgggatcatccacgttcgggggcccatgccacccaaccgcatcagtcacggggaagtgctggagtggcagaagacttttgaggagaagctcacgccgttgctgagtgtgcgggagtcactctcagaggaagaggcccagaagatggggcgcaaagacccagagcaggaagtggagaagttcgtcacctccaacacgcaggaactgggcaaggataagtggctgtgtcctctcagtggcaagaaattcaagggtcctgagtttgtgcgcaaacatatcttcaacaagcatgcagagaaaattgaggaagtgaaaaaggaagtcgcgttttttaacaacttcctcactgatgctaagcgcccagctctgcctgagatcaagccagcccagccacctggccccgcccagataattcatgtccctgtccgtgttgtactccccccaggtttgaccccaggactcccctacccacaccagactccccagggcctgatgccctatggtcagccccggcccccgatcttgggctatggagtccccacaggaggccctccatacccccatgccccgtatggtgctggtcgagggaactatgatgccttccgaggccagggaggttatcctgggaaacctcgcaacaggatggttcgtggagacccaagggccattgtggaatatcgggacctggatgccccagacgatgttgatttcttttga

SEQ ID NO: 158288 - DNA, 346 bp, Homo sapiens
atggctgcctgtgacccccttcccacgtctccatttctttatgcctggctttgccctctcaccagccgtggaagccagcagtatcgagctctcacagtgccggaactcacccagcatgtccatgaaggaggtcgatgagcagatgcttaacgtgcagaacaagaacagcagctactttgtggaatggatcccaacaatgtcaagacagccgtctgtgacatccacctcgtggcctcaagatggcagtcaccttcattggcaatagcacagccattccaggagcttttcaagcgcatctcggagcagttcactgccatgttccgccggaaggcttcctccactcgta

SEQ ID NO: 158289 - DNA, 1751 bp, Homo sapiens
  misc_feature (1)...(1751): n = a,t,c or g
ttcctgccgtcgcgtttgcacctcgctgctccagcctctggggcgcattccaaccttccagcctgcgacctgcggagaaaaaaaattacttattttcttgccccatacataccttgaggcgagcaaaaaaattaaattttaaccatgagggaaatcgtgcacatccaggctggtcagtgtggcaaccagatcggtgccaagttctgggaggtgatcagtgatgaacatggcatcgaccccaccggcacctaccacggggacagcgacctgcagctggaccgcatctctgtgtactacaatgaagccacaggtggcaaatatgttcctcgtgccatcctggtggatctagaacctgggaccatggactctgttcgctcaggtccttttggccagatctttagaccagacaactttgtatttggtcagtctggggcaggtaacaactgggccaaaggccactacacagagggcgccgagctggttgattctgtcctggatgtggtacggaaggaggcagagagctgtgactgcctgcagggcttccagctgacccactcactgggcgggggcacaggcctcntggaatgggcactctccattatcagcaagatccgagaagaataccctgatcgcatcatgaataccttcagtgtggtgccttgcacccaaagtgtgctgacaccgtggtcgagccctacaatgaccaccctctccgtaccatcagttggtagagaatacctgatgagacctattgcattgacaacgagggccctctatgatatctgcttccgcactctgaagctgaccacaccaaccttacggggatctgaaccaccttgtctcaggccaccatgagtggtgttcaccaccttgcctccgtttccctggtccagactcaatgctgacctccgcaagttggtcagttcaacatggtccccttcccacgtcttccatttctttatgcctgggtttgcccctcttcaccagcccgtggaaagccagcagtatcgaggctctcacaagtgccgggaactcacccagcaaggtctttcgatgccaaggaacattgatgggctgcctgtggacccccggccacgggccgatacctccaccgtggctgctggctttccgtggtcggatgtccatgaaggaggtcgatgagcagatgcttaaccgtgcagaacaagaactagcagcttactttgtgggaatggtttccccaacaatgttcaaggacagcctgtctgttcacatcccaacctcgtgggccttcaagatgggcagttcacctttcattgggcaataggcacagccattccagggagctctttcaaagcggcatcttcgggagcagtttcacttggccatgtttccgccggaaggcttttccttccactggttacacagggcgaggggcatgggacggagatgggagtttcaaccgagggttgagaggcaacattgaacgacctccgtctctgaagtatcaagcaattaccaaggatgccaacgcaagaagaggaggaggatttcggtgaggaggccgaagaggaggcctaaaggaagagcccccaatcaactcaaggcttctcagttcccttagccgtcttactcaactgccccctttcctctccctcagaatttgtgtttgctgcctctatcttgttttttgtttttttttttgggggggggtctagaacagtgcctggcacatagtaggcgctcaataaataattatttgttgaaaaaaa

SEQ ID NO: 158290 - DNA, 366 bp, Homo sapiens
ggcacgaggtctctgtccacttggatatacaggcttaaagtgtgaaacagacatcgatgagtgcagcccactgccttgcctcaacaatggagtttgtaaagacctagttggggaattcatttgtgagtgcccatcaggttacacaggtcagcggtgtgaagaaaatataaatgagtgtagctccagtccttggttaaataaaggaatctgtgttgatggagtggtttgctattgctgcacatttgtgtaaggattttgtatttttaaattttcctgttcttcatgtcccctctatacgatttgacatgtgaatattatatattttacattttagttttatttatttaaatcttttacggtattcag

SEQ ID NO: 158291 - DNA, 345 bp, Homo sapiens
ggcacgagcggtactagccgcttcttatgagacgttcttcaaatgaatgattttgggacccgatggaggttctatgccacggtgatttaccaaaaaccacagctgaagagtctgctgattctggagtgaagggagacctgggtgctagggaccgatggaactttgcaaacgaaggaagagaaagaccccaggctccgcaaaactctgctggtctatgtggcccccttgttggtgctgggctctgatgtcctggaggccctctctggggctgcacctctcaggcttttcttgaaggacgctatccgtgaccaagctcggattggtcgtgctgaacgaactgtcctc

SEQ ID NO: 158292 - DNA, 351 bp, Homo sapiens
cgtcagatccgcataccccagacgcctggaaaacagccttgctggccaacgtcggcaccatctctgccatccgctacttccgccggcaggtggggcaagggcgccgcagccacagccccagccccagctcctaggagccaggcccgggccagggagatgcaggatgaggagacgaccacaggcgcccagggcaggacgaggtgccgccctcgcccgggccctctgacccctctcttctaccgcgtccaggaggggggcgtgtcctggtgctgctccctccgactcacctgaggatccagccagtgaccacggccactccccacgcctgggagggaggtgctaaagtctggg

SEQ ID NO: 158293 - DNA, 338 bp, Homo sapiens
caaatcgatgagattgtcactgagaccctgttgactgaggcggagcgcggggcaaaggtctacctcaccactggctatttcaacctgacccaggcctacatggacctggtcttgggcactcgggctgagtaccagatcctgctggcctcaccagaggtgaatggcttctttggggccaagggggtggccggcgccatcccagcggcctatgtgcacatagagcgacagttcttcaatgatgagtgcagcctgtgacaatcaagagcggtgcagctttcggaatactggcgctgttctggaagatcactctctatggaatttgttcgacatgacatcgc

SEQ ID NO: 158294 - DNA, 361 bp, Homo sapiens
aagcactcctcaagcattagaagatgctctgtggagtgaatgtctctatcaggaacagtatttgtatccttttatctgatatacccattagcactgaaaattagacttcttatggataaagggttgctaacttattgatcatttttggggtatttttgttcttatggttatagtggcaatttacctttacattttcaaaaagtattaaaaaggatagcaaagaagaaatatattgccagctaccaagagatactaaaattgaagactttgggacaggacccagatctcgctatccattggtagcgctattgaccttatctgatgaggatgaccgggaaattatgtattatttccatggggg

SEQ ID NO: 158295 - DNA, 1259 bp, Homo sapiens
gttcgttgccgtccggtccggaattcccgggtcgacccacgcgtccggatggctgcggtgtttctggtaacgctttatgaatactcgccgcttttctacatcgcggtggtctttacctgcttcatcgtgaccaccggcctggtattgggatggtttggttgggatgttccagtaattctgagaaattcagaagagacccagttcagcacaagagttttcaaaaagcaaatgagacaagtcaagaatccttttggcttagagatcactaatccatcttcagcttcaattacaactggcataaccttgacaacagattgccttgaagatagcctccttacatgctactgggggtgcagtgttcaaaaattatatgaagctctgcagaagcatgtttattgcttcagaataagcactccccaagcattagaagatgctctgtatagtgaatatctctatcaggaacagtatttgtatcctttcgtctgatatacccattagcactgaaaattagacttcttatggataaagtgttgctaacttattgatcattcttggtatactagaagcatgtttattgcttcagaataagcactccccatgcattagaacatgctctgtataccgaatatctgtatcaggaacaggatttgcatgctttcgtctgatatacccattagcactgataattagacttcttatggataaagtgccgctaacttattgatcattcttgggatactagaagcatgtttattgcttcagaataagcactcctcaagcattagaagatgctctgtggagtgaatatctctatcaggaacagcattttattaaaaaggatagcaaagaagaaatatattgtcagttaccaagagatactaacattgatgactttggtacagtacccagatctcgctatccattggtagcgctattgaccttatctgatgaggatgaccgggaaatttatgatattatttccatggtgtcagtgattcatattcctgataggacttataaactatcctgcagaatattgtatcaatatttactcttggctcaaggtcaatttcatgatcttaagcaacttttcatgtctgcaaataataatttcactccctccaacaattcctcttcagaagaaaaaaacacagacagaagtttgttggaaaaggtgggactctctgaaagtgaagttgagccatcggaagagaacagcaaggactgtgttgtttgccagaatgggactgtgaactggg

SEQ ID NO: 158296 - DNA, 387 bp, Homo sapiens
gcctgccgagtccgcggcgttccccggctgcagccgggagggggccgaggagtgactgagccccgggctgtgcagtccgacgccgactgaggcacgagcgggtgacgctgggcctgcagcgcggagcagaaagcagaacccgcaggaagctccaggactggcgggatgggctcagcctgtatcaaagtcaccaaatactttctcttcctcttcaacttgatcttctttatcctgggcgcagtgatcctgggcttcggggtgtggatcctggccgacaagagcagtttcatctctgtcctgcaaacctcctccagctcgcttaggatgggggcctatgtcttcatcggcgtgggggcagtcactatgctcatgggcttcctgggctgg

SEQ ID NO: 158297 - DNA, 766 bp, Homo sapiens
tgcggtggaattcgggctgtgcagtccgacgccgactgaggcacgagcgggtgacgctgggcctgcagcgcggagcagaaagcagaacccgcagagtcctccgtgctgctgtgtggacgacacgtgggcacaggcagaagtgggccctgtgaccagctgcactggtttcgtggaaggaagctccaggactggcgggatgggctcagcctgtatcaaagtcaccaaatactttctcttcctcttcaacttgatcttctttatcctgggcgcagtgatcctgggcttcggggtgtggatcctggccgacaagagcagtttcatctctgtcctgcaaacctcctccagctcgcttaggatgggggcctatgtcttcatcggcgtgggggcagtcactatgctcatgggcttcctgggctgcatcggcgccgtcaacgaggtccgctgcctgctggggctgtactttgctttcctgctcctgatcctcattgcccaggtgacggccggggccctcttctacttcaacatgggcaagctgaagcaggagatgggcggcatcgtgactgagctcattcgagactacaacagcagtcgcgaggacagcctgcaggatgcctgggactacgtgcaggctcaggtgaagtgctgcggctgggtcagcttctacaactggacagacaacgctgagctcatgaatcgccctgaggtcacctacccctgttcctgcgaagtcaagggggaagaggacaacagcctttctgtgaggaag

SEQ ID NO: 158298 - DNA, 420 bp, Homo sapiens
cccacgcgtccgctctaggtgatgtttgcagacataaaaagtaaacctgtcaaggaattcagagccattgggtaccttgttatttggacccagtttgaagccatcctttgatttattggaccaactggcaacagaaaatgaaaagtagtgtggcacagataaaaccttcttctggtcatgtacagtaagggaaaaccttaattcatattcagaggaactcctctccagaagacagatatgtaagaacaagaacgatccccccggggatagagattaatttgattacagcagatcagactatgagcattcaagaagaggacgttcttatgatagtagcatggagtcacgaaacagggaccgagaaaaacgcagagaaagagaaagagatacggatcggaaaaggtctcggaaatccccatc

SEQ ID NO: 158299 - DNA, 443 bp, Homo sapiens
ggccaggattcccgatccagagacaatggccccgatgggatggagcccgaaggcgtcatcgagagtaactggaatgagattgttgacagctttgatgacatgaacctctcggagtcccttctccgtggcatctacgcctatggttttgagaagccctctgccatccagcagcgagccattctaccttgtatcaagggttatgatgtgacttgtatgaaaccctgaccatcacccaggcagtcatcttcatcaacacccggaggaaggtggactggctcaccgagaagatgcatgctcgagatttcactgtatccgccatgcatggagatatggaccaaaaggaacgagacgtgattatgagggagtttcgttctggctctagcagagttttgattaccactgacctgctggccagaggcattgatgtgcagcaggtttcttta

SEQ ID NO: 158300 - DNA, 593 bp, Homo sapiens; identical to SEQ ID NO: 151947

SEQ ID NO: 158301 - DNA, 459 bp, Homo sapiens
ccaacctccaggagtggaagctggacacactatgtgacttgtatgaaaccctgaccatcacccaggcagtcatcttcatcaacacccggaggaaggtggactggctcaccgagaagatgcatgctcgagatttcactgtatccgccatggtgtgtttgcccgctgccagcctgttgtgggtctgcccgtcagaagtgtcctacttgaagccagggttcctggaacccaggtgcctacctggtctgctgcatatttgttttctcttccagcatggagatatggaccaaaaggaacgagacgtgattatgagggagtttcgttctggctctagcagagttttgattaccactgacctgctggtgagtagagggaactgatagcaaaggcagaagggaggatccaaggtgattccctctccaaggggacatcagtgcctctcaggaaagtagcagcttggaa

SEQ ID NO: 158302 - DNA, 533 bp, Homo sapiens
catgacccccattgagtgcgtattccatgtggcggaattcgcccatgcgtgtcatctgagcctctggcttccctgccagggcagccctggcagtgtcctacttcccagggctgttgtctgcctggcgggaaggtcctgggcaaaggatcagtctttgtactctgagagcagactacttggctcctctctgttttttatcagcgaagttggatatatctctcccacatttccctaatcatatgctatatattggctttttttttcttctctagcccccaaatacatcaagatgtttgtactggatgaagctgacgaaatgttaagccgtggattcaaggaccagatctatgacatattccaaaagctcaacagcaacacccaggtagttttgctgtcagccacaatgccttctgatgtgcttgaggtgaccaagaagttcatgagggaccccattcggattcttgtcaagaaggaagaagtgaccctggagggtatccgccagttctacatcaacgtggaacgagaggagtgga

SEQ ID NO: 158303 - DNA, 495 bp, Homo sapiens
gcggaaattcgagatcgtagtccatgcggggaactccacgtggaacgagaggagtggaagctggacacactatgtgacttgtatgaaaccctgaccatcacccaggcagtcatcttcatcaacacccggaggaaggtggactggctcaccgagaagatgcatgctcgagatttcactgtatccgccatgcatggagatatggaccaaaaggaacgagacgtgattatgagggagtttcgttctggctctagcagagttttgattaccactgacctgctggtgagtagagggaactgatagcaaaggcagaagggaggatccaaggtgattccctctccaaggggacatcagtgcctctcaggaaagtagcagcttggaatagaatctggcatgcctaaggcctttggggaactgggatgcttatttcctctgccttccttggctgcccacatggatgcctaagtgtcttccctccgggatagagtgtcctccgtg

SEQ ID NO: 158304 - DNA, 1451 bp, Homo sapiens
ctagtttctaaggatcatgtctgcgagccaggattcccgatccagagacaatggccccgatgggatggagcccgaaggcgtcatcgagagtaactggaatgagattgttgacagctttgatgacatgaacctctcggagtcccttctccgtggcatctacgcctatggttttgagaagccctctgccatccagcagcgagccattctaccttgtatcaagggttatgatgtgattgctcaagcccaatctgggactgggaaaacggccacatttgccatatcgattctgcagcagattgaattagatctaaaagccacccaggccttggtcctagcacccactcgagaattggctcagcagatacagaaggtggtcatggcactaggagactacatgggcgcctcctgtcacgcctgtatcgggggcaccaacgtgcgtgctgaggtgcagaaactgcagatggaagctccccacatcatcgtgggtacccctggccgtgtgtttgatatgctttaccggaagatacctggccccccaaatccatcaggatgttggtactgaatgaggctgacgaaatgttaagccgtggattcaaggaccagatctatgacatattccaaaaggctcaacagcaacacacaggatagttttgctgtcagccacaatgccctttgattgtgcttgaggtgaccaagaagttcatgaggggcccccattcggattcttgtcaagaaggaaagagttgaccctggagggtaatccgccagtttctacatcaaccgtggaacgaagaggagtggaagctgggacacataatgtgacgttgtatgaaacccgtgaccatcaccccaggcagttcatcttcatcaacacccggaggaaaggtgggactggcctcacccgagaaagatgcatgctccgagatttcactgtatcccgccatgccatgggagatatgggaccaaaagggaacgagaccgtgattatggaggggagttttcgttctgggctcttagcagagtttttgattacccacttgaccttgctgggccagaggcattgatgtgccagccaggttttctttagtcatcgaattatgaccttcccaccaaccggggaaaactatatccacaggaatcgggtcgacggtggaccgttttggccgtaaaggtgtggctattaacatggtgacagaagaagacaagaagggccctccggacacttggggcctcctacaacacctccattgaggaaatgcccctcaatgtttgctgacctcatctgaggggctgtcctgccaccctagccccagccagggctcaatctctgggggctgaggagcagcaggaggggggagggaagggagccaagggatggacatcttgtcattttttttctttgaataaactgtcactttttgaggcaaaagaaggaaccgtgaaaaaaaaaa

SEQ ID NO: 158305 - DNA, 378 bp, Homo sapiens
agatggacactactccgctctcgtattctgagtcttaatccgatgaataccttgtcacaaacatgtagttgcaggatgccttctgccgagggcttgtgaaaccaggccttaatgtcttgctaaaggggcccattaacgccgtgatcgacgtgaatggcctgaaacaatgtttggcctaattcaagcggtatctggaatgcctttaaaggctcgatgtgacactgtgtccagtaccgtagatcggtggatctgatgcgcccttacctcataacaaggaccataaagctgctgatccataagactactttcagcgatagatgagtttctatcgccaagcccatgccgcaatgcttgcagtcttaccccgcctgcatcact

SEQ ID NO: 158306 - DNA, 397 bp, Homo sapiens
acgcgaatcggaaagctgtgctgctgctgacacccccgcactggagaccctaagcttccatggtgactgggagatcatcgaggtgtttaatcgggatctcgggtcgacgtacccagatgacctggccctctagatggaagatgtggactttgaggaagaatacgaggaatagggctacgactagggctgtgttctatatccccaggaaggggtgatcggcaacatggagggccccgactatagctaggtcacctttgcattgcactcatcatctgtgtatagggtgagcctggaccccaagacctataccttggcagtgaccggaggttacgatgacggagccttcgtatggctgctcacctatggctagctgctctttgagtgagcaagccatgaa

SEQ ID NO: 158307 - DNA, 399 bp, Homo sapiens
  misc_feature (1)...(399): n = a,t,c or g
gaaatagccaggtgctactggactcccctatccagttgtcaaagataacggagaactacgagtgtataacggaactttcaggactgctaaagagggaacagtcctcgacagtgaatgcatctaatttagagaatgacgaggctcgacttaaggcctatctggagaatcgctcagagatcgactcgctcaagaccagcaaccctatagacttataagaggcatcaatcagccaggctggcagcataaactagagtcgattctaatcatctggcatgaacaaatcctatgatgtgcgaattgataactttaatgggtctattggcgatagaatactgcttactgcagcgaatgtgatcctggcatggtgccgcctttacggtctgatgaggcagaatgtcn

SEQ ID NO: 158308 - DNA, 424 bp, Homo sapiens
ccggtccttcgagtggcaagagagcgaagtcttccaggcccgcaagaaggtcctcatggtagagcttcagaaagcgcatcgcccctggctccatcaatagcaccatctccgccaggccctcctgccctgtcagcttcacacatcatgggctctcaggccttgcgttctccagagaccccatggtgatctccatgggaccctccagcccctcttgatttggttagtccatggcaatttccaccaggccctcatgcctcagcaaccccttagaggtctccactgggcctgcagaccccacaggctccaggctcatgggcccctcatgttcctgcaaccccacaggcctcaggtttaccagcccctcatgttacagagaccccataagcatcgagctgacttgctatgcctgtcccagagactccat

SEQ ID NO: 158309 - DNA, 421 bp, Homo sapiens
tttgtggtccccaattcaggagaggtatggacaccttaacatttttgggtcctgtttcaggacttccagttccaataaggatgggcagaaacttgtcccactcgtatctagtgcctccaaggccagggcccagatgatcacctgagctcatataacttttctctctggcttgtaggtaccatgtctaccctacctgtaggaacacatccgggattctaggattcacagtctctgtggtgacaaatgctatcccgttcatttcttgactttcttctttttactatatatactttctttataactttggatgatcttaataaatatcactctcattaatgtcacaaatgcaatttcagtcagcctacctcttgatttgaattattgtcggtagtctatttcaaatacttcgagattatcgacg

SEQ ID NO: 158310 - DNA, 394 bp, Homo sapiens
ccctggggtggtgattcggatgtctgctacagggaaggaggcctctgaagagccattccccctggcaggggcctggagcttcgggaaggcctgctcagggcaaacataaaaaccgctgaagggggcagaatcccagtaatcttagccacccggcccccacccctccctggccaggcattaagtgtcccttgccgcgggcggggccctccttgagctccctcctccccggtcgcgtgctctgtgccaggcctgagtttcccttacatggtcgggggctcgagccttcggcctccctcctcccttctgccctcgctccttcccctttgagaggcctcaagggcacagagaggtcaagactgaaagctgaccaagcttggggtgggtggaaagaggg

SEQ ID NO: 158311 - DNA, 704 bp, Homo sapiens
caataaaattctaataataaaaacaaatagtagaaaaaaataaaaaatagaataatgaagagataacaatcaatcaaacaacaataaaaatcataataaataatgggaaaaagaaagcaaaacctagcatcaaaagtgcatatactcattgtaactacaatcttactatatattcctacttttgttttaaaaaaagttttctttaaactatatgtctcaaagggatactaaaggtataatttcatattcttttttgaatttaaaaaacatatacgtaatcctcctttgttttggtaagttcaaatatgaattgacagtggggtaaattgattggtggattctttaagaaagctctaagaagagaatccagcatcctatatcttctttaagaagtatgagctgaaatgttaggcattccttgtattgttttttaaatatatttaaggaatgctgtttttgtaaaaccatggctttgaaaaagaaatctgagatcaaaatacattactagaagatctctataaaaggtcaccaagactatccttgtttgtgaaatcagggaaaacatttttagaatttatcttgttagaaaaaatgctaccgcttttctttctttttcttctggtgtttaattgtgataataagaaagaagaaaaagaaagaaaagtggtagcatttttcaatcttaatcttctttcttattatca

SEQ ID NO: 158312 - DNA, 397 bp, Homo sapiens
gaaattttctttatacttttctgtattttccaaattttgtgtgatcagcacattgcttttaaaatcagaagaaaaaaaataagtattttttgttacgagagaaatgtctgctaaactgcttccctcatctgtacgttgccttctacgtgtatatccccagcattttcaatttgagtggttgctaatatctgccttcttgctcaatcttttatgtgttcatcccattatcgcatcctcttctgttcttctttctgtgtttctcgctttccttttctcttcctttcttcctttctcttttctgtttccctttccttgcttttctgtttcacccttctttcatccttctgcttgattcttccgcctgtttgttgtgtatttcttgtttttttcatctttc

SEQ ID NO: 158313 - DNA, 339 bp, Homo sapiens
  misc_feature (1)...(339): n = a,t,c or g
tgccgccagaacacaggtgtcgtgaaaactacccctaaaagccaaaatgggaaaggaaaagactcatatcaacattgtcgtcattggacacgtagattcgggcaagtccaccactactggccatctgatctataaatgcggtggcatcgacaaaagaaccattgaaaaatttgagaaggaggctgctgagatgggaaagggctccttcaagtatgcctgcctctccaggatgtctacaaaattggtggtattggtactgttcctgttggccgagtggagactggtgttctcaaacccggtattggtggtcaactttgnttccagtcaacgttacaacgg

SEQ ID NO: 158314 - DNA, 1110 bp, Homo sapiens
  misc_feature (1)...(1110): n = a,t,c or g
atggacataaagaagggaataacagacatcagcgcctctttgagagtggagagtggatgggaagccagaacgagaaaggaaaagactcatatcaacactgtgatcatcggacacgtagattcgggcaagtccaccactactggccatctgatctacaaatgcggtggcgtcgacaaaagaaccatcgaaaaatttgagaaggaggctgctgagatgggaaagtgctccttcaagtatgcctgggtcttggataaactgaaagctgagcgtgaacatggtatcaccattgatatctctttgtggaaatttgagaccagcaagtactatgtgactatcattgatgccccaggacacagagacctcatcaaaaacatgattacagggacatctcaggctgactggtgctgtcctgattgttgctgctggtgttggtgaatttgaaagctggtattctccaagaatgggcagacccgagagcatgcccttcttggcttacacactgggtgtgaaacgactaagttgtcggtgttaacaaaatggaattccagttagccaccctatagccatgaagagatatgaggaaattgttaaggaaggcagcacttacattaagaaaattggctacaaccccgacacagtagcatttgtgccaatttctggttggaatggtgacaacatgcatggagccaagtgctaacatgccttggttcaagggatggaaagtcacccgtaaggatgggcaatgccagtggaaccacgctgcttgaggctctggcactgcaatcctaccaccaactccgtccaacttgacaaagcccttgcggcctgccctcttccagggatgtcttacaaaattggtgggtattgggtactgttcctgttgggccgagtgggagactgggtgttctcaaacccggtatgggtgggtcacctttggctccagtcaacgttacaaacggaagttaaaatctgttcggaaatggcaccatggaaggttttgagtggaagctctttcctggggggacaatgtggggctttcaatgtttcaaggattgttgttctgttccaaggnatgtttcgttcttgggcaacttttgttnggtgnacaca

SEQ ID NO: 158315 - DNA, 415 bp, Homo sapiens
cagtgttggcgatccatgtcctagcacagcatctgtagaccaatgcacaatcgtgccttgaccgatggagggaccattactgctgtataggaggtgcattgagggcgtaggaggaatattcctttgggatccacaaccctcgagcccccagcatcctggagcaacaccttctacgggcgagccgggcttccctgtcgttcaccaggacctgagccatatacagcagcccgctgctgtagtggctgctctgaacaaccacaaacctcccgtgcggagctaacctccatctgccactcccgaggctttcacgtgattcagcaaatgcgatgacctcgacgaggagctcagtctcttgagatactgccatgctttcagtgaatgctaacatgatatacgtccgtctcatatccatccg

SEQ ID NO: 158316 - DNA, 360 bp, Homo sapiens
actgaacgttttgggatgtaaggaggagaggctgtctgcctttatgaagagccagtgtctgaattgctgaggagatgtgggaattgcacacgggaaagctgggtggtttccttttacctttcagctgaccatgaactcctgagcccgaccaactaccacttcttgtcctcaccgaaggaggccggggggctctgcaaggcgcagatcactgccatcatctttcagcaaggtgacatatttgtttttgacctggagacctcagctgtccgtccctttgtttggtggcaggttgaagctatcccagtagactacctaccttgttccttcgtgatgattatccccaccctatattgttcaccc

SEQ ID NO: 158317 - DNA, 378 bp, Homo sapiens
taggcggcaggcctgcttgggtcttcggcatttgcagagagctctctaaccccctgtgtcctccgagaccctcaccttccccctcccccaccggccggttttgttctatttcgaggccctggcgtctcgcggagggttctgggggtcgtgatgggagggaggtggtagtgggaccatacttgcgcggcgcttttgggatttgcaggcttaccggccgcatgcgcaagtgcccggcttcctacgctagagtcacctgatggctgtcggccatgctgaagccaccgacctgactgctctcaccatgttgatcttgaccccagaggcgtggcagctacacacaatactgtatctgtcaggcctgctggcgatgctccctgg

SEQ ID NO: 158318 - DNA, 564 bp, Homo sapiens
cttcttccataaggataaacacaaatttcctatgtaaaaacaacttctctctttttgcctccctaagtacattatctacacctgtcttctgcaatttagcatgccttaacttgtgctgtacatggcttacatagtttattacctaccagacagtaagtcctttataagaatgaggtacacgtttgactcatcttttacttttcccacagttcttttcatagtgctttagaataaatatttattgaacaatatttattttatatttatgaatatcatagaaattacagtttaaaatctttgatactggttattttatgattttatgattgcagaaaaaattcttaacggatacttttgttgttgttgttgagacaggtcttgccctgtcgcccaggctggagagctgtggcatgagcgcggctcactgcagcctcgacctcctggggtcaagcaatgctcctacttcagcctcctgagtagctgggaccgcaggcatgtgccaccacacctggctaatttttaaacatttttctgtagagatagggtctcccctgtgttgcccag

SEQ ID NO: 158319 - DNA, 5195 bp, Homo sapiens
gaactggcccagaatcactctcgccctgctccggcgtctgcgccgggcggcggtggcggcggagacccgaacatggcgaccgcgcgcaccttcgggcccgagcgggaagccgagccggccaaggaagcgcgcgtcgtgggctcggagcttgtggacacttatacggtttacatcatccaggtcactgatggcagccatgagtggacagtaaagcaccgctacagcgacttccatgacctgcatgaaaagctcgttgcagagagaaagattgataaaaacctgcttccgcccaaaaagataattgggaaaaactcaagaagcttggtggagaagagggagaaggatctggaggtctacctccagaagctcctggctgccttccctggcgtgacccccagagtactggcccacttcttgcattttcacttctatgagataaatggcatcaccgcggcactggctgaagagctctttgagaaaggagaacagctcctgggggccggcgaggtctttgccattggacccctgcagctgtatgccgtcacggagcagctgcagcagggaaagcccacgtgcgccagtggggatgccaagaccgacctcgggcacatcctggacttcacctgtcgccttaagtaccttaaggtttctggcacagaaggaccttttgggaccagcaacattcaggagcagctcctgccgttcgacctatcaatattcaagtccctgcatcaggtggagataagtcactgtgatgctaagcacatcagagggctggtcgcatcgaagcccaccttagccacgctgagtgtccgcttctcagcaacctcgatgaaggaagtccttgttcctgaagccttattaatttgatgagcgggagcctgaaggcacaaccctagaaggccctgtgactgccgtcatccccacttggcaggcattgaccacgcttgacctgagccacaacagcatctccgagatcgacgagtctgtgaaactgatcccaaagattgagttcctggacctgagtcacaatggattgctggttgtggacaatctgcagtacctgtataaccttgtgcatctggacctgtcctacaacaagctctcctccttggaagggcttcacaccaagctggggaacatcaagaccttaaacctgggcagggcaacctcctaggagagtctgagtgggcctgcacaagctcttactcactggttcaacctgggatctccggggacaacagggattcgaacagatgggagggaggttccggagcatagggcagcctcccgtgtctggagcacgtgtctctgctgaacaaccctctgagcatcatccccgactaccggaccaaggtgctggctcagttcggagagagggcctcagaggtctgtctggatgacacagtgaccacagagaaggagctggacactgtggaagtgctgaaagcaattcagaaagccaaggaggtcaagtccaaactgagcaacccagagaagaagggtggtgaagactcccggctctcagctgccccctgcatcagacccagcagctcccctcccactgtggctcccgcatctgcctccctgtccccagcccattcctctctaaccaaggaatcatgttcgttcaggaggaggccctggccagcagcctctcgtccactgacagtctgactcccgagcaccagcccattgcccagggatgttctgattccttggagtccatccctgcgggacaggcagcttccgatgatttaagggacgtgccaggagctgttggtggtgcaagcccagaacatgccgagccggaggtccaggtggtgccggggtctggccagatcatcttcctgcccttcacctgcattggctacacggccaccaatcaggacttcatccagcgcctgagcacactgatccggcaggccatcgagcggcagctgcctgcctggatcgaggctgccaaccagcgggaggagggccagggtgaacagggcgaggaggaggatgaggaggaggaagaagaggaggacgtggctgagaaccgctactttgaaatggggcccccagacgtggaggaggaggagggaggaggccagggggaggaagaggaggaggaagaggaggatgaagaggccgaggaggagcgcctggctctggaatgggccctgggcgcggacgaggacttcctgctggagcacatccgcatcctcaaggtgctgtggtgcttcctgatccatgtgcagggcagtatccgccagttcgccgcctgccttgtgctcaccgacttcggcatcgcagtcttcgagatcccgcaccaggagtctcggggcagcagccagcacatcctctcctccctgcgctttgtcttttgcttcccgcatggcgacctcaccgagtttggcttcctcatgccggagctgtgtctggtgctcaaggtacggcacagtgagaacacgctcttcattatctcggacgccgccaacctgcacgagttccacgcggacctgcgctcatgctttgcaccccagcacatggccatgctgtgtagccccatcctctacggcagccacaccagcctgcaggagttcctgcgccagctgctcaccttctacaaggtggctggcggctgccaggagcgcagccagggctgcttccccgtctacctggtctacagtgacaagcgcatggtgcagacggccgccggggactactcaggcaacatcgagtgggccagctgcacactctgttcagccgtgcggcgctcctgctgcgcgccctctgaggccgtcaagtccgccgccatcccctactggctgttgctcacgccccagcacctcaacgtcatcaaggccgacttcaaccccatgcccaaccgtggcacccacaactgtcgcaaccgcaacagcttcaagctcagccgtgtgccgctctccaccgtgctgctggaccccacacgcagctgtacccagcctcggggcgcctttgctgatggccacgtgctagagctgctcgtggggtaccgctttgtcactgccatcttcgtgctgccccacgagaagttccacttcctgcgcgtctacaaccagctgcgggcctcgctgcaggacctgaagactgtggtcatcgccaagacccccgggacgggaggcagcccccagggctcctttgcggatggccagcctgccgagcgcagggccagcaatgaccagcgtccccaggaggtcccagcagaggctctggccccggccccagtggaagtcccagctccagcccctgcagcagcctcagcctcaggcccagcgaagactccggccccagcagaggcctcaacttcagctttggtcccagaggagacgccagtggaagctccagccccacccccagccgaggcccctgcccagtacccgagtgagcacctcatccaggccacctcggaggagaatcagatcccctcgcacttgcctgcctgcccgtcgctccggcacgtcgccagcctgcggggcagcgccatcatcgagctcttccacagcagcattgctgaggttgaaaacgaggagctgaggcacctcatgtggtcctcggtggtgttctaccagaccccagggctggaggtgactgcctgcgtgctgctctccaccaaggctgtgtactttgtgctccacgacggcctccgccgctacttctcagagccactgcaggatttctggcatcagaaaaacaccgactacaacaacagccctttccacatctcccagtgcttcgtgctaaagcttagtgacctgcagtcagtcaatgtggggcttttcgaccagcatttccggctgacgggttccaccccgatgcaggtggtcacgtgcttgacgcgggacagctacctgacgcactgcttcctccagcacctcatggtcgtgctgtcctctctggaacgcacgccctcgccggagcctgttgacaaggacttctactccgagtttgggaacaagaccacagggaagatggagaactacgagctgatccactctagtcgcgtcaagtttacctaccccagtgaggaggagattggggacctgacgttcactgtggcccaaaagatggctgagccagagaaggccccagccctcagcatcctgctgtacgtgcaggccttccaggtgggcatgccaccccctgggtgctgcaggggccccctgcgccccaagacactcctgctcaccagctccgagatcttcctcctggatgaggactgtgtccactacccactgcccgagtttgccaaagagccgccgcagagagacaggtaccggctggacgatggccgccgcgtccgggacctggaccgagtgctcatgggctaccagacctacccgcaggccctcaccctcgtcttcgatgacgtgcaaggtcatgacctcatgggcagtgtcaccctggaccactttggggaggtgccaggtggcccggctagagccagccagggccgtgaagtccagtggcaggtgtttgtccccagtgctgagagcagagagaagctcatctcgctgttggctcgccagtgggaggccctgtgtggccgtgagctgcctgtcgagctcaccggctagcccaggccacagccagcctgtcgtgtccagcctgacgcctactggggcagggcagcaggcttttgtgttctctaaaaatgttttatcctccctttggtaccttaatttgactgtcctcgcagagaatgtgaacatgtgtgtgtgttgtgttaattctttctcatgttgggagtgagaatgccgggcccctcagggctgtcggtgtgctgtcagcctcccacaggtggtacagccgtgcacaccagtgtcgtgtctgctgttgtgggaccgttgttaacacgtgacactgtgggtctgactttctcttctacacgtcctttcctgaagtgtcgagtccagtcctttgttgctgttgctgttgctgttgctgttgctgttggcatcttgctgctaatcctgaggctggtagcagaatgcacattggaagctcccaccccatattgttcttcaaagtggaggtctcccctgatccagacaagtgggagagcccgtgggggcaggggacctggagctgccagcaccaagcgtgattcctgctgcctgtattctctattccaataaagcagagtttgacaccgtcttaaaaaaaaa

SEQ ID NO: 158320 - DNA, 1129 bp, Homo sapiens
tcccctcccactgtggttcccgcatctgcctccctgccccagcccatcctctctaaccaaggcatcctcggagatgagtgagtgattttggtctcatgagcgtgtctgctggcccggcccgcacggaagaggggagggtgtgccgtcccgagtggagccgaggctcgggacacgcaggaaaggacgccgcctgcccgggctcctggagacgcagaacttggtgtgaggtcttgggaaaacagttcaacccgatgttttaagagccagaaaaacattcccaccccttgacctggtaaccccactggtggggattttctcttagagggataagataccgggaaggggaggtgaaatgctcaccactgccaaaacacgggctgcaactgcaacatcggaggatgagagggagagtcggctgtggtgcagaatgctcagcagcccttcccagcagggacaggaagactgggcaggaagaggggagaagcattcaagttaaggcaaaaggcccaacgcagagcagcacactgaggtcacacctgtgagatgtggaagagaattcctgagcgtggagcgatggggttaggtgccaggatgattgcccattttgcttctgtcagactcttgactaaggatttctggttgcattttattacataaaagccagggaggttatatcacgttaagaaagcttcccctgacgccgccctcctgtagcgcagccaaagcgagcctgtggaggtaccatatgactgtaaggccctctggggacacaggagctgcatctgccttcctcaaaggcccagggacacagcccatttctgcccagcatctgttgaatcagtgaagtgaagtgagtgggcaggtagagcaggagcccagtgaagagcaggccctggatgggtggggatgcaccatgtcccccagggctgcacgtgcaggcagccccccacattgtcggagaagcctctgcaccagctcagccccctcctcactccccttgtgccctggggacactctgcagaggggcactctgcagtctgtccccgccatcgctggacttctggacatggcctccagatttgcacctcttaaataaaactgcagtggatgtcaaaaaaaaaaaaaaaaa

SEQ ID NO: 158321 - DNA, 417 bp, Homo sapiens
agccaccaccactctggttcaatcaggatccacatgttgaaagcaaaggcctggcggcagggaggcctgtaccaagcaccagccaaggacgaacacaattcagaggttctgcgcctcccccgaaagaccctctaccgaggactgggccgtcagccaaccgacgggttccacacacattccaacccgacatctcgttcccgggatctccaaaacctccgtcttaagaccgcccgcatcccaaccctagcctcaggtccccactggtgtcacacagcgttcacaatcaagcagggaggtgggcaaaggtgcaagctacggccagagagagaaaaagtgacacaaaaagtatctggctctggagatggagaaggattctcaagaggaccagaagcaactcactctacaccctccatggtt

SEQ ID NO: 158322 - DNA, 1243 bp, Homo sapiens
aaaaaaaagtaatctcagaatgttggccgagcatggtggctcacacctgtagtcccagttatgcaggaggctgaggcaggagaatcacttgatctcaggaggcggaggttgcagtgagtcgacatcacaccactgcactccagcctgggggacagagtgagacttcgtctcggaaaaaaaaaaaaaaaagttgacaggatggccagacccaagtgggcgtattaagtggtggtgctaggattggaacccaagcgtgattaaaaccctattgcaggccctttcctctatattgtactgcctccttaacaaaggaagattgattaagcccctactttgtgccagtctctgttatcaagtccgttaaatgcatttaacgttaaattttttcttttttggtttaaaaaactctagtttcttaaactactagtttttagtgtcttgctaaaactatgtgctcttgaataggctacaacttatttcacactatctcattggaactctcctggtatgtgatagtgttataatgaaaaattgcataccaggacagctaagtctattttgcaaccatacagcgtttcataatttagcatttaaaatacagacagtccccgacttttggtggtttgatgtgggatttttggtggaaaagcagtatacattcagaatgcacctctacttatgatggggctacttcctggtaaacccattgtaatgtgcaaattacgggtttatcaggaggtgaccccatcggtaatggagaagtgctgggattataggcgtgagccactgtgcccagcctcacagctgcatcttaaccttacctttgcctctgcctctcaagctggtacctcctaatttacatcctaagagtggaaccatgtgacaaggactggagtgccattggctgtggactgttcaggcagggaagtacaagaccactcttgtattcaggggcaacaaaaggagagaattacgtacttgttgagtacaaactgcaccaagccctggagacccattaccaccgttaaccctcaatacagctctgctagtaagggattcgtctccccaaatgaaaaaaaagtaatctcagaatgttggccgagcatggtggctcacacctgtagtcccagttatgcgggaggctgaggcaggagaatcgcttgatctcaggaggcggaggttgcagtgagtcgacatcgcaccactgcactccagcctgggggacaggagttgattcgtctcg

SEQ ID NO: 158323 - DNA, 765 bp, Homo sapiens
ggctggagtgcaatggcacaatctcggctcactgcaacctccgcctcatggtttcaggttgattctcccgcctcagccttccaagtagctgagattacaggcgcccgcgactacgcccagctaatttttgtattttagtagagatggggtttcaccatgttggtcaagctggtctcaaactccagacctcgggtgatctgcccctcagccttccaaagtgctgggattacaggcgtgcgcacccgctggcttaaattcttgtactctctgatggtcttcccctttggaagatcttaacaattatcactgccttaggagctctgatcttccttttaacttctgacccaaggatggacacttactttttcctcttaagcttaagactttatcaaggataatagctggaattaaaatagagaaaaaaattagctagctcaccagatattctgaaaacactgttcctgagaaacccttatacgtttttataggttgacgtcttccttggtctataatttccatgggacaaagacatttctctacctgggagtgcccttaaattcaagctctggaaatcaaggtctagggaaaaattcattcaccagtctgagacctaccttccaggtccccattttctgtcccagttgtcttttctctagattataaacactaaacaaacatgtgtgagtctctttagaggggatcccaaaacccagccctggtggtttgcctcgtgccaagctggcgtatgatgttacaaggtttagt

SEQ ID NO: 158324 - DNA, 623 bp, Homo sapiens
agacagagtcttgctctgtcacccaggctagaatgcagtggtgccatcatagctcactgcagtcttgaacccctggggctcaggcagctctgctgcctcagcctcccaaaatgctaggattacaggcatgagccactgagcctggcctgcttatttcttttctatcccccagaacacctaacatagggtacctataaaatacagatgtagcatcaatgtggataactgatgaaaggtattagggcatagtaaaaagaacatggactttgttgtcagaggtgccagggttcaagtactatttattccatttaataaatatgtgtccaaaacatatttggacatatatgtgaacaaaacatccttcacagggcttttgtgaggggcaagagctttcatgtgcaagaggcaaggaaactgattatcttgagtaaatgccagcctttgggctaagtacttaccacagagtgaatcttcaaaaaatgatcataattatttcagtcaataaaaatagagttattttattaaataaaatattgataattattgtattattactttaaacacacttccccctcacaaaagccctgtgaaggatgttttgttcacatatttggacatatatg

SEQ ID NO: 158325 - DNA, 410 bp, Homo sapiens
aaacttgttggactggaaccagtcagcacctactctatccgtgtatctgcgttcaccatagttggaaatggcaatcaatttagtaatgtagtaaaattcacaacccaagaatcaggttagatacagtttttgagcctaaaatgtttctttttatatttaacacctttcttttccttttcttagtttatatgataaagtatcattacttaagagtctactcaaagggaaattgcatttcagtgctttacgtttagtcttggtcttgtgtgaaatcatatgctgtatgtgtgtttatacatatattttcacacatggtttttccttttgaacagaggaagttgaaataaaatagtagtttgggaacaaaatagccttctagatatctgtgaaaattacctaattcttagaac

SEQ ID NO: 158326 - DNA, 461 bp, Homo sapiens
  misc_feature (1)...(461): n = a,t,c or g
ngggcaggtgaggggggcttgcaagccttgattctgagggatggggcttggcctcagcctccctcaggtgactgacaggtgaagggtctagagcctcttaccccagcacccgcggggtcctcacaggggccggggccaggcccccccattgccagcagccctgtaggacagagcaagactgacacagccactaccaccaaagtgggccctgtgggtggagggcagccggcacccatgcaccagcagcttcctccctcacccggggaccccgccgctgaggacgcccatacctggggagagaggagcctgtcagggatgaagggcaaggnnnnnnnnnnnnnnnnnnnnnnnnnnnnnnnnnnnnnnnnnnnnnnnnnnnnnnnnnnnnnnnnnnnnnnnnnnnnnnnnnnnnnnnnnnnnnnnnnnnnnnnnnnnnnnnnnnnnnnnnnnnnnnnnnnnnn

SEQ ID NO: 158327 - DNA, 408 bp, Homo sapiens
tcttcccatcagggccagtgtggtggtcaagaagctacggggtattcatgggcccatgccctaggcgcggggcaggagggcccagagcctcctggccccttgtcaggagcttagcattggaaggaaagagggagcctgtatccagcctaaacccaggggtctgcatgtgtcctgcctggccagggccaccttcccagacctcaagccaccccacctaccactgcccacctggtgccaccccagcactgccgcagacctggcccagcagctcctgctccttagcaggggatgagcacgcccaccacagccaccctcttctccaggctgcagggcaggctccagctccccatgggggccccatcaggccagggcccctggctttactgcaggggagagggtcctcgtgcc

SEQ ID NO: 158328 - DNA, 390 bp, Homo sapiens
cccaccccttctccagactgtgggcggctccccttcctctttagaatccctcagatggaggaggcagtacagtagtctgtgccatcgtgtctggcactgtgctggcgtggtctgcaggatcccacttatgaactctccagattgggagctgtggcaggataacagcccccaagacagctgtgtcctaatccccagaacctgtgaccacgctgcctcacgtggcagaagggactcgtcaggtgtgattgagtgaaggatcttttttttttttttctttgagatgaagaatcgcttggacccgggaggcggaggttgcagtgaaccgagattcgccactgcgctccagcctgggtgagatagaacaagactgtgtctcaaaaaacaaaacaa

SEQ ID NO: 158329 - DNA, 1071 bp, Homo sapiens
agactgtgtctcaaaaaacaaaacaaaacaaaacaaaacaaaaaaaaccaaaccactttggaagttactcaggcctctgctctggctggacatagtttagtctataactttcaacccttaacaataattaaattcatctttgtttaatttcataaatttaaaagtagggtccttttcagttagggattctcagccctgattcacattaaatttttaaacacgggggattctctgcccggctggaagaaaatgactgggatggggacaggggtcactatttgaaacattcctctgtgcggccaaggtcgcaaaatgctgtcctcgcagggggaacaaaaagagtttgatttcccataatttggatgctgtggatttggtttcctcaggatgtgaactgtagaacattccagttactggccttgaatggttctgggaatataagaatccctgtctgtcttttcaaatagttttcatggaaccttgtcctgtttgaacttggctgaaaatggaagtaaagatgccctcttgggggcccagagatgacagatgtggctccccctgctgcccccaccccttctccagactgtgggcggctccccttcctgctttagaatccctcagatggaggaggcagtacagtagtcactgtgccatcgtgtctggcactgtgctggcgtggtctgcaggatcccacttatgaactctccagattgggagctgtggcaggataacagcccccaagacagctgtgtcctaaatccccagaacctgtgaccacgctgcctcacgtggcagaagggactcgggcaggtgtgattgagtgaaggatcttttttttttttttctttgagatgaagtttcgctcttgttgcccaggctggagttcaatggcatgatctcggctcactgcagcctctgcctcccaggttcaagtgattttcccacctcagcctcccgagtagctgggatttcaggtgtccagaaccatactggctaatttttgtatttttagtagagacagggtttcaccatgttgaccaggctggtctcgaacttctgacctcaggtgat

SEQ ID NO: 158330 - DNA, 438 bp, Homo sapiens
  misc_feature (1)...(438): n = a,t,c or g
gggcgcctggttacagaattaccccccaagacctttaaaaaacccccttttccaaaatttttaaaaaatcccaaaaaaaaaaataaaggtcgggggggggggttcccccccgtaatcccccccctttggggggccgagggggggggtttccccaggggccggggtttcaaataaccctttcccccaaggggaaaccccttttttttttaaaaagccaaaatttcccgggttagtgggccccgccccttaaacccccctttaaaggggggtaaaccaaaaaaatttttttaaccttggaggggggggttccaataaacggaaattttcccccccccccccccccgggggggaaaaattttttttcaaaaaaaaaaaaaaaaaaaaaaaagaagnaatanaacagtgtatgaggggaatgccatgtaaaatctgaaataa

SEQ ID NO: 158331 - DNA, 403 bp, Homo sapiens
gttggagctgtctgtgattgggtttgaggagggaccatctatgggaactgtgttgttccagctacagtacctgctggatctcctggggtcccggctgtgggtggccagccagggcccttgcctgtcctgtgaaggacatccccagagacctgtccccctcttggagttactacagggagcttgtgcttggcaccctaccacagcctgagctttggaggacatgggctcccaggtacacccagagaggctgggtagagagagggagggaatagtcttcagctccaactgccaaaccctaagccttttcttccctctaggccagaggaccccacctggagccctagtagccaaggggaagagttaagaaggaggaaagtaaggtgcgatctgaagtctctgacct

SEQ ID NO: 158332 - DNA, 542 bp, Homo sapiens
tttttttttttttttttttgcaagaaagaaattgtttttattgcattgaggacttttccagaagcctggtggaacccacgttctccctccagccccaaaggcagtgcaagcctctactgatcccccacttaaaggtgggtctcccctcctgcagggcccatggaggaggggtagggtgggctgtaggggggcccagaagggaggccctggggacagagggagttcactcctgtttaagcctggagaccagggagggcccagcctcacctctgggcaacacagcaagtcagaggctggggtgtggcaggggctcagctggtcacctctggggtgtggcttcctcccggaaccgcaccagaggcccctggagcccagggagggaccacggagggcaggtgtaacccctggcctggagcacagctctcagagccctgaggctcccggggacagaaacaagtaacaaagtgagaccacgagagaaaaagaatccacagtttctacaaaaagccccaccctccccaagcaccctggtcagctgggga

SEQ ID NO: 158333 - DNA, 609 bp, Homo sapiens
  misc_feature (1)...(609): n = a,t,c or g
agtcataaaaccaatgtccagcagtgttactgctattgtggaggccctggagactggtatttgaagatgctacagtgctgcaaatgtaagcagtggtttcatgaggcttgtgtgcaatgccttcaaaagccaatgctatttggagacagattttatacgtttatatgctctgtctgcagttctggaccagattaccctcaaacgtctacccattacagtgggtagatatagcacacctatgcctttaccaacctaagtgttattcataagaagaaatactttgattctgaacttgagcttatgacatacgattaatgaaaactgggatagattgcaccctggagagctggcagacacaccaaaatctgaaagatatgagcatgttctggagggcattaaatgattacaagaccatgtttatgtctgggaaagaaataaagaagaagtaagcatttgtttgggttgcgtaattcgtgttcctcctgtgccaccaaatgtggctttcaaagcagagaaagaacctgaaggaacatctcatgaatttaaanttaaaggcagaaaggcatccaaacctatatctgattcaagggaagtaagcaatggcataga

SEQ ID NO: 158334 - DNA, 739 bp, Homo sapiens
gtttatgcttaatgttagaggtactggaaaatggtatgtttcttactactttttgtacttcctattgatatctgttaggaacttttatagtaaatattaaaataattctaatgtattatttccctaggttaaagaatttttgaaaaatttaataactaataatacagtcccatttttgtggtgttttacagtttgtagttccttcataaacatatcgttggattaatgtaatgaacaagtaactagtgtaggatttaaacttcattttttataagtgagaaaataagccttgagaggttaaatggccctaggtcacataatagtcagtgaggacttggaattagaacttagatcttctgactaccaatcagtacacttttcctctgcatcacattgcctctatctagcacctgtatattactaattgatgaaattgtagtgcgttaaattgtttcttgatacttcacagctggcagacacaccaaaatctgaaagatatgagcatgttctggaggcattaaatgattacaagaccatgtaagttgatttattttatgtatccctatgagggagacatttagtaagtataaggaataatggcattgtttaagaattgtgggattgatgtacagaagaagtctataccattttaaactttataatgtcctattctattttagttagattaaagcagtgattctcaaggattggaggagggaggagtaatccttctcctggg

SEQ ID NO: 158335 - DNA, 898 bp, Homo sapiens
cattttccttatatggaaaaaaaatatgaaaggtgttcatgaggctgatcacatttcatatattttttgaccatttggatttcatctttggtgaatgaagtgtgttaaagttctcccatttttctcatgaatttgcaggtggttctttatatattctggctactactcctttatgagttgtgttgcagaatcttttctcactttgtggtttgtcttttcacaatgtttataaatatagtaacattttaattttaatatcttcaaataatagttttcctttatggttagctcggttttttttatggttatgttaaaaatatagttaatattctcttgttacatgctttgtagttttgcctctcacattttggtttcatcccacttggaacaatcttcaacatatagtatgaggtaatttttttgctgctatagggctagtctgttgtgccagcactgtttattgaaaaaaaacaaaaacaaaaaaccttccttttcctattgctttgaagtgccttttctgttgtatattggcaatatatgcaaagatcttttatgggctctttattatattggtttttttcctgtgctaatgtacactctcttcattacttcatgatcttcaaaaaaatttttgatatataatatcaaagtcctttcacatccttgttattcatcaacagcttgtggctcttcttggttctctgctcttctttatatattttagaaatagcttatcacgtttcactaaaaaaagccgaacacattgaaaatttgattggagttgcgatgaatctataagctattttgggagaatttatatcatagtgggcctttcaatccatgaacatgatatattgctaagtccttttaatgtcttaataaaattttattaatcacc

SEQ ID NO: 158336 - DNA, 1363 bp, Homo sapiens
  misc_feature (1)...(1363): n = a,t,c or g
agtacataccgaattccctggtcgactccacgcgtccggatctaggcaccggtccgagtgcctgccctctgtccccgcggctgggtctcgtctgctccggttcctgggctcctaattctcggtccagcttcttccaggtctgcgcgtctgttgttcccagcgctctgcgaagcctgaaaaggaggagcaacctgtccagaatccccgcaggacaggaaaaggaggggaaatctcgacatggaaaaactctacagtgaaaatgaaggaatggcttcaaaccacggaaagatggaaaatgaatagcagccacaagaccagagaaagccacaagtaactttgtactctgggagacaagaagttagaaaacgagggaaagacagaaaacaagggcaaaacaggagatgaggaaatgtttaaaggataaaaggaaagccagagagtgagggagaggcaaaagaaggaaagtcagagagggagggagagtcagagatggagggaggatcagagagagagggaaaaccagagatagagggaaagccagagagtgaaggagagccattggagtgaaacaaagggctgcaggaaagcgcccagctgacggatgatgtacccaggaaagccaaaaggaaaaactaataaggggctggctcattacctcaaggagtataaagaggcccatacacgatatgaatttcaggcaatgaggacatgataaggggaattttacaatatggctaaggtgcaggatgaggaagagaaaaagcaaacagaaaattggggggcgtttttgtgggatgcaaagaaatttaccaggacccctttttaccctagagggtccaagggaaattcagggggtggctgcaggggccccaccgaagggacatttaaaaacattccttatggtgtagtgtcccctggcaggcatttaccaggcccatgtgcttttaacgttacggtaaatacttttacttttagggcatcccctccctggttgctaagcnagccctttttgaccttatcctgcaaatgccaggtgttcctccagtagggaaatggtccatcctgttaccatgggaaaaaatggttgatgggtgcattgtaaaattaaaaaaacacaacttgcagaacccaaatatatggcatcagtacatttttgtaaaactacaaagatacttaccctagtaatatagtatagaaaacaattctgaaagctgtgtccactaaaagattaacagtggttatctctgggtgattttttctgttcttttttgttcatctgtccatttttctcctaaaaacagatttctttagtcataaaaataataaaatataaagtattggaaaacagtgaaaaaaaaaaaaa

SEQ ID NO: 158337 - DNA, 413 bp, Homo sapiens
  misc_feature (1)...(413): n = a,t,c or g
tcgtgacgggggtactggtgtacctggctgtggagcgtttgatctctggggactatgaaattgacggggggaccatgctgagcacgtcgggctgcgctgaggctgagaacatcataatggggtagacccttcaccagtctggccatgggcacagtcacggtaccaccaaccagtaggaggagaaccccagcgtccgagctgtcttcatccatgtgatcggcgactttatgcagagcatgggtgtcctagtggcagcctatattttatacttcaagccagaatacaagtatgtagaccccatctgcaccttcgtcttctccatcctgngcctggggacaaccttgaccatcctgagagatgtgatcctggtgttgatggaagggacccctcagggcgtttacttcacagctgtt

SEQ ID NO: 158338 - DNA, 427 bp, Homo sapiens
  misc_feature (1)...(427): n = a,t,c or g
cccatnnnnnnnnnnnnnnnnnnnnnnnnnnnnnnnnnnnnnnnnnnnnnnnnnnnnnnnnnnnnnnnnnnnnnnnnnnnnnnnnnnnnnnnnnnnnnnnnnnnnnnnnnnnnnnngcctggaaagtttatcccataaaagatcatctcctaggcacatagtcatcagattatctaaagcgaagacaaagaaaagcgtcctaagagctgtgaggcaaaagtatcaaataacctataaaagaacacctattagtttatcagtagattgctcagcacaaaccctacaagcaagaagggatttgggtcctaccttttgcctccttaaagaaaacaataatcagccaataattttgtatccagtgaaataaagcttcataaatgaaggaaagatagtctttttcagagaaataagtcctgagaggatttgc

SEQ ID NO: 158339 - DNA, 412 bp, Homo sapiens
  misc_feature (1)...(412): n = a,t,c or g
caaaaaccctaagatctgataaacaaaatcagtaaagctgcaggatacaaaatcaacacagaaaaatcagtagcatttctatatacaaacagcaatcaaactgaaaaagaaatcaagaaagcaatcccatttacaataactaccaaaaacaaaacaaaatacctaggaataaatttaaccaaagaagtgtaagagctataccaggaaaattttgaaacactgatgaaaggaattgnnnnnnnnnnnnnnnnnnnnnnnnnnnnnnnnnnnnnnnnnnnnnnnnnnnnnnnnnnnnnnnnnnnnnnnnnnnnnnnnnnnnnnnnnnnnnnnnnnnnnnnnnnnnnnnnnnnnnnnnnnnnnnnnnnnnnnnnnnnnatttttttaaatcctacaatttataaaaggtataaca

SEQ ID NO: 158340 - DNA, 412 bp, Homo sapiens
  misc_feature (1)...(412): n = a,t,c or g
aaaaaatatgacagacataaaaccaactgtattgataattaagtataaggggtctaaatattataattaaaaggcagagattataagactggataaaacagcaagattcaactctatgctgtccctaagaaatacacnnnnnnnnnnnnnnnnnnnnnnnnnnnnnnnnnnnnnnnnnnnnnnnnnnnnnnnnnnnnnnnnnnnnnnnnnnnnnnnnnnnnnnnnnnnnnnnnnnnnnnnnnnnnnnnnnnnnnnnnnnnnnnnnnnnnnnnnnnnnnnctttaaacataaaaatacagataagatacaccacgcaaacattaatcgtaagaaagctggaatggctatatcagaaaaagtagacttcaggacaagaaattngaccagcgatanagacaggtatttataatta

SEQ ID NO: 158341 - DNA, 396 bp, Homo sapiens
cagcaacggcggcctccaggcctcaggccccctcaccatcctagaggtcaagatcagctctggctaggtaaggggtggggggcggcacagctataggaaggaccgagcggagggagtagggggaggggagtggagagagagcgcgggaggaggaggaagggaaggaaagggagggcgtgaagaggcacccggaaggcaggaggagagggcaggagggaaactgcactcgcctccctcccgctccgtggccacaggtccccgcaagaaagaccccgtcccactctctgaggtctcctcccagctccagaaaaggggacattccacctagtctgcccaacaagtaggtctcagccactgtgccaggagctcgggactcccttccttcaaaaggtcctg

SEQ ID NO: 158342 - DNA, 452 bp, Homo sapiens
  misc_feature (1)...(452): n = a,t,c or g
actgctaagactacctttttcagaaatgcgcatagcaaacatctttcatagaatgtctgcaaacctgtggaggagacacagcgcccgcccacactgcaggagatcaagcagaagatcgacagctacaacacgcgagagaagaactgcctgggcatgaaactgagagaagacggcacctacacgggtttcatcaaagtgcatctgaaactccggcggcctgggacggtgcctgctgggatccggccccagtccatctatgatgccatcaaggaggcgaacctggcggttaccacggacaagcggacatccttctacctgcccctagatgccatcaagcagctgcacatcagcagcaccaccaccgtcagtgagggcatccaggggctggtcaagaagttcaatggtgtggacaatccccagaaggttgcactatttaagcggatacacaaggn

SEQ ID NO: 158343 - DNA, 549 bp, Homo sapiens
aatgtgctctgtggaaataatcaaatatctgacttaggcatactgcttccagaggtgtgtatggccccagaggaaaagggagataaagacgaccaactcaacaaagaaacagaagactatttgaacagcctttttgaaggattgtttaaaggttactgaggattccctttcctatgaagataaccaagacgacgactccgatctccttcaagatctctctcctgaagaagcatcctatagtctccaggagaatctgccttctgatgagagctgtctttctcttgatgatcttgccaaaaggatagagattgcagaggttgttcctactgaaggattggtctccatattaaagaagaggaatgatactgtaggagatcatcctgcccaaatgcaacacaaaccatctaagcgaagagtgagattccaagaaatagacgatagcttggatcaagaatcacttggatttggagacggcgcactttaaatgaatgcagttatgtacataagtcatacctcaataaagttgttaaaaataaaaaaaaaaaaaaa

SEQ ID NO: 158344 - DNA, 1228 bp, Homo sapiens
acactattatgcaacagacagatttccatttgaaagggttagaatattgctgtattacacatattcatatgtcccttcttttccttcctatacaaagtgttgttttgaatttttaacaatttatttttcttcatctttagagagtaaaacttgtctcggcacagagtcaagtaaagaaagccaacatacagtggagcccctggggagcagtccctgctgtcatcagatggacgtgcaaacagattccccaagcctttcggtaactgcaggaaaggaccacatggaggagctgctctgcagcgctgaagccacgttagcgctccacacccagtcctccgagacagcagggagcccgtctgggccagactcttctgaggatgcttgtgaggatgacagtcgcttgcagctggctcaaacagaggcctgccaggatgtggccagaatagagggcattgctgaagaccctaaggtgtttctttccagcaagtcaaagacagagccgttgatttcaccaggctgtgaccgtatacctcctgcattgatttctgagggtaaatattcacaggctcagaggaaagaactccgtttgccacttcgggatgcttctgaggcgttgcccacagaccaacttgagaacaatgaattaaatgagctgcagcagcctgatcttacagacagtgatggaaaatcaccacaggcgcaggctgactcaaacggttctgagaatgtgctctgtggaaataatcaaatatctgacttaggcatactgcttccagaggtgtgtatggccccagaggaaaagggagataaagacgaccaactcaacaaagaaacagaagactatttgaacagccttttaaaaggatgtttaaaagatactgaagattccctttcctatgaagataaccaagacgacgactccgatctccttcaagatctctctcctgaagaagcatcctatagtctccaggagaatctgccttctgatgagagctgtctttctcttgatgatcttgccaaaaggatagagattgcagaggtaaatcagagatgaagtacaattaaaagtaaaatggcatttaaaaaacatatatatgtattaaatattgccttgtttttgtaagttttcccttgtctcaaacatgagggaaaattctagttaacgtaagcttttaattattagtagtttttacatttgtatgtattgaataaaataaattttaatcat

SEQ ID NO: 158345 - DNA, 674 bp, Homo sapiens
gtccgattctcgggagacacgcgtcgttattaacctaaaagattctgtgttttgtctatattgcaaactctttggggaaggaaaaaatcaagtgaaaaatgaaaatgggtgcaaagattggcaacatttatcacatattcttagtaaacatgaagaaagtgaaatgcacatcaacaatagtgttaagtactcaaaattaaaatctgatctgaaaaaaaataaagctattgatgctgccgaacgcagattatatgaaaatgaggaaaaatgatggtgtgctgttgttgtacacgtaatatacctgagttgttttttgggcatgatgatcaggaatcttacattactcaggaaaacatctgtcctggcaatagtcagtactattgtgttgtaagtctcctctacagagttaacttgcagcagttccttagcaataagtatgatagcaaataaatagcaaagaatgtttccattctaaatctaaaactaattagattcaatcatcattaggcaatgacttcattaggcaatgaagattaacaataggtaattgttaatcttcaaaatctatcaatttacacctatttaaaaattggcatttaatgactgccatttgatgggtttggttaaatattccggttccttgggccgggcgccaatgggcttcacggcctggt

SEQ ID NO: 158346 - DNA, 432 bp, Homo sapiens
aagcgtggagagaaggctcctgagacttctaaaactacatctacttggagaataccctgcaggaagagacgtctcagcaatagagactttccagacctgagtactggagaagagcttcctgaaacctgcggctcatgcctaagaagagggtcaggtagagaaaattaggatgccgagacttggcctgcacaatgcccggaatgtgaatcaaaagctgctgtttccacacgctttttattctgagcaccttcactaccttggatccagttcatgggggaactcctttttgcattttataaaatggaaagaggcccgaaattatgacaaactcatgcctaacataacgagcctccctgactaactggacgtacctatattttgctgttgcagaagaaacatagagcaaaattgtggcattcttttgtttaaacg

SEQ ID NO: 158347 - DNA, 420 bp, Homo sapiens
atgagccactgagctcgcccctattttgcccttagaatcaatccaaaatccacccgcctcccatcttcttggcccctacctggccccacccacatcatttcccaccaggaccagggcagccaccttttcccttgtctactggatcccacctggtcctctaacagaagccaaagggtgcccatgagcacctgagtgggatccctccctccttggctcaaaatcctacatgggttccacctcacccaggaaaaaggtccagtcctcactcagccacaaggccctgtaaaatctgccctcgtctccttgcaccctctactttgctaactccctctaaccttactgggccctgacccctccttcccggagcccttcctgggctccttggcccacctgagaacttttgcactggctgttttctct

SEQ ID NO: 158348 - DNA, 405 bp, Homo sapiens
aagattctgggactatggccgcattgccctggtgtcataagcagacagcgagtccagatttcagagattgtcatcgacttcctcctcaggtcaacaagactttgaaaatgagctggttggtatctaaggcccagttgtggtcatggccagggggtggggactggcagtcatggttttggggagggagcagggcggatcttgagcggcaagtgctggagaaagtgcttttctgcatcgacgaaggcacctgaacttgggaaataccacaggagggatggcagctggatgacccgggaccttgagactggatgaatttgcaggcaggaaggggtacggaatcccttgggcttccccagcacttctctctcttacacctatggctttgtatgacagttaattatggcg

SEQ ID NO: 158349 - DNA, 1018 bp, Homo sapiens
gactcacgcagccccagtcccgccagtccgccaacacagtagtgccggccctcctctttccctggccctgccccccctccccgcctttggctcgctccgcctttctgccccccacccccacctcacgggtacgggccattcccggccaggaaacgccgtggcgccgcgttgggcctaactcgagtcctgccgcctcccgggagtgccgtgcgccgcagcccgggcccaggccccggcagcgcctgggacaagacactgaaaatgaagcagaaaaaatttggccgttctgttgggttatggagagagttgatcagagattgctccttggctgagttgctgtctgcataggctgttaacaattgtttctctggcagcagatcttgttcatcaggattgcatcatttctgggagaatggccaaggtccacagcctcaatacaaagactgtctgaagcatatgaggcctgttctctttctgaagcggcactcctcttcctgccagtcctcttcacaggattactgaagcagacttgttctgaatttctttcgttggattggttgtttattggacttttgtctgccagctgcttccgcctcacctgtctgatgcaatttcttcttctgaaatctgttggaattgttcataaaacactttttgtttgtcttctctgtgagtgaccagggagatcatacaggtcttgtgctttcagcaagtcatatagagaagagactgtcagaatgatgatacagagactgttggccatttctgaaaccaattaaaaagatggggtaattaagaaacatttctggcatgttctatttaacatccttttccctagaaactgtatgtaaatggcacctcctaaagagagtactcggtactactggaagatacaggctgtgtctgtttctgaatccaagaacttactagtgttcctgtggattctgatggattgttctggaaatagttaaattaataataaattgaaactgtgatgcattcatttaccccctactgt

SEQ ID NO: 158350 - DNA, 336 bp, Homo sapiens
taggtcccataggacacaggaaaaaaagcaacatgttgcgacacaagtgtcaagataaagcactgaattagtctttaagccttgctaaccactaattgaagtagctttgataaaaactatttgaggccagcacagtggctcagacctgcaatcccaccacttaggggcaagcagtgaggctaaggcagatcacttgaggcctcccaaagtgccggcattacaggtgtgagccacagcacccggccaattgatatacttttgattaaagctgtttacattagtctctcccactaaactgggttcccaggcttacaagggcaatgactggggatctca

SEQ ID NO: 158351 - DNA, 755 bp, Homo sapiens
cccacgcgtccgggcaggcttgagtttataatgaaagcttactcagttcctcttcatgtcctatgtatttaagagaggacagttttccctcagtttttttccccttccttacccctacccccatcaaatacagcccaaccaaataactgtgttctttaatttaaaggaaagtggcagacttgatacctgctgaatatttcgtgtagacagagtatgacaatgaatgagatccccagtcattgcccttgtaagcctgggaacccagtttagtgggagagactaatgtaaacagctttaatcaaaagtatatcaattggccgggtgctgtggctcacacctataatgccggcactttgggaggccaaggtgggtggatcacttgaggtcaggagtttgagaccaccctggccaacatggtgaaaccctctccctatttaaagaaaaaaaagtaaggcatatcaatttatggttatcaaataggtttttttttttttttttgagactgagtgtcgctctatagcccaggctggagtgtagtgctcattgcgacttccgcctcctgggtcaagtgattctcgtgcctcagtctcccgagtagctgggattgtaggcgcctgccaccacgcccagctaatttttgtatttgtagtagcgatggggtttcatcatgttggcgaagctggtcttgaacacctgacctcaagtgatctgccttagcctcactgcttgcccctgagtggtgggattgcaggtgt

SEQ ID NO: 158352 - DNA, 423 bp, Homo sapiens
  misc_feature (1)...(423): n = a,t,c or g
naagtggcaagagagcgacgtctcccaggcccgcaagaaggtcctcatggtagagctgcaggaagcgcatcgcccctggctccatcaatagcaccatctccaccaggccctcctgccctgccagcttcacacatcctgggctcacaggccctgccttctccagagaccccatggtgatctccatgggacccaccagcccctcttgctctggtgagtccatggcaatttccaccaggccctcctgccccagcaaccccttagaggtctccactgggcctgcagaccccacaggccccaggctcatgggcccctcctgttcctgcaaccccacaggcctcaggcttaccagcccctcatgttccagagaccccatgggcatcgagctgacttgctctgcctgtcccagagaccccatgggacctg

SEQ ID NO: 158353 - DNA, 436 bp, Homo sapiens; identical to SEQ ID NO: 155687

SEQ ID NO: 158354 - DNA, 640 bp, Homo sapiens
aagtgctcgctggactggaactggaagatgagtgtgcaggctgtacggatggaaccttcagaggcactcggtatttcacctgtgccctgaagaaggcgctgtttgtgaaactgaagagctgcaggcctgactctaggtttgcattattgcagccggtttccaatcagattgagcgctgtaactctttagcatttggaggctacttaagtgaagtagtagaagaaaatactccaccaaaaatggaaaaagaaggcttggagataatgattgggaagaagaaaggcatccagggtcattacaattcttgttacttagactcaaccttattctgcttatttgcttttagttctgttctggacactgtgttacttagacccaaagaaaagaacgatgtagaatattatagtgaaacccaagagctactgaggacagaaattgttaatcctctgagaattaattgatactggaacaagacaggtcaaacccgaaactctaaggcatgttaacacctccttcctagaagagaggaagaataaacattctttggatcctattgttcagccagttaagaatcatagttaatcacactttcttaccctgtccacgatatggatatgtgtgtgccacaaaaattatgaaa

SEQ ID NO: 158355 - DNA, 426 bp, Homo sapiens
  misc_feature (1)...(426): n = a,t,c or g
tgaaaactagaaaatggtgttgaaagaaatcaaagaagatctaaataaacagacagatatactgttttcatgacttcaaagactcatcacagtaaggatgtcaattctccctaaattaatatacaagtttagtgcaattcctatccaaatcccagcatgatttttgtaaataaagattattataaaatgtatgaggaaaggcaaataaactagaatagctgaaacaannnnnnnnnnnnnnnnnnngagccaaagttttattttgtcacccaaattggaccacaggggggggatcacagctaattgcactccaccctgggcaataaaagggaaactccttttnnnnnnnnnnnnnnnncccccaaaaaccaaaccagaaaaattttttatacaaaaagccaccggggctgagggtggggttcaccc

SEQ ID NO: 158356 - DNA, 963 bp, Homo sapiens
ttttatcatgcagaccatgctgctctgaaagacgaaatgacagagtattaagtcttcttgcagatcaaaaggtatctctaccatggcagactcctctgtaaacatccggatgctgcattgttagcagcttacatcattcaagcggagattgggaatcatgactcagggtaacaccctgaaggctacagctccaagttccagtttttccctaaacattcagagaagctggaaaggaaaattgctgagattcacaagacggaactgagtggtcaaacaccagcaacatcagagctgaacttcttaagaaaagcacagacattggaaacatatggagtggatcctcacccatgtaaggacgtgtcaggaaatgctgcatttctggccttcactccttttgggtttgttgttcttcaaggaaacaagagggtccacttcattaaatggaatgaggtgaccaagctgaaatttgaaggaaagactttctatttatacgtaagccagaagaagaaagggataggctcatgccctgtctaaacaaactgggaaaactcattttcttcagaagttatttcaagaaaggctcagcgactctgtttctcatctttccaatttgcaggataatttttggttttgaattttgatttttcatagatgtatattattttgaagtatcaaataaaaataatttgttttcctattcctgattaatgcagtagtatcccctagcagaggggaccctagtttaaaactagagagccgctgtcctgtgtattccgcaggagcttttcatgctggtgccgctgggttccagtagactcatcactgcagcctcagcagggcaggccagggatctggacaatggggactgtttagttttccgtttgtttttttagccagccagaccttttaaaaaagtaaacatccttgtagaatgattaaatggaaaggtgcttcttatgatgg

SEQ ID NO: 158357 - DNA, 363 bp, Homo sapiens
ccaagatcctgtgatctagatggcaggtatatttaatgacagaacaaactatcccagcaataataaaggatgagaaccacatgactctttggctagaggcttctctctctttaaaagagttgcctgaacatctttggccttaagcagaccacatcctctcttagatggaatagagttaagaaataggcccacacatatggctgacagttgattttcaacaaaggtgccaaaataattcactggataaagtataatcctgcaaatggtatctgctattggatatccatatgcaaaaaagtgaatctcgatccttacctcataccatacacaataatccaaaatggatcatagaccccaaatgga

SEQ ID NO: 158358 - DNA, 430 bp, Homo sapiens
  misc_feature (1)...(430): n = a,t,c or g
ngggcgtggctctcagccctaaacagctccttgccagccacgtggtcctgctgcccctcgctgggtgccagccataagctccagtgggaggcgacctcacccaccgtcccaccgagggccccctcacaggtcaagtgtgctgcctgtgaaccgactcccccgactctcccttgtctgccctttcagccccctcccaggtcactctcgagccaggcccaggtgctgctgacgggccaccctgggtgaggtcctctcaggcgccagggtgaaggtcttctccggagtaaaggctgccaagcgaggctgacacagccgaacagcggtgagggcggggccgtctcctgaactgggcggcctggagacggcgctgtcggggaggcggccccggagaccacccgccgggactgcccaacggcgccgcccgcctcgg

SEQ ID NO: 158359 - DNA, 380 bp, Homo sapiens
ggcacgaggctattagttcgttacaccccgaaagaaccccaagtgtggactccaacttttgtagaggtctttggagacctaggacaagtgggccccgaatgatgttaacatcctgaagcaaaaagaatgccctgtgcacaagactatctatccgtggtcctgaaccagttatgtgtgttgtatgaaaaaacgcctctaagtgacagagataccaaatgctgcacagaatccttggtgaacaggcgaccatgcttttcagctctggagggcgatgaagcatacgatccccaagagcttaatgctgaaacattgaccttccatgcggatatatgcacactttctgaaaaggagagacaaatctacaaacaaactgtgcttgt

SEQ ID NO: 158360 - DNA, 388 bp, Homo sapiens
caatgtacaaaaatcgctagcgttcctatacaccaacaacagtcaagttgaaagccaaatcaggaatgcaatcccattcacacctgccacaaaaagaataaaatacctaggaatacccctaaccagagaggtgaaaggtctctataatgagaattacaaaaccctgctcaaagaattcagagaagacccaaacaaatggaaaaactttccatgctcatgggtaggaagaatcaacatcattaagatggcgatgctatccaaagcaatgtaaagattcccgcgtgttcatatcaaaataccagggacattcttcacagaactaggaaagcctattttaaaattcatatggaaccaaaaaagagcccaaatacccagggctactcgtgcc

SEQ ID NO: 158361 - DNA, 374 bp, Homo sapiens
  misc_feature (1)...(374): n = a,t,c or g
cacatcaaaacttgtgaaatgcagctaaaacagtgcttggagagagaaaagttctaaaattactaatataaacttctaccttaaaaaagctagaagaaaagcaaactcaaagtagaaggaaagaaataaagatanctgcagaaatcaatgcgatagaaaataagcaaatagagaaaattagtaaaaccaaaagttgctcctttaaatgatcaataaaaattacaaacccctaactaaagcaatgaacaaaagagaagatataaattaacaatattaagaacaaaagaggacaagtgactatggcttttgtagccattaaaaggatatcaagggaatactgtcaataactttataccaataaattcaacatttag

SEQ ID NO: 158362 - DNA, 378 bp, Homo sapiens
  misc_feature (1)...(378): n = a,t,c or g
gaagcagtggaagccggctcccccaggtcctgcaaaccccctcccccggggggnnnnngggcccgaatagaaaggcccccactcagacaaagcgaagccattttctcctttttttaagaaaaggcaatgggggggggccccttcaaggtcaaaaaaagcccgggggaagggccaaccaccaaagggtggccacttaaagggccccttgagggtggtcaacggggtttaacgggcccctttaaatcgaacggccgccnnnnnnnnnnnnnnnnnnnnnnnnnnnnnnnnnnnnnnnnnnnnnnnnnnnnnnnnnnnnnnnnnnnnnnnnnnnnnnnnnnnnnnnnnnnnnnnnnnnnnnnnnnnnnnnnnnnnnnnngg

SEQ ID NO: 158363 - DNA, 375 bp, Homo sapiens
gacaaataaagccacctaggctgagggatacccctcactccttcactccatatcacccagtgaggagagggctagtctatttccccagtgccccttcccctgccaagggtgagcagctgcatactagaaccaggcacaatgttttgggcagccaccctcgtcgccgccttccaagaagctcctagtctagccacagagtcacaaggggaagcttgggctcagtccctcctgccaggtccacctcttatgggccttctaggcagtgggatctggcctgccccctcacaccagaaggcgtgtggagaaccaagaacaataagcccgaggcattgtaggagacagagcatatctgataaacaggactaacgatgctca

SEQ ID NO: 158364 - DNA, 344 bp, Homo sapiens
tcgggcccctcactgggggcaggtgtagccatttaagggccatctccttacactgaccccacacccacctacccatgactcaccctgctcctcactaacccccgaactaactcaaccctgcctcccacactgcacctgccctcacgaccgaccccatcctcacccccatcaacatctctgcctccctccttggtcctaaggttttttttaaaaattcaatcaggaaaacggagggcatacccagaacacttctgggggcaaaatggggagagaaaggtttaaccatccgtccatgcccctgtgaattcatccaccgcttatgtcgactcggggcgcaaatttca

SEQ ID NO: 158365 - DNA, 387 bp, Homo sapiens
  misc_feature (1)...(387): n = a,t,c or g
caaaaaccctaagatctgataaacaaaatcagtaaagctgcaggatacaaaatcaacacagaaaaatcagtagcatttctatatacaaacagcaatcaaactgaaaaagaaatcaagaaagcaatcccatttacaataactaccaaaaacaaaacaaaatacctaggaataaatttaaccaaagaagtgtaagagctataccaggaaaattttgaaacactgatgaaaggaattgnnnnnnnnnnnnnnnnnnnnnnnnnnnnnnnnnnnnnnnnnnnnnnnnnnnnnnnnnnnnnnnnnnnnnnnnnnnnnnnnnnnnnnnnnnnnnnnnnnnnnnnnnnnnnnnnnnnnnnnnnnnnnnnnnnnnnnnnnnnnatttttttaaat

SEQ ID NO: 158366 - DNA, 426 bp, Homo sapiens
ctgtacttgaagaactaccaatttcagtcctgttcaactcatcctctgttccagcgtgtcagtggctggcgcatgtgtatcactcccatggaatgatgagagctgcacagatgtgttacataaaaactctacaattggcatcccaacggcgcagttgttgggcaaagctctcaagtctgtggagactagcactacttgcattaaaaggctgtatggctaacatttccaatgattactggccatctttggttcaagaggctacaactgaggccttgaagctttgcttttgtccactggctgttcttttacttgctttgttacaattcaaacgcaaaatggtgtcaacatagacactgtgtcttttggaaagagtggtatatcaccctgggccttccaaatttattggatccaactggccggcggttc

SEQ ID NO: 158367 - DNA, 393 bp, Homo sapiens
  misc_feature (1)...(393): n = a,t,c or g
nnnnnnnnnnnnnnnnnnnnnnnnnnnnnnnnnnnnnnnnnnnnnnnnnnnnnnnnnnnnnnnnnnnnnnnnnnnnnnnnntatcctgatttctactgtcatgcctcacatcagtccnnnnnnnnnnnnnngaaacaaattctctttttgggccccaggttaaacggcaggggaatgatttgggttaattgaaccctccccctcgggggtttaagaaattttccggcctcaccctccggagaagcgggaattataggcccagccccccccgggtttttggtttttaagggaaaagggggttaaactgggtggctaaggggggtttggatctcttgagctaaaacaatccccccccttggccctcccaaggggctaggataatgggcgagagct

SEQ ID NO: 158368 - DNA, 395 bp, Homo sapiens
  misc_feature (1)...(395): n = a,t,c or g
ntcaaaataaaccccccgaacctcagtgttttagtaaaaaagaaaagttcctagttaccccccttgtccaaaaaatcccgaagaaccaccactttggtaggctatgtccggccatttctcctaaacatgcaagttggaggccnnnnnnnnnnnnctttccttctctggaatgtatcttggtgcttcttcacaactttctcctttgtatcctgagttgcaagcacaagagcccatgatacaaatcccacgtcccccgcactgtgggtcaatacactgggtagtcggcacatcacactcggtgcccttacagccgctgaaacacaggcaacggcccttggagtactgcccgttgcccctacataacactggacaggcggctcttgatcaatccggac

SEQ ID NO: 158369 - DNA, 379 bp, Homo sapiens
  misc_feature (1)...(379): n = a,t,c or g
nnnnnnnnnnnnnnnnnnnnnnnnnnnnnnnnnnnnnnnnnnnnnnnnnnnnntcatgcctgtttattccttagtacttaacnnnnnnnnnnnnnnggaaacatagcccccttttgtggcccagcttggggggaaggggggcaatttgggttaattgaaccctccccctcgggggtaaaggcaattttcttccctgggccccccaattagtgggaactacgggccccccccaccttcccgggttatttttggttttttaagaaaaaagggggtttccccttctggcccgggtggttttggaatcccggacctcaaaattggcccttttaaccctcccaaggggctgggataacgggggggaccctgggggccaaaccaa

SEQ ID NO: 158370 - DNA, 409 bp, Homo sapiens
  misc_feature (1)...(409): n = a,t,c or g
nnnnnnnnnnnnnnnnnnnnnnnnnnnnnnnnnnnnnnnnnnnnnnnnnnnaactcctaaaacttnnnnnnnnnnnnnnnnncctgaaatcatatcaggttttttctttgaccaccatggaataaaactagaaaccccaaaaaggaactttggaaattatccaaatacctggaaattaagtaataccctcctgaatgaccagggggtcattgaaggaattnnnnnnnnnnnnttaaaatggcttaaaacaaatgaaaagggaaacccaacttaccaaagcttatgagatacagcaaaagcagtcctaaaaggaaatcttacagcaatcagcgcctacatcaaaaacagagaaaaacttcaaataaacaaacaatgcatctttaattaccccgaaaagcaagagcaaatg

SEQ ID NO: 158371 - DNA, 374 bp, Homo sapiens
agattatgagatgacaacacttttgggagaacttccatgtgacaaaagatagaataaacacaggtgagagacaagaaacagattggaagatttttgcaacatacctaatgaaaaaagtataaatatccagaaaatgctacaactcctacaaattagtaaggaaaaaacaactcaatagaaaatgggcaaaagaaaagaacaagcaatcacagaaaaagaaacaaagtggccagtagacaaaaactgttcaacctcagtaaaataagaggaatgcagactaaaggtactatctctcacccatcagtttagcaaaaagcaataaattaaattattaatcagtacgtattagcaaggatatggaagaataagtactt

SEQ ID NO: 158372 - DNA, 400 bp, Homo sapiens
gaatcgcggcttatttgccaacaaatgtatatgggcgaaaaaccctttggatgcagctgttgtgagaaagccttcagcaacaagtcataccttctagtgcatcagcaaactcatgccgaagagaaaccctatggttgtaatgaatgtgggaaagacttcagtagtaaatcatacctcattgtacatcagagaattcatacaggagagaaactacatgaatgcagtgaatgcaggaaaacattcagtttccattcacagcttgttatacatcagagaattcacacaggtgagaatccctatgagtgctgtgaatgtgggaaagtcttcagtaggatagaccagcttgtttcacaccagaaaactcattcatgacagaaaccatatgtgtgtaatgaatggg

SEQ ID NO: 158373 - DNA, 373 bp, Homo sapiens
ttcaggccctacccatctctcattcgaatacttgcagtaggctaatcccacctacccaattcctcctttgaacaaaaatacgcatatgagtttgttccaggttatcaaaagcactacactctatcaaaatttccatggcctttttttgcagaaatggagaagctgatccttaaattcaaatggaaaagttgatcccacataaccgaagcaatcttgagaagaaagaacaaagtgggagatctcacactttcagatgtaaaaagctcactataaagatatgataatcagcttttgtcagtgtgatactagtataagcatagacgtatagggccatgggaccatggaaggccagacatacatttatgaacaattg

SEQ ID NO: 158374 - DNA, 487 bp, Homo sapiens
gagtctgcccatgctcccagctgaataaagccattacttctacaactcggtgtctgaggggttttgtctgcagctcctcctgctacagaaggagagcaagggagagagggatggagaaacaaacccagagggagagagagagacagcgatagagagagagacagagaaggggggaggagagacagagaggggggaagagagagccccacagtagagcgcgaggtggagggggaagtagagaaagggagagggtgagggagttgtagagcgacagcgacagatccttggagagggaggctctgctcaggtagacagggcacctttcagcaggccggggtggggtggagggtgcttgagccgggctagaacagggggtcagggccccccacccgggaaaaccaacggagccctgcgacgtgttttttttttcttgaattggttggttgctttgggggtgcgtttcataaggtccttcctttgtttgctt

SEQ ID NO: 158375 - DNA, 720 bp, Homo sapiens
cagcggtcttttgggcgagcagatatgcacacacacccacttgttccttctggtgtgggatatatgcccagagtacttgttgagaatctggggtgctctgtgagcagccgccctgcccttgccccagtaatagccccttaaaaccctaccagcgctgcccaagcctcatcttaggactctgcccccaaagctggtgctgccagtcagcctgtctgcccaagtagggtctggctcacagcgctgtgaggcacagcagcttctggggacatctccaggactcaggacccttggtgccacctggtgcaggtcagggatccctgggcctgctggcagcagagtgggtggggaaggcaagtccgtggggtccagcccctgcctgccccactccacacagtgaagcactggtctgcagtttccgcacctcgccaccctccaccccccacgctcacccaggtccagtctcaggccctgcctcagtgcttgcggctctcagactgggtctacacctcctcaggggttgtgggggtggcacgccaacttctccccaaaccctccaagatgaggaagcaaattaggggcatagaggacatggggataggctgctgaggctgacccaggctccaaccgcccaacccctctggcacaggccttggcaaaaggactggccaaacctgctgcccaggcccctttctttctggtgcagacccccacctcgtccgg

SEQ ID NO: 158376 - DNA, 418 bp, Homo sapiens
ctcagggattgaggatggtattcccagggctttagggcttaggcctattggggaaggaaaacaccatggctcaccatcagctctttctggcctacaccaggatctccctactacgataatggccgtccactctgctacagcgactcggatgcagtattactatgttttgacatcagccgtccagagacaggggacagcgcactcaagaaggtaagactagatcaactctctaatctctaactcagcatgaggaccaagaaggaatcgggaccttgtcatgaatgcctcttgttaacatcaagaaatggaagccagggaaggaagagatttgcccaaggccacaccattagctacagctctgggactggaacttgggtctccttaccccactgcctcccgccctttttgttatcccatg

SEQ ID NO: 158377 - DNA, 241 bp, Homo sapiens
  misc_feature (1)...(241): n = a,t,c or g
tgcaggacccggagggagtccccatggttatgtgggttcccctttgagaatatccacaagaactcatttatgcttcgctgctaccaggagtttactacacattgatccattaattgtactacctttggtggaccttaaggaccggatcattatataaaatttgtggggcttacagcctctcccacctgcttcacttctgcagcccacagcattatattctcgnnnnnnnnnnnnntggggg

SEQ ID NO: 158378 - DNA, 409 bp, Homo sapiens; identical to SEQ ID NO: 148026

SEQ ID NO: 158379 - DNA, 361 bp, Homo sapiens; identical to SEQ ID NO: 148027

SEQ ID NO: 158380 - DNA, 1160 bp, Homo sapiens
tttttttttttttttttctgagtcctctgagaatttattactacggatcacagcagcaacgggcgggaagggcggcgcatgacatcatttgccccgcatgtaagatcttgggggttttaccaagctttcgggggcttccctttagcccccgccttcaaccaaaatgcgccttcaggtctttctcgaaacttgaatctgcttgcgttctccaggcgtcccttcttggaaccttccctccgcaaggaaccggggtcttcttcaaccaagcttccggtaacttgtgggtggttcaatctttcagccggcgggatctttcagcaacgtttttgcacttgaaatttgaaggcgcatccgcgacggcctttcaatccccccctggcttcgggcccctttcccctaatcttggctggggcggacacttggtaaggaattggcggttggaagccaacaagttccctgcgggtccccggtatccagtctggggcaggaagcgagcggggccgtgagccgagctctccagggggctgacggacatcttcctggggaccagcatctcctccagctccagctgggcccccttgcgagggagagagaccgcgcctacctgggccggccggcgatgtgctgtaaagggagaccgcagacccggctgcccagcactccatgagacaggccaaggcgggcggccgcctgcccaaggaacggccctcaacagctgggaagtcaggcgccccaggagcatggtctgtgggcggcggccacaggtcccaggggagctcgacgcggctcaaattgaccgttctgcggccgccctcgggcacttccggtccgtccccaagtcggccccgatcggcagcggccacccggcggttcctacgcacagcgcccgctggcgtcctcgcggcccccgattctgcattggctcaggccccgccgggcccgaaaggcgacggtttccgggggtgcgggccctggatatacccgcaggtccagaatcgtttccggaccacccaggggccggattcccaacgggccgacggaagtgcgggctcaagactacggaagtgacgtatctggcaacggaagtggagttacgtggaaggcggaagcgtctagagctatttcccccgtttttgctagagaccaaggacccggaataa

SEQ ID NO: 158381 - DNA, 440 bp, Homo sapiens
  misc_feature (1)...(440): n = a,t,c or g
annnnnnnnnnnnnnnnnnnnnnnnnnnnnnnnnnnnnnnnnnnnnnnnnnnnnnnnnnnnnnnnnnnnnnnnnnnnnnnnnnnnnnnnnnnnnnnnnnnnnnnnnnnnnnaaaaaagaaatatgaagtctgagatacacatttctctacactttccccattatattagaacatattatagtgctgatgcaacaaacatgctgtttacatggcttcatttccatttacctcctaatacacacatttatccttcagatacatcctttccacactttattccaacaaacatgttcttcgattcaacaattgtattttttagtttaatatttcgcttatgtttatacttttctttttattctgtatctttcttatccctttttgtattattattaggcttgttttgaaacttttgactccttcaatgaaatcggacgcgtggg

SEQ ID NO: 158382 - DNA, 391 bp, Homo sapiens
  misc_feature (1)...(391): n = a,t,c or g
catggctacctcagagctgagctgcgaggtgtcggaggagaactgtgagcgccgggaggccttctgggcagaatggaaggatctgacactgtccacacggcccgaggagggctgctccctgcatgaggaggacacccagagacatgagacctaccaccagcaggggcagtgccaggtgctggtgcagcgctcgccctggctgatgatgcggatgggcatcctcggccgtgggctgcaggagtaccagctgccctaccagcgggtactgccgctgcccatcttcacccctgccaagatgggcgccaccaaggaggagcgtggggtccccagcaccctctgttagtgccgcaataaatgctcaatcatgtgaannaaaaannnnnnnnnnnnn

SEQ ID NO: 158383 - DNA, 1253 bp, Homo sapiens
agggcaagtgccaggggggcacaaggctgggcatgtggctggcatgagacggtgtctgagtaatgtcaggcacctggaggcattgaccccaggaccttggaccccagacctctgaccgtggggcagccagcgtccaggtaccccaacccctgccctgggtccggcgtccccccattagtgagtcttggctctacttatagcatctgacaccagaggggccgaaaatagcccctggagaagggggaggagggggctatttaaagggcctgggaggggagagagaatgaggagtgatcatggctacctcagagctgagctgcgaggtgtcggaggagaactgtgagcgccgggaggccttctgggcagaatggaaggatctgacactgtccacacgggcgagagggagggctgctccctgcatgaagaggacacccagagacatgagacctaccaccatcaagggcaggggcaggtcgctggcgcagcgctcgccctggctgatgatgcggatgggcatcctcggccgcgggctgcaggagtaccaactgccctaccagcgggtactgccgctgcccatcttcacccctgccaagatgggcgccaccaacgaggagcgtgaggacacccccatccagcttcaggagctgctggcgctggagacagccctgggtggccagcgtgtggaccgccaggaggtggctgagatcacaaagcagctgccccctgtggtgcctgtcagcaagcccggtgcccttcgtcgctccctgtcccgctccatgtcccaggaagcacagagaggctgagagggactgtgacttgggctccgctgtgcccgccccctgggctgggcccttcctggctaggacctgtggaggggcagctcgctggcccatggctgctttgtagtttgcccagagttgggggctaggggaggggggagccagaggccaggatgcctgagccccctgagttcccaaagggagggtggcagagacagtgggcactaagggtggagagttgggggccagcacagctgaggaccctcagccccaggagaagggacaaaaggtactggtgagggcaagaggtgcctgggaggagtggccctgatccaggaaaatgtgaggggaatctggaacgctctaggcagaagaagctgggagggagggggaggtgaaaagggcagaggcaaggatggtggggcccccagcaccctctgttagtgccgcaataaatgctcaatcatgtgccag

SEQ ID NO: 158384 - DNA, 488 bp, Homo sapiens
  misc_feature (1)...(488): n = a,t,c or g
gagtnttnnnaggggnnnnccctattgaanaccntttganagtcccacgaccangaccacnccnagcttgncacgaggctgggagcagaatgaacggagaccacaattcagatgttttttcccaagattagcaggatttcgttcagcacttctgccaaatcggtagggtgctgactgaggatgagatggggcacccagagataggagatgctattgcccggctcaaggaggtcctggagtacaatgccattggaggcaagtataaccggggtttgacggtggtagtagcattccgggagctggtggagccaaggaaacaggatgctgatagtctccagcgggcctggactgtgggctggtgtgtggaactgatgacatcatggattcatcccttacccgccggggacagatctgctggtatcagaagccgggcgtgggtttggatgccatcaatgatgctaacctcctggaagcatgtatctaccgcc

SEQ ID NO: 158385 - DNA, 398 bp, Homo sapiens
ggcacgagggtagtagcattccgggagctggtggagccaaggaaacaggatgctgatagtctccagcgggcctggactgtgggctggtgtgtggaactggtgagaggggtagggcaagggagaagaagtttcctgcaatggtggtgacttgggtgggaaggggagggatgggcctgaaacttatttctgggttgtgtttgtgtttctttgtctctagtgtgctacggccaaatttagagtgaatcactccaagggttaactaatgtggggagcctcttttggcattaggtatgaagatggctgtagatagttgtagacagtgtggactggggcctcgagactgggcagagaggtgtcagctctttcctctgagcagaggatggctataaaagtgacag

SEQ ID NO: 158386 - DNA, 1474 bp, Homo sapiens
  misc_feature (1)...(1474): n = a,t,c or g
aggtgagagaggatgtgtgctgggccttggaggaagggggccgagaccgggccttacttctgtaacgatactgtgaggcatcggaaggccagcctgttgtgtccgttttgaaggatgcccctgtcccgctggttgagatctgtgggggtcttcctgctgccagccccctactgggcaccccgggagaggtggctgggttccctacggcggccctccctggtgcacgggtacccagtcctggcctggcacagtgcccgctgctggtgccaagcgtggacagaggaacctcgagccctttgctcctccctcagaatgaacgggagaccagaattcagatgtttatgcccaagaaaagcaggatttcgttcagcacttctcccagatcgttagggtgctgactgaggatgagatggggcacccagagataggagatgctattgcccggctcaaggaggtcctgggagtacaatgccattggaggcaagtataaccggggtttgacggtggtaagtagcattccggggagctggtgggagccaaggaaacaggatgcttgatagtcttccagcggggccctggactgttgggctggtgtgtggaactgctgcaagctttccttcctggtggcagatgacatcatggattcatcccttaccccgccggggaacagatcttgctggtatcagaagccgggcgtgggtttggatgccatcaatgatggtnaacctcctgggaagcatgtatctaccgcctgctgaagctctattgccgggagcagccctattacctgaacctgattcgagctcttcctgcagagttccctatcagactgagattgggcagaccctggacctcctcacagcccccccaagggcaatgtggatctgtcagaattcactgaaaagaggtacaaatctattgtcaagtacaagacagctttctactccttctaccttcctatagctgcagccatgtacatggcaggaattgatggcgagaaggagcacgccaatgccaagaagatcctgctggagatgggggagttctttcagattcaggatgattaccttgacctctttggggaccccagtgtgaccggcaaaattggcactgacatccaggacaacaaatgcagctggctggtggttcagtgtctgcaacgggccactccagaacagtaccagatcctgaaggaaaattacgggcagaaggaggctgagaaagtggcccgggtgaaggcgctatatgaggagctggatctgccagcagtgttcttgcaatatgaggaagacagttacagccacattatggctctcattgaacagtacgcagcacccctgcccccagccgtctttctggggcttgcgcgcaaaatctacaagcggagaaagtgacctagagattgcaagggcggggagaggaggctctcaataaataatcgtgtaaccttaaaaaaaaaaaaaacctcgacgat

SEQ ID NO: 158387 - DNA, 506 bp, Homo sapiens
cagagacgccggtccctgccaccagcgccgccatccgcatcctcgtccttcttccttctctgcgggtgaccagtcccggccggcagggtccttcagtcgatcgcgtcgtttttcctcctttcaaatttcggccggaacgaagccggcacgcagcggcggggccgaatgtggtccgccctcagcccaagccgcatgaagtcgggggtgaaagaagaggccggccgaatgcgcccgctaactcgtttcgcagttgttctaacttatcaccccaatactccctacctaaacaaaacaaatcctcaaccaacccctaaatcccaaacaaaccaacccctcccgcaagcccctccggacggaccgatgggctgagcctcctccagccgctgccagggtccgacgggcaagcgtcaccaacgatgcgctccagcccggcaatctcctcggctttggaaatagaatttggaaaaacgaatccttttcattaaagaaaaatcttcggagaaaaa

SEQ ID NO: 158388 - DNA, 432 bp, Homo sapiens
cttcagggagcagtcgtccgagaggcagcgcccagccccgtcctgggcccggagcttgtggaatggctgccccgacgtcagaatgatcctcccctcctgcctggcaacctcggccgccctgcggtggtcttcaccattgcccagcatgcgtgcatccacaccgagacagcggaggctccgtgccagcccctgcagcatgttgtcacacaccacacggaaggccctggccggaatttgaggggcagcgccctcagacacagccacagccacagggacctgcctgggtgcggccggtgctgacgctttttgcaggccgggtggcttccgtgcccctggtctctctctgtgcctgggcctccggctcccagccaggtcctccgtcaggtggaagcgggcgggctctctgcacagggcttggtgcacctccagcag

SEQ ID NO: 158389 - DNA, 331 bp, Homo sapiens
agtttgcaaactccagccccaacctctccctgcccactcagggagccccaacatacatatatcccaactttgcccatcccatgcatggggattactggttttgtcctcggggtgtgtcactttcttgagagaaagcttcttcctttgctttgccctggttctacagaggaaatcatcctctcttggcatcctctcttgccctggttcaattttcactgcacttaatagcactaatttatatattttgggttttttgggagggttttgtttggtttttttttgagacagagtctcgctctgtcacccaggctggagtgaagtggtacaatct

SEQ ID NO: 158390 - DNA, 394 bp, Homo sapiens
aattttaaatcttttttcccataattattttacctatatcatttattattttttgggtttggtctttttctctttttcttgatcaaattaggtagtagtttatttattaacttttccaaaaaatcagtactttgatttactaattggatctatttttctgttctctacttcactgatttctgcttcatatttattatttccttctttgggttttctttgatttactttattattgttggtttcccattaaaatttattggttttattctttcatttatatagataacagtgttttatggacaggcacagtggctcacacctgtaatcccaatactttgggtggctgaggtgagaggatcactttgagcccaagagtcggagaccagcctgggca

SEQ ID NO: 158391 - DNA, 469 bp, Homo sapiens
tattccggtaagcaaactttccaaccgccaggatatgcaggttggtttaccccctttaccccttaaaaatttttattttccccaaaagctttaaattttggggggggggtgggccaatatgtcccccccccaaaaaaaaggttcctttccaaaaatcccaaggagggttttaaaacggccccccataaagaaaaaaatttttcctttccatcccccgtaaaatttgggcccccccagggttcttttaaaaggccccccccttttttttttttttttttttttgacagagtcttgctctgtcgcctagcctggaatgcggtggcacaatcccggcttactgcaacctctgccttctgggttcaagcaattctcctgtctcagcctccctagtagctgggactacaggtgtccgctaccacatccggctaatttttttgttgttgtatttttagtagagacagaattttgc

SEQ ID NO: 158392 - DNA, 2776 bp, Homo sapiens
aaggggccttctgaggtttgggggctgtagggccatgggcctcagggccagaggtggttgttagcctggcaagacaggtctgggcaacatgcatgcccagaggcagttcgttgtagctgcagtgagagcagaagtcagacgacatgaggtggccaagcaggctctaaaccgcctcaggaagctggcagagagggtggacgaccccgaactccaggacagcatccaggcctcattggacagcattcgagaggctgtgatcaatagccaggaatggactttgagccgctccattcctgaactgcgcctgggtgtgctgggcgatgccaggagtgggaagtcatcgctcatccaccgattcctgactggctcataccaggtgctggagaagacagagagtgagcagtacaagaaagaaatgttggtggatggacagacacatctggtgctaatccgagaggaagctggggcacctgatgccaagttctcaggctgggcagatgctgtgatcttcgtcttcagcctggaggatgagaacagtttccaggctgtgagccgtctccatgggcagctgagttcccttcgcggggagggacgaggaggcctggccttggcactggtggggacacaagacaggatcagtgcttcctcccctcgggtggtgggagatgctcgtgccagagctctgtgcgcggacatgaaacgctgcagctactatgagacttgtgcaacctatgggctcaatgtggatcgggtcttccaggaggtggcccagaaggtggtgaccttgcgcaagcagcaacagcttctggctgcctgcaagtccctgcccagctccccaagccactcagctgcatccactccggtagctggccaggctagtaacgggggccacactagcgactactcttcttccctcccgtcctcaccgaatgttggtcaccgggagctccgagccgaggcagctgcagtggctggattgagcaccccagggtccctgcaccgggcagccaagcgcaggaccagcctttttgcgaatcgtcggggtagtgactccgagaaacgaagcttggatagtcggggagagacaacagggagtgggcgagccatccccatcaaacagagcttcctactaaaacgaagtggcaattccttgaacaaagaatggaagaagaaatatgtaaccctgtccagtaatggctttctactctaccaccccagtattaacgattacatccacagtacccacggcaaggagatggacttgctgcgaacaacagtcaaagtcccgggcaagcggcccccgagggccatctctgcctttggcccctcagccagcattaacgggctcgtcaaggacatgagcactgtccagatgggtgaaggcctggaagccactactcccatgccaagccctagccccagccccagttccctgcagccaccaccagatcagacatccaaacacctgctgaagccagaccggaatttggcccgagccctcagcacggttttgtcaggtcaagattattacccctatttcagagataaagaaactgaggctcagaagattaagtgccttgctcaaggtcttaaggccaactgtaccccatctggagacctgagccccctgagtcgggaaccccctccttctcccatggtgaagaagcagaggaggaaaaaattgacaacaccatccaagactgaaggctcggctgggcaggctgaagaggaaaactttgagttcctgatcgtgtccagcacgggtcagacgtggcactttgaggcagccagttttgaggagcgggatgcctgggtccaggccatcgagagtcagatcctagccagtctgcaatgctgtgagagcagcaaggtcaagctgcgcacagacagccaaagcgaggccgtggccatccaggcgatccggaacgccaaggggaattcaatctgcgtggactgcggggcccccaaccccacgtgggccagcttgaacctgggcgccctcatctgcatcgagtgttctggcatccaccgcaacctgggcacacacctgtcccgcgttcgctcgctggacttggacgactggccacgggagctgaccctggtgctgacggctattggcaacgacacggccaaccgcgtgtgggaaagcgacacgcgaggccgtgccaagccctcgcgggactcttcgcgggaggagcgcgagtcgtggattcgcgccaagtacgagcagctactgttcctggcgccgctgagcacctcggaggagccgctgggccgccagctgtgggccgccgtgcaggcccaggacgtggctaccgttctcctgcttttggcccatgcgcgacacgggccgctcgacaccagcgtagaggacccacagctgcgctccccactccacctggcggccgagctcgcccacgtcgtcatcacgcaactgctgctgtggtacggcgcggacgtggcggcccgtgacgcccaggtccgcacggcgctgttctacgcccgccaggctggaagccatctgtgcgccgacatccttctccagcacgcctgcccgggtgagggcggcagcgcggccaccacgcccagcgcggccaccacgcccagcatcaccgccacgcccagcccccgccgccggagcagcgccgctagcgtgggccgcgccgacgccccggttgcgctgcacagctggggcagaccgaccttcaccatgggagtgctgccgccaaaagccaaaggaaaggaaaaaggaatttcgattgaaagtacaaaatga

SEQ ID NO: 158393 - DNA, 706 bp, Homo sapiens
  misc_feature (1)...(706): n = a,t,c or g
ttttttagtttaagaaatatttataaagcaggtaacaagtggggagccgggaggggcgctcagctggggtgcagaagggtgggggtgcccccgccattcccctgcatgtgctcgggcttcctgctgccccccaccctctgctttccctacccccactgccccactcccaggggctcgggatggacatcagggaggacggtcttgggaaaggcagcccctgcttgaactctgtcccttaatgaccccatcccatcccccactcagaggaaaactttgagttcctgatcgtgtccagcacgggtcagacgtggcactttgaggcagccagttttgaggagcgggatgcctgggtccaggccatcgagagtcagatcctagccagtctgcaatgctgtgagagcagcaaggtcaaggtaagagtttgaggtggagtggaggactggccgcaggaactgaccctggtgctgacggccattggcaacgacacggccgaagtcgtgtgagaggagagcagaggtgtctgagaaggaggtggggcttggaggcagagtcagtgccaaccccaaccctctctgcagctgcgcacagacagccaaagcgaggccgtggccatccaggcgatccggaacgccaaagggaattctatctgcgcccacgcgtccgcggacgcgtgggtcgaggcgaannnnnggaccggaacggcagg

SEQ ID NO: 158394 - DNA, 368 bp, Homo sapiens
aaccatcagatccagaggttgcaggagatcccatatttccaccggggccaccttcttgcccagaagttaaagataaaacgaagtcaagcatctcactaggatggaaacctccagccaaagatgggggcagcccaatcaaaggatacattgtataaatgcaggaagaaggtactactgactggaaaagagtaaatgaaccatacaaacttataactacctgggaatgtggggggcctaatctgaaagagctcaggaagtacagattcagagtgaaagctgtcaatgaagctggtgaatctgaaccaagagatacaactggggagatccctgccactgatattcaagaggaaccagaagttttcattgac

SEQ ID NO: 158395 - DNA, 374 bp, Homo sapiens
  misc_feature (1)...(374): n = a,t,c or g
tgttcaagatccagaacctcattgccagcaccgtccgcacggtgatggtggccgactgcagccgcttcgacagccctgacctgctgctggaagccggtgacccggccacgtccccctgccgcatctttgacctgggcagcgacaacgaggaggtggtggctgtncccgacccctcccaccccaaggagggcttgagctattccctgagctgcgtgctgcttgggcggtcgcttcccagatgcctcatctcatgctatataccattgtgtttgtctgttgcctcagggcctcacaaattctactaaccgcactgcctatgcccgataccacctccttctcttacccttggcagtccacctcacttcccctccacg

SEQ ID NO: 158396 - DNA, 376 bp, Homo sapiens
  misc_feature (1)...(376): n = a,t,c or g
tggtggtgcatgcctataannnnnnnnnnnnnnnnnnnnnnnnnnnnnnnnnnnnnnnnnnnnnnnnnnnnnnnnnnnnnnnnnnnnnnnnnnnnnnnnnnnnnnnnnnnnnnnnnnnnnnnnnnnnnnnnnnnnnnntcaactattaaacaggaaattctttgcagaaatgtatcctacacatacaaccttgaaatgatattagtgcaaaccctgcaataaaaaaattctggaaacttcctaagtgtccaaccacagagggctggttaaatacatgattgtatattcatttagtggagtattatgcaactcttaaagtgtgtggagatctatatgtcaggtagatttacatattatatgtaaacctgtacctgtt

SEQ ID NO: 158397 - DNA, 801 bp, Homo sapiens
gtggcggaattcagcggatgtatggtggtattgtggtggacccttactggacactctgccaagtaactggagtggtacttgcactcttgtccaattcgctatcccttttgcccttgcatttcttcaaccagaaaaagaaaagccacaacaccgtaaaataagagaagccccttatgggtcttttgactctcaagtttatttagacgcaactggagtcccacagggagtaccacacaaattcaaagctcaagaccagatagctgcaggatttgaatcaatattttggtgggtaactatcagtaaaaacatagattggataaattacatctattataaccagcagcggtttattaactacactagagatgctgtcaaaggaatagctgaacagttagggcctactagccagatggcttgggaaaacagaatggccctagacatgatattagccaaaaaaggtggagtttgtgttatgatcaaaactcaatgttgtaccttcatcccaaacaatactgcccctagtgggagcataacaagggccttacaaggccttactgctttatccaatgaattagctaaaaattctggagtcaatgaccctttttcaggatggctagaaaggtggtttggtaaatggaaaggaatcatagcctcaattcttacttctcttgcagccagaataggtgtagtcattctttttgggtgttgagtcacaccatgtatccgtgggctagtacagaggcttatagaaacagtacttactaaaacctcccttagctctcctccaccttattcagataa

SEQ ID NO: 158398 - DNA, 376 bp, Homo sapiens
  misc_feature (1)...(376): n = a,t,c or g
ccacaccaggactggtcatgcacagacctgactctagttctagggatgggttctgtgcttttcctggattaagtgcccctttgttctccagctctgggacctgagacgttgatggctccatgcacctgagtgcttctctcaatgcccatcccaaccctccccttcatagctgggatgtcagggaccagagtcagatcctgacccccgctctgtggttgggccaccactgtcacaggcaggctcccctggaaggcctggaggtactgtaatcactctttgttgtctgtggccacatctagctcctctctttcatctgtggtccccaggcaaatgcacctccctcttggtggttcagcactctcancgcacgcgtggt

SEQ ID NO: 158399 - DNA, 1275 bp, Homo sapiens
atgactcaacctttcaattattctgcttttgagagaattatcttcgctggctctccagggcacaccgtattcagctctgagcggtctttgctagtgaggccaaggagccaccctgagccaaaaggggagcattatgtcaccggaagcccaaccccagagaaccaaaggacctcagcagccatgtcgaagccccatagtgaagccgggactgccttcattcagacccagcagctgcacgcagccatggctgacacattcctggagcacatgtgccgcctggacattgattcaccacccatcacagcccggaacactggcatcatctgtaccattggcccagcttcccgatcagtggagacgttgaaggagatgattaagtctggaatgaatgtggctcgtctgaacttctctcatggaactcatgagatagctcgtgaggctgaggcagccatgttccaccgcaagctgtttgaagaacttgtgcgagcctcaagtcactccacagacctcatggaagccatggccatgggcagcgtggaggcttcttataagtgtttagcagcagctttgatagttctgacggagtctggcaggagaagacagccaggcccaacctggcatctgggcacagagcctcttctcgtctgtaggaacaccgccagggagattgcccgtgaggcagaggctgccatctaccacttgcaattatttgaggaactccgccgcctggcgcccattaccagcgaccccacagaagccaccgccgtgggtgccgtggaggcctccttcaagtgctgcagtggggccataatcgtcctcaccaagtctggcagatgtcaagagtcaggtgctagtcacgtgctgcttggcttgtcactgtcattggcagcgagaggaatgggtgctggtgacattgggccagggctgcctctctgtgtcagagttcagggtgtaggaggggttctgccaaccatgggctgtgtggggtctgctcaccaggtggccagataccgcccacgtgcccccatcattgctgtgacccggaatccccagacagctcgtcaggcccacctgtaccgtggcatcttccctgtgctgtgcaaggacccagtccaggaggcctgggctgaggacgtggacctccgggtgaactttgccatgaatgttggcaaggcccgaggcttcttcaagaagggagatgtggtcattgtgctgaccggatggcgccctggctccggcttcaccaacaccatgcgtgttgttcctgtgccgtga

SEQ ID NO: 158400 - DNA, 1025 bp, Homo sapiens
tggagaaggggctttggggtccatcccggcacaggaacaacacgcatggtgttggtgaagccggagccagggcgccatccggtcagcacaatgaccacatctcccttcttgaagaagcctcgggccttgccaacattcatggcaaagttcacccggaggtccacgtcctcagcccaggcctcctggactgggtccttgcacagcacagggaagatgccacggtacaggtgggccagacgagctgtctggggattccgggtcacagcaatgatgggggcacgtgggcggtatctggccacctggtgagcagacttgagatgggatgggggtcatacataagagtccatttcacgaggccccaggaagtaccctcagggcgttcaaacagctcaccctctcatccagctcagtgagggctctggcctcttcaacatctgctccgtaggacccctcccgaggctcgggcagcccctcatcctatatccccctcagcatgctaggttaccatttgccctctacccccattccacaggccaagggatcaggatcaccttgccccagcaagatcagcctcacccactgtgccccacacagcccatggttggcagaacccctcctacaccctgaactctgacacagagaggcagccctggcccaatgtcaccagcacccattcctctcgctgccaatgacagtgacaagccaagcagcacgtgactagcacctgactcttgacatctgcaaggagcagtagcagagctgaccagccccctgggaatcaacatcaggcttctctacttttgtgccctctccctgccccacatggcccctagctcctgaaacagtcccagcaactgggctataaaggcccagaatcaaatctgagtatctagatgaggcttagaaatttaggtgctactcagcaggcaagaacaggaaatgggagtgttgctgcaggagcagctctgcctgccaaagctcctttggaaggcaggggacccttctaaagcccctctgccaggccc

SEQ ID NO: 158401 - DNA, 1511 bp, Homo sapiens
gggcggaaaagcctgtttacacagactgcacaccgcctggggaataatgcagtaaaggaagtgagccggctcggcctgactgctccaacttcctgctctcacacacaccagaggggaaaaaaaaagaggagcgagagaaagaaaaaaagggggaaaaatcaggatctcattacaagagccacagaccgtctgcagacgcctgtcagcatggaaagtcgggggctttcgcccgggtcctcctagaaattccccccgaagaagactcccccacatctgggtatggagagtgcaatcacgctgtggcagttcctgttgcagttgctgctggatcagaaacatgagcatttgatctgctggacctcgaacgatggtgaattcaagctcctcaaagcagaagaagtggccaagctgtggggactccgaaaaaacaaaacaaatatgaactatgataagctgagcagagccctgcgatactattatgacaagaacatcatcaagaaggtgatcgggcagaagtttgtgtacaagtttgtctctttcccggagatcctgaagatggatcctcacgcggtggagatcagccgggagagccttctgctgcaggacagcgactgcaaggtgtctccggagggccgcgaggcccacaaacacggcctggccgtcctcagaagcacgagccgcaacgaatacatccactcaggcctgtactcgtccttcaccattaattccctggagaacccaccagacgccttcaaggccatcaagagggagaagctggaggagccgcccgaagacagcccccccgtggaagaagtcaggactgtgatcaggtttgtgaccaataaaaccgacaagcacgtcaccaggccggtggtgtccctgccttccacgtcagaggctgcggcggcgtccgccttcctggcctcgtccgtctcggccaagatctcctctttaatgttgccaaacgctgccagtatttcatccgcctcacccttctcatctcggtccccgtccctgtcccccaagtcacccctcccttctgaacacagaagcctcttcctggaggccgcctgccatgactccgattccctggagcccttgaacctgtcatcgggctccaagaccaagtctccatctcttcccccaaaggccaaaaaaacccaaaggcttggaaatctcagcgcccccgctggtgctctccggcaccgacatcggctccatcgccctcaacagcccagccctcccctcgggatccctcaccccagccttcttcaccgcacagacaccaaatggattgcttcttgactccgagttccactgctcttccagcatacatttctggaggaagcctttagtccaagtttgttccgctgagtcctgccaggctgcaagggccaagcacgctgttccagttccccacactgcttaatggccacatgccagtgccaatccccagtctggacagagctgcttctccagtactgctttcttcaaactctcagaaatcctga

SEQ ID NO: 158402 - DNA, 1233 bp, Homo sapiens
atgggagaaattgcttttcccatctgtgcatctgtgatggtgggctttgacctgcagcatggtatggagagtgcaatcacgctgtggcagttcctgttgcagttgctgctggatcagaaacatgagcatttgatctgctggacctcgaacgatggtgaattcaagctcctcaaagcagaagaagtggccaagctgtggggactccgaaaaaacaaaacaaatatgaactatgataagctgagcagagccctgcgatactattatgacaagaacatcatcaagaaggtgatcgggcagaagtttgtgtacaagtttgtctctttcccggagatcctgaagatggatcctcacgcggtggagatcagccgggagagccttctgctgcaggacagcgactgcaaggcgtctccggagggccgcgaggcccacaaacacggcctggccgccctcagaagcacgagccgcaacgaatacatccactcaggcctgtactcgtccttcaccattaattccctgcagaacccaccagacgccttcaaggccatcaagacggagaagctggaggagccgcccgaagacagcccccccgtggaagaagtcaggactgtgatcaggtttgtgaccaataaaaccgacaagcacgtcaccaggccggtggtgtccctgccttccacgtcagaggctgcggcggcgtccgccttcctggcctcgtccgtctcggccaagatctcctctttaatgttgccaaacgctgccagtatttcatccgcctcacccttctcatctcggtccccgtccctgtcccccaactcacccctcccttctgaacacagaagcctcttcctggaggccgcctgccatgactccgattccctggagcccttgaacctgtcatcgggctccaagaccaagtctccatctcttcccccaaaggccaaaaaacccaaaggcttggaaatctcagcgcccccgctggtgctctccggcaccgacatcggctccatcgccctcaacagcccagccctcccctcgggatccctcaccccagccttcttcaccgcacaggaaatgatggttcatgtctacagtgattcgacacgttatcaggatctctgggagttgggatacgtgcatccgctcgtttcttcagtcctcagtcactactgtagaccaatggttctcaaagttagcatgcaaaataatctcctagaggatgcacacctgcacatctag

SEQ ID NO: 158403 - DNA, 358 bp, Homo sapiens
  misc_feature (1)...(358): n = a,t,c or g
gcttgcctgccccaggtgccaggccagagtggctgctgtttccagcgcctgttgtgggcccggtgctgtgctggacacctcaaagcatcatctcacttcactttttcctgaatcctgtagggcaaacattgnnnnnnnnnnnnnnnnnnnnnnnnnnnnnttgaagaacctgattgcccatgacactcagctaggtgggggcagtatcaggattcaaacccatcagtaggcctccagagccccactctggccacaacagccccagcctctcccaacccagcctcaccattctggtgtccagtaactctcctggcagcggcaaggccaggggcccacagtgtccacaggcatggctcgc

SEQ ID NO: 158404 - DNA, 372 bp, Homo sapiens
  misc_feature (1)...(372): n = a,t,c or g
aaatgaatggcttaaggcaaaaaattcttttattagtacccaaaagtgtagactttgttattactttaaatttagaaaagtaaattttcaatagttagtggctagcaaaactggtattttttttctttttcnnnnnnnnnnnnnnnngaaaacggagtcaccctttgtccccaaggttgaannnnnnnnnnccctttttggttaattgaaagctccccctccggggttaaaacaattttctggtttaagcctccgaagaagtgggaactacgggccccccccacccccgccggtttatttttttgtttttttaaaaaaaaacgggtttccccttgttacccaaggagggctaaatctccggacctggggacc

SEQ ID NO: 158405 - DNA, 461 bp, Homo sapiens
  misc_feature (1)...(461): n = a,t,c or g
acagggctatagtttaagggtgtcccaggccttggctggttggtgcggcccagctcctgggggctgggcagggcagggcagggccgggtccacttccattgttagcagttgtttgcagaattttctcttttaccattcctctctttttgttctcgcccagagtgggtggttttttgttgttgttttagattttcatgtgaaggcagttttttttcttttttaactccccatccccctatgcagggtgtcatttcaccatccacatccacatccttgtttgtgtttctggccctcgtcctccctgcctctcatntgcctccccaacccccacccctccctgggcccccaagtgagattgcacatttaactactgtaaggagaggagcggcgttggcaaatgtgaaccatgagaatatcagtgatactgatgagaataaactaaacgcctttgtaacagcaaa

SEQ ID NO: 158406 - DNA, 505 bp, Homo sapiens
  misc_feature (1)...(505): n = a,t,c or g
gcagggggtgcaggggaggaaactcctcaccaggagagccaaagacagggttgtgccttaccccaggagccacccctgtaccccccttgccctgccattcaccctccacccctacccctgggcggcctgctgctttttccttctcttccttccntggccctgagctgcatggttcccccaccctgggnagcccaggaaggaatctgaatggagaatcaccaaccaccagagaaaaaaagactgtggggccctccccctgccaactcccctttccctgcccgcccactcaacccacacctttttcaagcaggaacaggttgcccaccctgtccacgtgaagtgccaacgccctccccaccctgggccgagcccccacccctccctgggcccccaagtgagattgcacatttaactactgtaaggagaggagcggcgttggcaaatgtgaaccatgagaatatcagtgatactgatgagaataaactaaacgcctttgtaacagcaa

SEQ ID NO: 158407 - DNA, 379 bp, Homo sapiens; identical to SEQ ID NO: 96631
  misc_feature (1)...(379): n = a,t,c or g

SEQ ID NO: 158408 - DNA, 532 bp, Homo sapiens
acgctgattcaactatttattaaaattcaaaattcggaggcccccacatgcatttcaaatgttccccatgagcagccagggcaaggagggtcctgaaactgccgagagcgagctgtctcatcacgggtgcctttcactgtgacgctgagaaatcagctgggcccctcccacctgcggtgcgttcccttcctctgcagccacgctgggcgcctcccctgtgctgggagcttcagtccctttgggcgctgcagggatgcaaagagggaggcgtggacaccgcattcccggggacacatgggggctcctgctgccgggggctggagggaccgatgctgagtctcctgcccacaactgggaaccttgaacttctgttcctccctcccgccctggccatccctcaggcccttctgctgggctgcagagcgggaggccccctctatgaggagactgcgaatggggaaggaaggcagggaagggacatgcctactaagtgccaggccctgagctccacacgctgcctctcagtgacccc

SEQ ID NO: 158409 - DNA, 10089 bp, Homo sapiens; identical to SEQ ID NO: 150085

SEQ ID NO: 158410 - DNA, 14147 bp, Homo sapiens
attcccaccgggacctgcggggctgagtgcccttctcggttgctgccgctgaggagcccgcccagccagccagggccgcgaggccgaggccaggccgcagcccaggagccgccccaccgcagctggcgatggacccgccgaggcccgcgctgctggcgctgctggcgctgcctgcgctgctgctgctgctgctggcgggcgccagggccgaagaggaaatgctggaaaatgtcagcctggtctgtccaaaagatgcgacccgattcaagcacctccggaagtacacatacaactatgaggctgagagttccagtggagtccctgggactgctgattcaagaagtgccaccaggatcaactgcaaggttgagctggaggttccccagctctgcagcttcatcctgaagaccagccagtgcatcctgaaagaggtgtatggcttcaaccctgagggcaaagccttgctgaagaaaaccaagaactctgaggagtttgctgcagccatgtccaggtatgagctcaagctggccattccagaagggaagcaggttttcctttacccggagaaagatgaacctacttacatcctgaacatcaagaggggcatcatttctgccctcctggttcccccagagacagaagaagccaagcaagtgttgtttctggataccgtgtatggaaactgctccactcactttaccgtcaagacgaggaagggcaatgtggcaacagaaatatccactgaaagagacctggggcagtgtgatcgcttcaagcccatccgcacaggcatcagcccacttgctctcatcaaaggcatgacccgccccttgtcaactctgatcagcagcagccagtcctgtcagtacacactggacgctaagaggaagcatgtggcagaagccatctgcaaggagcaacacctcttcctgcctttctcctacaagaataagtatgggatggtagcacaagtgacacagactttgaaacttgaagacacaccaaagatcaacagccgcttctttggtgaaggtactaagaagatgggcctcgcatttgagagcaccaaatccacatcacctccaaagcaggccgaagctgttttgaagactgtccaggaactgaaaaaactaaccatctctgagcaaaatatccagagagctaatctcttcaataagctggttactgagctgagaggcctcagtgatgaagcagtcacatctctcttgccacagctgattgaggtgtccagccccatcactttacaagccttggttcagtgtggacagcctcagtgctccactcacatcctccagtggctgaaacgtgtgcatgccaacccccttctgatagatgtggtcacctacctggtggccctgatccccgagccctcagcacagcagctgcgagagatcttcaacatggcgagggatcagcgcagccgagccaccttgtatgcgctgagccacgcggtcaacaactatcataagacaaaccctacagggacccaggagctgctggacattgctaattacctgatggaacagattcaagatgactgcactggggatgaagattacacctatttgattctgcgggtcattggaaatatgggccaaaccatggagcagttaactccagaactcaagtcttcaatcctgaaatgtgtccaaagtacaaagccatcactgatgatccagaaagctgccatccaggctctgcggaaaatggagcctaaagacaaggaccaggaggttcttcttcagactttccttgatgatgcttctccgggagataagcgactggctgcctatcttatgttgatgaggagtccttcacaggcagatattaacaaaattgtccaaattctaccatgggaacagaatgagcaagtgaagaactttgtggcttcccatattgccaatatcttgaactcagaagaattggatatccaagatctgaaaaagttagtgaaagaagttctgaaagaatctcaacttccaactgtcatggacttcagaaaattctctcggaactatcaactctacaaatctgtttctattccatcacttgacccagcctcagccaaaatagaagggaatcttatatttgatccaaataactaccttcctaaagaaagcatgctgaaaactaccctcactgcctttggatttgcttcagctgacctcatcgagattggcttggaaggaaaaggctttgagccaacattggaagctctttttgggaagcaaggatttttcccagacagtgtcaacaaagctttgtactgggttaatggtcaagttcctgatggtgtctctaaggtcttagtggaccactttggctataccaaagatgataaacatgagcaggatatggtaaatggaataatgctcagtgttgagaagctgattaaagatttgaaatccaaagaagtcccggaagccagagcctacctccgcatcttgggagaggagcttggttttgccagtctccatgacctccagctcctgggaaagctgcttctgatgggtgcccgcactctgcaggggatcccccagatgattggagaggtcatcaggaagggctcaaagaatgacttttttcttcactacatcttcatggagaatgcctttgaactccccactggagctggattacagttgcaaatatcttcatctggagtcattgctcccggagccaaggctggagtaaaactggaagtagccaacatgcaggctgaactggtggcaaaaccctccgtgtctgtggagtttgtgacaaatatgggcatcatcattccggacttcgctaggagtggggtccagatgaacaccaacttcttccacgagtcgggtctggaggctcatgttgccctaaaacctgggaagctgaagtttatcattccttccccaaagagaccagtcaagctgctcagtggaggcaacacattacatttggtctctaccaccaaaacggaggtgatcccacctctcattgagaacaggcagtcctggtcagtttgcaagcaagtctttcctggcctgaattactgcacctcaggcgcttactccaacgccagctccacagactccgcctcctactatccgctgaccggggacaccagattagagctggaactgaggcctacaggagagattgagcagtattctgtcagcgcaacctatgagctccagagagaggacagagccttggtggataccctgaagtttgtaactcaagcagaaggtgcgaagcagactgaggctaccatgacattcaaatataatcggcagagtatgaccttgtccagtgaagtccaaattccggattttgatgttgacctcggaacaatcctcagagttaatgatgaatctactgagggcaaaacgtcttacagactcaccctggacattcagaacaagaaaattactgaggtcgccctcatgggccacctaagttgtgacacaaaggaagaaagaaaaatcaagggtgttatttccataccccgtttgcaagcagaagccagaagtgagatcctcgcccactggtcgcctgccaaactgcttctccaaatggactcatctgctacagcttatggctccacagtttccaagagggtggcatggcattatgatgaagagaagattgaatttgaatggaacacaggcaccaatgtagataccaaaaaaatgacttccaatttccctgtggatctctccgattatcctaagagcttgcatatgtatgctaatagactcctggatcacagagtccctcaaacagacatgactttccggcacgtgggttccaaattaatagttgcaatgagctcatggcttcagaaggcatctgggagtcttccttatacccagactttgcaagaccacctcaatagcctgaaggagttcaacctccagaacatgggattgccagacttccacatcccagaaaacctcttcttaaaaagcgatggccgggtcaaatataccttgaacaagaacagtttgaaaattgagattcctttgccttttggtggcaaatcctccagagatctaaagatgttagagactgttaggacaccagccctccacttcaagtctgtgggattccatctgccatctcgagagttccaagtccctacttttaccattcccaagttgtatcaactgcaagtgcctctcctgggtgttctagacctctccacgaatgtctacagcaacttgtacaactggtccgcctcctacagtggtggcaacaccagcacagaccatttcagccttcgggctcgttaccacatgaaggctgactctgtggttgacctgctttcctacaatgtgcaaggatctggagaaacaacatatgaccacaagaatacgttcacactatcatgtgatgggtctctacgccacaaatttctagattcgaatatcaaattcagtcatgtagaaaaacttggaaacaacccagtctcaaaaggtttactaatattcgatgcatctagttcctggggaccacagatgtctgcttcagttcatttggactccaaaaagaaacagcatttgtttgtcaaagaagtcaagattgatgggcagttcagagtctcttcgttctatgctaaaggcacatatggcctgtcttgtcagagggatcctaacactggccggctcaatggagagtccaacctgaggtttaactcctcctacctccaaggcaccaaccagataacaggaagatatgaagatggaaccctctccctcacctccacctctgatctgcaaagtggcatcattaaaaatactgcttccctaaagtatgagaactacgagctgactttaaaatctgacaccaatgggaagtataagaactttgccacttctaacaagatggatatgaccttctctaagcaaaatgcactgctgcgttctgaatatcaggctgattacgagtcattgaggttcttcagcctgctttctggatcactaaattcccatggtcttgagttaaatgctgacatcttaggcactgacaaaattaatagtggtgctcacaaggcgacactaaggattggccaagatggaatatctaccagtgcaacgaccaacttgaagtgtagtctcctggtgctggagaatgagctgaatgcagagcttggcctctctggggcatctatgaaattaacaacaaatggccgcttcagggaacacaatgcaaaattcagtctggatgggaaagccgccctcacagagctatcactgggaagtgcttatcaggccatgattctgggtgtcgacagcaaaaacattttcaacttcaaggtcagtcaagaaggacttaagctctcaaatgacatgatgggctcatatgctgaaatgaaatttgaccacacaaacagtctgaacattgcaggcttatcactggacttctcttcaaaacttgacaacatttacagctctgacaagttttataagcaaactgttaatttacagctacagccctattctctggtaactactttaaacagtgacctgaaatacaatgctctggatctcaccaacaatgggaaactacggctagaacccctgaagctgcatgtggctggtaacctaaaaggagcctaccaaaataatgaaataaaacacatctatgccatctcttctgctgccttatcagcaagctataaagcagacactgttgctaaggttcagggtgtggagtttagccatcggctcaacacagacatcgctgggctggcttcagccattgacatgagcacaaactataattcagactcactgcatttcagcaatgtcttccgttctgtaatggccccgtttaccatgaccatcgatgcacatacaaatggcaatgggaaactcgctctctggggagaacatactgggcagctgtatagcaaattcctgttgaaagcagaacctctggcatttactttctctcatgattacaaaggctccacaagtcatcatctcgtgtctaggaaaagcatcagtgcagctcttgaacacaaagtcagtgccctgcttactccagctgagcagacaggcacctggaaactcaagacccaatttaacaacaatgaatacagccaggacttggatgcttacaacactaaagataaaattggcgtggagcttactggacgaactctggctgacctaactctactagactccccaattaaagtgccacttttactcagtgagcccatcaatatcattgatgctttagagatgagagatgccgttgagaagccccaagaatttacaattgttgcttttgtaaagtatgataaaaaccaagatgttcactccattaacctcccattttttgagaccttgcaagaatattttgagaggaatcgacaaaccattatagttgtactggaaaacgtacagagaaacctgaagcacatcaatattgatcaatttgtaagaaaatacagagcagccctgggaaaactcccacagcaagctaatgattatctgaattcattcaattgggagagacaagtttcacatgccaaggagaaactgactgctctcacaaaaaagtatagaattacagaaaatgatatacaaattgcattagatgatgccaaaatcaactttaatgaaaaactatctcaactgcagacatatatgatacaatttgatcagtatattaaagatagttatgatttacatgatttgaaaatagctattgctaatattattgatgaaatcattgaaaaattaaaaagtcttgatgagcactatcatatccgtgtaaatttagtaaaaacaatccatgatctacatttgtttattgaaaatattgattttaacaaaagtggaagtagtactgcatcctggattcaaaatgtggatactaagtaccaaatcagaatccagatacaagaaaaactgcagcagcttaagagacacatacagaatatagacatccagcacctagctggaaagttaaaacaacacattgaggctattgatgttagagtgcttttagatcaattgggaactacaatttcatttgaaagaataaatgatgttcttgagcatgtcaaacactttgttataaatcttattggggattttgaagtagctgagaaaatcaatgccttcagagccaaagtccatgagttaatcgagaggtatgaagtagaccaacaaatccaggttttaatggataaattagtagagttggcccaccaatacaagttgaaggagactattcagaagctaagcaatgtcctacaacaagttaagataaaagattactttgagaaattggttggatttattgatgatgctgtcaagaagcttaatgaattatcttttaaaacattcattgaagatgttaacaaattccttgacatgttgataaagaaattaaagtcatttgattaccaccagtttgtagatgaaaccaatgacaaaatccgtgaggtgactcagagactcaatggtgaaattcaggctctggaactaccacaaaaagctgaagcattaaaactgtttttagaggaaaccaaggccacagttgcagtgtatctggaaagcctacaggacaccaaaataaccttaatcatcaattggttacaggaggctttaagttcagcatctttggctcacatgaaggccaaattccgagagactctagaagatacacgagaccgaatgtatcaaatggacattcagcaggaacttcaacgatacctgtctctggtaggccaggtttatagcacacttgtcacctacatttctgattggtggactcttgctgctaagaaccttactgactttgcagagcaatattctatccaagattgggctaaacgtatgaaagcattggtagagcaagggttcactgttcctgaaatcaagaccatccttgggaccatgcctgcctttgaagtcagtcttcaggctcttcagaaagctaccttccagacacctgattttatagtccccctaacagatttgaggattccatcagttcagataaacttcaaagacttaaaaaatataaaaatcccatccaggttttccacaccagaatttaccatccttaacaccttccacattccttcctttacaattgactttgtagaaatgaaagtaaagatcatcagaaccattgaccagatgctgaacagtgagctgcagtggcccgttccagatatatatctcagggatctgaaggtggaggacattcctctagcgagaatcaccctgccagacttccgtttaccagaaatcgcaattccagaattcataatcccaactctcaaccttaatgattttcaagttcctgaccttcacataccagaattccagcttccccacatctcacacacaattgaagtacctacttttggcaagctatacagtattctgaaaatccaatctcctcttttcacattagatgcaaatgctgacatagggaatggaaccacctcagcaaacgaagcaggtatcgcagcttccatcactgccaaaggagagtccaaattagaagttctcaattttgattttcaagcaaatgcacaactctcaaaccctaagattaatccgctggctctgaaggagtcagtgaagttctccagcaagtacctgagaacggagcatgggagtgaaatgctgttttttggaaatgctattgagggaaaatcaaacacagtggcaagtttacacacagaaaaaaatacactggagcttagtaatggagtgattgtcaagataaacaatcagcttaccctggatagcaacactaaatacttccacaaattgaacatccccaaactggacttctctagtcaggctgacctgcgcaacgagatcaagacactgttgaaagctggccacatagcatggacttcttctggaaaagggtcatggaaatgggcctgccccagattctcagatgagggaacacatgaatcacaaattagtttcaccatagaaggacccctcacttcctttggactgtccaataagatcaatagcaaacacctaagagtaaaccaaaacttggtttatgaatctggctccctcaacttttctaaacttgaaattcaatcacaagtcgattcccagcatgtgggccacagtgttctaactgctaaaggcatggcactgtttggagaagggaaggcagagtttactgggaggcatgatgctcatttaaatggaaaggttattggaactttgaaaaattctcttttcttttcagcccagccatttgagatcacggcatccacaaacaatgaagggaatttgaaagttcgttttccattaaggttaacagggaagatagacttcctgaataactatgcactgtttctgagtcccagtgcccagcaagcaagttggcaagtaagtgctaggttcaatcagtataagtacaaccaaaatttctctgctggaaacaacgagaacattatggaggcccatgtaggaataaatggagaagcaaatctggatttcttaaacattcctttaacaattcctgaaatgcgtctaccttacacaataatcacaactcctccactgaaagatttctctctatgggaaaaaacaggcttgaaggaattcttgaaaacgacaaagcaatcatttgatttaagtgtaaaagctcagtataagaaaaacaaacacaggcattccatcacaaatcctttggctgtgctttgtgagtttatcagtcagagcatcaaatcctttgacaggcattttgaaaaaaacagaaacaatgcattagattttgtcaccaaatcctataatgaaacaaaaattaagtttgataagtacaaagctgaaaaatctcacgacgagctccccaggacctttcaaattcctggatacactgttccagttgtcaatgttgaagtgtctccattcaccatagagatgtcggcattcggctatgtgttcccaaaagcagtcagcatgcctagtttctccatcctaggttctgacgtccgtgtgccttcatacacattaatcctgccatcattagagctgccagtccttcatgtccctagaaatctcaagctttctcttccagatttcaaggaattgtgtaccataagccatatttttattcctgccatgggcaatattacctatgatttctcctttaaatcaagtgtcatcacactgaataccaatgctgaactttttaaccagtcagatattgttgctcatctcctttcttcatcttcatctgtcattgatgcactgcagtacaaattagagggcaccacaagattgacaagaaaaaggggattgaagttagccacagctctgtctctgagcaacaaatttgtggagggtagtcataacagtactgtgagcttaaccacgaaaaatatggaagtgtcagtggcaacaaccacaaaagcccaaattccaattttgagaatgaatttcaagcaagaacttaatggaaataccaagtcaaaacctactgtctcttcctccatggaatttaagtatgatttcaattcttcaatgctgtactctaccgctaaaggagcagttgaccacaagcttagcttggaaagcctcacctcttacttttccattgagtcatctaccaaaggagatgtcaagggttcggttctttctcgggaatattcaggaactattgctagtgaggccaacacttacttgaattccaagagcacacggtcttcagtgaagctgcagggcacttccaaaattgatgatatctggaaccttgaagtaaaagaaaattttgctggagaagccacactccaacgcatatattccctctgggagcacagtacgaaaaaccacttacagctagagggcctctttttcaccaacggagaacatacaagcaaagccaccctggaactctctccatggcaaatgtcagctcttgttcaggtccatgcaagtcagcccagttccttccatgatttccctgaccttggccaggaagtggccctgaatgctaacactaagaaccagaagatcagatggaaaaatgaagtccggattcattctgggtctttccagagccaggtcgagctttccaatgaccaagaaaaggcacaccttgacattgcaggatccttagaaggacacctaaggttcctcaaaaatatcatcctaccagtctatgacaagagcttatgggatttcctaaagctggatgtaaccaccagcattggtaggagacagcatcttcgtgtttcaactgcctttgtgtacaccaaaaaccccaatggctattcattctccatccctgtaaaagttttggctgataaattcattattcctgggctgaaactaaatgatctaaattcagttcttgtcatgcctacgttccatgtcccatttacagatcttcaggttccatcgtgcaaacttgacttcagagaaatacaaatctataagaagctgagaacttcatcatttgccctcaacctaccaacactccccgaggtaaaattccctgaagttgatgtgttaacaaaatattctcaaccagaagactccttgattcccttttttgagataaccgtgcctgaatctcagttaactgtgtcccagttcacgcttccaaaaagtgtttcagatggcattgctgctttggatctaaatgcagtagccaacaagatcgcagactttgagttgcccaccatcatcgtgcctgagcagaccattgagattccctccattaagttctctgtacctgctggaattgccattccttcctttcaagcactgactgcacgctttgaggtagactctcccgtgtataatgccacttggagtgccagtttgaaaaacaaagcagattatgttgaaacagtcctggattccacatgcagctcaaccgtacagttcctagaatatgaacttaatgttttgggaacacacaaaatcgaagatggtacgttagcctctaagactaaaggaacatttgcacaccgtgacttcagtgcagaatatgaagaagatggcaaatatgaaggacttcaggaatgggaaggaaaagcgcacctcaatatcaaaagcccagcgttcaccgatctccatctgcgctaccagaaagacaagaaaggcatctccacctcagcagcctccccagccgtaggcaccgtgggcatggatatggatgaagatgacgacttttctaaatggaacttctactacagccctcagtcctctccagataaaaaactcaccatattcaaaactgagttgagggtccgggaatctgatgaggaaactcagatcaaagttaattgggaagaagaggcagcttctggcttgctaacctctctgaaagacaacgtgcccaaggccacaggggtcctttatgattatgtcaacaagtaccactgggaacacacagggctcaccctgagagaagtgtcttcaaagctgagaagaaatctgcaggaccatgctgagtgggtttatcaaggggccattagggaaattgatgatatcgacgagaggttccagaaaggagccagtgggaccactgggacctaccaagagtggaaggacaaggcccagaatctgtaccaggaactgttgactcaggaaggccaagccagtttccagggactcaaggataacgtgtttgatggcttggtacgagttactcaagaattccatatgaaagtcaagcatctgattgactcactcattgattttctgaacttccccagattccagtttccggggaaacctgggatatacactagggaggaactttgcactatgttcataagggaggtagggacggtactgtcccaggtatattcgaaagtccataatggttcagaaatactgttttcctatttccaagacctagtgattacacttcctttcgagttaaggaaacataaactaatagatgtaatctcgatgtatagggaactgttgaaagatttatcaaaagaagcccaagaggtatttaaagccattcagtctctcaagaccacagaggtgctacgtaatcttcaggaccttttacaattcattttccaactaatagaagataacattaaacagctgaaagagatgaaatttacttatcttattaattatatccaagatgagatcaacacaatcttcaatgattatatcccatatgtttttaaattgttgaaagaaaacctatgccttaatcttcataagttcaatgaatttattcaaaacgagcttcaggaagcttctcaagagttacagcagatccatcaatacattatggcccttcgtgaagaatattttgatccaagtatagttggctggacagtgaaatattatgaacttgaagaaaagatagtcagtctgatcaagaacctgttagttgctcttaaggacttccattctgaatatattgtcagtgcctctaactttacttcccaactctcaagtcaagttgagcaatttctgcacagaaatattcaggaatatcttagcatccttaccgatccagatggaaaagggaaagagaagattgcagagctttctgccactgctcaggaaataattaaaagccaggccattggcgacgaagaaaataatttctgattaccaccagcagtttagatataaactgcaagatttttcagaccaactctctgattactatgaaaaatttattgctgaatccaaaagattgattgacctgtccattcaaaactaccacacatattctgatatacatcacggagttactgaaaaagctgcaatcaaccacacgtcatgaacccctacatgaagcttgctccaggagaacttactatcatcctctaatttttttaaaagaaatcttcaatttattcttcttttccaatttgaacttttcacataggcacagaaaaaattgcaaactgcctatattgataaaaccatacagtgagccagccttgcagtaggcagtatgactataggcagaagcacatatgagctggacctgcaccaaagctggcaccagggctcggaaggtctctgaactcagaaggatggccttttttgcaagttaaagaaaatcaggatctgagatattttgctaaacttgggggaggaggaacaaataaatgggagtctttattgtgtatcataaaaaaaaaaaaaaaa

SEQ ID NO: 158411 - DNA, 400 bp, Homo sapiens
tgcgtgcgggaattccgacgaggtccccaccatgcgtgagagctctttggaatcatagctctgcagacgattgcctacagcattttatgggacttgaagtttttgatgaggaacctggccctgggaggaggcctgttgctgctcctagcagaatcccgttctgaagggaagagcatgtttgctggttctgatgttcatgaccctccttcactttgacgccagcttcttttctattgtccagaacatcgtgggcacagctctgatgattttagtggccattggttttaaaaccaagctggctgctttgactcttgttgtgtggctctttgccatcaacgtatatttcaacgccttctggaccattccagtctacaagcccatgcatgacttcctgaaatac

SEQ ID NO: 158412 - DNA, 903 bp, Homo sapiens
tttcgtgcagcgggtgcgggcgccgacgggcgagagccagcgagcgagcgagcgagccgagccgagcctcccgccgtcgccatgggccagaacgacctgatgggcatggccgaggacttcgccgaccagttcctccgtgtcacaaagcagtacctgccccacgtggcgcgcctctgtctgatcagcaccttcctggaggacggcatccgtatgtggttccagtggagcgagcagcgcgactacatcgacaccacctggaactgcggctacctgctggcctcgtccttcgtcttcctcaacttgctgggacagctgactggctgcgtcctggtgttgagcaggaacttcgtgcagtacgcctgcttcgggctctttggaatcatatttctttattacgattgcctacagcattttatgggacttgaagtttttgatgaggaacctggccctgggaggaggcctgttgctgctcctagcagaatcccgttctgaagggaagagcatgtttgcggggcgtccccaccatgcgtgagagctcccccaaacagtacatgcagctcggaggcagggtcttgctggttctgatgttcatgaccctccttcacttttgacgccagctttctttttctatttgtccagaacatcgttgggcacagctctgatgatttttagtggccattggttttaaaaccaagcttggctgctttgactcttgttgtgtggctctttgccatcaacgtatatttcaacgccttctggaccattccagtctacaaagcccatgcatgacttcctgaaatacgactttcttccagaccatgtcggtgattgggggcttgctcctggtgggtggccctgggccctgggggtgtctccatggatgagaagaagaaggagtggtaa

SEQ ID NO: 158413 - DNA, 397 bp, Homo sapiens
  misc_feature (1)...(397): n = a,t,c or g
cggacgcgtgggtcgacccacgcgtccgcccacgcgtccgcccacgcgtccgcccacgcgtccnnnnnnnnnnnnnnnnnnnnnnnnnnnnnnnnnnnnnnnnnnnnnnnnnnnnnnnnnnnnnnnnnnnnnnnnnnnnnnnnnnnnnnnnnnnnnnnnnnnnnnnnnnnnnnnnnnnnnnnnnnnnnnnnnnnnnnnnnnnnnnnnnnnnnnnnnnnnnnnnnnnnnnnnnnnnnnnnnnnnnnnnnnnnnnnnnnnnnnnnnnnnnnnnntnnnnnnnnnnnnnnnnggccccttttttggtgtttccccttgtgtaccggaaattttaaaannnnnnnnnnnaaggattggatgcccgagaaattgagctttcccctttaagcggggaaacctg

SEQ ID NO: 158414 - DNA, 352 bp, Homo sapiens
  misc_feature (1)...(352): n = a,t,c or g
ttaaattggaaattttaagaatgttttctcaatagttaatataacaactagacaaaataccagcacggacatagaaaatctaaagaataatacacatgtctagaacactgtatcaaacagctaatacacagtgttttcgagtgcatgtggtacattcaccaagataagccatttactaaggcattaaacaagtctcgataaattttaaaagcttgatgttctttggtcatagtaggagaaaaagcatttgacaacattgaacatcagttcataaaaaatcccagcaaattgggattggaagggaattcttgtctgataaggagcttctacaaaaacctatagcttacgtcan

SEQ ID NO: 158415 - DNA, 381 bp, Homo sapiens
  misc_feature (1)...(381): n = a,t,c or g
aatcccagcatagtaggtggtcaagatctctgcaaggggaattacaaaacacagattaaagatctgctagctgacagnnnnnnnnnnnnnnnnnnnnnnnnnnnnnnnnnnnnnnnnnnnnnnnnnnnnnnnnnnnnnnnnnnnnnnnnnnnnnnnnnnnnnnnnnnagcaggccctatgaaaacaccaacgtcatttctcatagaattgggaaaaacaatcgtacaatttttatgaaaccaaaagagagtatgaataactaaagtaatcctaagcaagaaaccccaaaaaacagaaaacaaaacaaaactagaggcttttcacagtacattatgttacttgccctcaaattatgcgacgaggctatagtaacgaaaacag

SEQ ID NO: 158416 - DNA, 361 bp, Homo sapiens
ttatttcaaaaaaaaaattttttttaaaaggttttttttttttgggttttttttgaaaaaaacccccctttttttttttcccccccccccccccgggttaaagggggaaaaaaaaaatttttttttttttttgggtaaaaaaaaacccccttgaaaaaaattttttttccctttttttaaaaaaggggggcccccccacccccccggggggtttttttttttttaaaaaaaaaaaaagggctccccaagggggggggcccccaaaaattttttttttttttttttttttttttttttttttttttttttttttttttggagacggagtcttgctctgttgcccaggctggagtgcagtggc

SEQ ID NO: 158417 - DNA, 359 bp, Homo sapiens
gggccttccctcataacactacagcccccctcagctcccccactaatcacattcccacacgattgcccccaaagcagaagagaaggcaaataggaaggaaacacatttttctagaagcccgcaacagatatctggaaggtgcccacctcaggacaaatcactagcaaaggtggatttcctggaccagctcagacccatggtgggtcattctctgggaagggggcctggccaccttcctaaacatatgccgactcctgaacaaatccaggaagaaccagaggctcacattcatctccctttggtgtgtgagcagctgcctctccttccctgggaggattttgtctatggctcgagccggg

SEQ ID NO: 158418 - DNA, 587 bp, Homo sapiens
tggtggccggcgcctgtagtcccagctactagggaggctgagacacacgaatcccttgggcccgggaagcggaggttgcagtgagcctcgattgtaccactgcactccagcctgggcgacagagcaagactctgtctcaaaacaaacacaaatacagtatccaaacattggagattagtgactcacctgcagttgggagccagctacaacccaaatcattttaaaattttcaattctttgatctcatgcaatgcacactttcttctgaattagcaaactgaataaactacagaaattttttagaatcaagaagtcttgcttacaattaaacgggcaaactcctgtgactctaacatttttcctttctcacagcaccattctgaaatttgcattgttgcttctggattttgaagccttgttttccaagtatttgtgggcagctcctaaaagactttgtcccttaagtaagggcagctgctttcaggatgaaaccatgcgactgagactggcagatcctgggagcttgcacctgggtcagctccacagatggagtgcgcttcttctctgcctcagatgcccaagctcta

SEQ ID NO: 158419 - DNA, 345 bp, Homo sapiens
  misc_feature (1)...(345): n = a,t,c or g
cagcccggccccgaaggaaaaatccggttttttctgaaaatcccaaatttaaccccgagtgggggcaaaagccttaaattcccgctatttaaaagggttaaaccggaaaattgccttagcctaagagggtgagggtgcaattaaccagtattaaatccccgcaagcccacctagggaactccctttccnnnnnnnnnnnnngttaaaagatacagatagggctctggggaaaatcaaagcaaaataagatagaaaatattgatcccatcctactttatgactctgcataacttgaaagtgccttttaaatagttaaatgggccaggcgcagcagctcatgcctga

SEQ ID NO: 158420 - DNA, 380 bp, Homo sapiens
  misc_feature (1)...(380): n = a,t,c or g
nagcaatccaaccttggcactgcatagctaagtttttgtataaggatttagactaccttcctaggaagcaaaaacttaatactcaatttccaattatgtggattcctttttctaaattcttggtttnnnnnnnnnnnnnnnnnnnnnnnnnnnnnnnnnnnnnnnnnnnnnnnnnnnnnnnnnnnnnnnnnnnnnnnnnnnnnnnnnnnnnnnnnnnnnnnnnnnnnnnnnnnnnnnnnnnnnnnnnnnnnnnnnnnnnnnnnnnnnnnnnnnnnnnnnnnnnnnnnnnnnnnnnnnnnnnnnnnnnnnnnnnnnnnnnnnnnnnnnnnnnnnnnnnnnnnnnnnnnnnnnnnnnnnnnnnnnnnnnnnnnnnnngtttc

SEQ ID NO: 158421 - DNA, 499 bp, Homo sapiens
gttctttttcttttccaagtatgtttaaatattcaagtcttgattcagaataactgataggttacagagcatgcaaacccattcacaagcaatccaaccttggcactgcatagctaagtttttgtataaggatttagactaccttcctaggaagcaaaaacttaatactcaatttccaattatgtggattcctttttctaaattcttggttttgtgcagtggcacgatcatagctcaccgcagcctaaaactcctgggctcaagcaatcctcctgcctcaatttcctgagtagctaggacaacaggcacatgccaccaggcctggctaattttttcatttttgtagagatggggtcttgctatgttgctcaggcttgtcttgaactcctgggctcaagcaatccactcgcttcggtctcccaaaatgctgggattacaagcatgagccaatgcacccagctgtttctgttacttttaaataggtttcctgcatttcttt

SEQ ID NO: 158422 - DNA, 359 bp, Homo sapiens
aacagcagtgtcttcctgcatctccaggccctgggaatcccactgcacttggcctacgtgagtgtgttccctccaaccccaggctgaggctctggccatgggaggtccctactgtccatctctgtgggtcagggtctcccaccccagcggcccagccctgcttctccctttcatcttgacattattcaccagggtcctgcctggtgaagccaatggtctctaccagagagaacccagagggcaccaggactacagtaaagagtctagaccaagaggtgggagtcaggttgatgtgcagccctggccaactctgatcctctgcataggctcagtttgcctctctgtccagtgggacaact

SEQ ID NO: 158423 - DNA, 357 bp, Homo sapiens
cacctgtcacagaaaaagaaaaaaaagaaacccgcgccacggagaggtggggcttgggtaccccacggatgaaagtgccttcccatcagcccctgcactgggccccggggaacctagagtccctggttcaagctcagggagagcctcgggccactagtggtaccccaacgcggtggaaagcccatgagaggaaggtgagctgtgagggaggagaggtgagacacttgtggcagaaaagaaaaagaaaccgcgccacggagaagtggggcctgggtctcccatggaaaaaaagtgccttcccatcagtccctgagctgggccccgtggacccaggcgaccctggttctaggcctgggt

SEQ ID NO: 158424 - DNA, 364 bp, Homo sapiens
attaagttagggccacccaactgaaaatctactgaactgggaccgtaattacatctgcaaaaaccccttcacttttggcatataatactaatcatgggagtgacatcttggcgcattctgatgggtgaaagcaaggctcataggtcccactcacgctcgaagggagagactacacctccccttgccgagaacgtggagtttgaatacacggtgtggggggcattatatagactgcgcgctatggatcacttttgtatacatgccataggggcatttatcagcaatcggacaccctttcccctaaatgagttttaatcatggacggaagacgagaacttggaattacctcggatctgaagaacaa

SEQ ID NO: 158425 - DNA, 401 bp, Homo sapiens
ccatcccgttcttttatttccaatcactgaccacaccaggatgtttagccccgattcttcaatggtatacacctttaatattcccatactcctgggatcaatcatgtagaaccagaaccgaacagtacacgttccaaggcttgctgggaaggatttggaagtagtaattctggcaacggatccttccttggagccagatgagttgacgtacaggaagtgctgaccactacctggcgtgtgatcagagtctggaattaatgctttggcaggaattctgctccaatggcccagtccaagtcatcctcagagtcttgagtaagactgcaggctgtggtccagtttcctgaacttgtttcaaaattgcagcttcctgttgtgcttgtatactgtgcacagtgagc

SEQ ID NO: 158426 - DNA, 354 bp, Homo sapiens
  misc_feature (1)...(354): n = a,t,c or g
nnnnnnnnnnnnnnnnnnnnnnnnnnnnnnnnnnnnnnnnnnnnnnnnnnnnnnnnnnnnnnnctacttctattacattttcagcatatatcacttcattgctcctccatattatttttcactggtcttcttacatcttgtgtgcccatatttaagtagttttctttccaggtaaaaaatacatgtgtgcctaaaagattttaaagtcaacttttcataaaccatacctaaattatcaaagttattagaattattagaaagtattagcttattctttttataaaatgtagactttattattttagaaatattgattcctctctattcagctatcttaaagagggtatattttaa

SEQ ID NO: 158427 - DNA, 960 bp, Homo sapiens
atgggactgctgctcaaagctagcagtttggcatctgtcacgggcttctgccttttacaagaaggtcctcaagaccaagaagtcttctacttgttactttttgtcaattacttctcagcaaagcagctcttagcttatcgctgctttgtagaaatggggagtgaaatattagggccaacactctcagaaacaagaccggaagcccttccacctccatctagcaatgaaacacctgcagtctcggatagtaaagagaaaaagaatgctgcaaaaaagaaatgtttatacaatttccaagatgctttcatggaagcaaataaagttgtcatggccacgtcatcagccacgtcctctgtgtcctgcacagctaccacagtgcagtccagcaacagccagttcagagtgtcatccaagagacctccttcagtagccagaggtgaccctgactgcgaagggcaccgctgcgagaatggtgtctacgacccacagcaggatgatggggacgagagtgcagatgaggacagctgctctgagcacagctccagcacctcgacctccaccaaccagaaggagggcaagtactgcgactgctgctactgcgaattctttgggcacggcgggaatgggtttgttcttgtgctggccatcatgagggcagcagcagacactccagctttatctgctggagaaccttcttttcgaagaaaggagccgtcaactgtagagatgatagaagaaaggcccagctgttgtgattgttctaccctcaagagctctgctcatacctcgcagtcctacagtagatttagactgactattgggcctgattgggaggctttgggggagaagccttgtcccgtgccccagaagactagagactgctggagtgcagagaacacagtgtgtcctccattcaggagcgtccagcatcggggtacccacgatggtccaaggccctga

SEQ ID NO: 158428 - DNA, 4833 bp, Homo sapiens
cacaatgacatgcagacctgcatattggagctggacggagaaactgggctaatgtgacagacagcaacaagagtaaggcagttgcttcgctattgagagaaagaaccatatgaagaaatttcggcagaggcggaccgggaacctcagcagctgcagaactactggtcagaagtgcgctacacggtgcgctgcatctaccgccaggcaggaaccccgctggcagatgaccaggaccagtctctggtgcctgacaaggagggagtgaaggagctcgtggataggctctgcgagagggacccctaccagctgtaccagcgtctggaacagcaagctcgagagtatgtgctggagatgaaggtccgcctgctccggcagctgtcggctgcggccaaggtgaaggcaccatctggcctgcagggcccgccgcaagcgcaccagttcatctccctcctgcttgaggagtacggcgccctctgccaggccgcacgctccatcagcaccttccttggcactctggaaaatgaacacttgaaaaagttccaagtgacgtgggaactgcataataaacacctgtttgaaaatctggtcttttcggagccacttcttcagagcaacttgcccgcactggtgtcacagatcaggctaggaaccaccacacacgacacctgcagtgaggacacatacagtaccttgctgcagaggtaccagcgttccgaggaggagctgcgcagagtcgccgaggagtggctggagtgccagaagaggatcgacgcctatgtcgacgagcagatgacaatgaaaaccaagcagcgcatgttaacagaagactgggagctttttaaacaaagaagattcattgaagaacagttaaccaataagaaagcagttactggcgagaacaacttcacagacaccatgaggcacgtgttatcgtcccggctgagcatgcccgactgccccaactgcaactacaggagaagatgtgcttgcgatgactgcagtctctcacacatcctcacgtgtggtatcatggacccccccgtcactgatgacatccacattcaccagctcccacttcaagtggatcctgctcctgactatcttgctgagaggagcccgcccagtgtgtcatctgcaagctcggggtccggctccagctctcccatcacaattcagcagcaccccaggctcatcctcacagacagtggctcggcaccaactttttgtagtgatgatgaagatgttgcaccattgtcagccaaatttgctgatatttatccattgagtaattatgatgataccgaggtggtggccaacatgaatggaatccacagcgaattgaatggtggcggggaaaacatggccctgaaggatgagtctcctcagataagcagtaccagcagtagttcctcagaagctgatgatgaagaagcggacggcgagagtagtggggagcccccaggggccccgaaggaagatggagtgctgggaagcaggagccccaggacagaggagagcaaagcagacagtccacccccatcctacccaacacagcaggctgaacaagctccaaacacttgtgaatgtcatgtttgtaagcaagaagcttctggactgacaccatctgcaatgacagccggagcccttcctcctggccatcagttcttgagcccagagaagcccacacaccctgcactgcacctttaccctcacatccatggacatgtgcctttgcacactgttccacacctgccacgccctctcatccaccccaccttgtatgcaacgccccccttcacacacagtaaggctttaccgccagcacctgttcagaatcacacaaataagcatcaggtattcaatgcatctcttcaagaccatatttatccgagctgttttgggaatactccagagtggaatagttctaaatttataagtctttggggatcagaagtgatgaatgataagaactggaatcctggcactttcttgccagatacaatttctgggagtgaaatattagggccaacactctcagaaacaagaccggaagcccttccacctccatctagcaatgaaacacctgcagtctcggatagtaaagagaaaaagaatgctgcaaaaaagaaatgtttatacaatttccaagatgctttcatggaagcaaataaagttgtcatggccacgtcatcagccacgtcctctgtgtcctgcacagctaccacagtgcagtccagcaacagccagttcagagtgtcatccaagagacctccttcagtaggtgacgtgtttcatggcatcagcaaggaggaccacagacactcggccccagccgccccgaggaatagccccacgggcttggcccccctcccagcgctctcgcctgctgcgctgtcacctgctgcgctctcacctgcctccacacctcaccttgcaaatcttgcagccccatcattccccaaaacagcaaccacaactcctgggtttgtggacacacgcaagagtttctgtcctgcacccctacccccggccacagatggctccattagcgcccctccaagtgtctgcagtgaccctgactgcgaagggcaccgctgcgagaatggtgtctacgacccacagcaggatgatggggacgagagtgcagatgaggacagctgctctgagcacagctccagcacctcgacctccaccaaccagaaggagggcaagtactgcgactgctgctactgcgaattctttgggcacggcgggcctccagctgcaccaacaagtagaaattatgcagaaatgagggaaaagcttcgcttacggctgaccaagaggaaagaggagcaacctaaaaaaatggaccagatctcagaaagggaaagcgtcgttgaccatcggagggtggaggatttgttgcagtttataaatagctccgaaaccaaaccagtgagcagcacgcgtgcagcgaagcgagcaaggcataagcaaaggaagctggaggagaaagctcgcctagaagcagaggccagggcccgggagcacctgcacctccaggaggagcagaggcggcgggaggaggaggaggatgaggaagaagaggaggatcgtttcaaggaggaatttcagcggcttcaggagcttcagaagctaagagctgtaaaaaagaagaagaaggagaggccaagtaaagactgccccaagttggacatgctcactagaaatttccaggcagcaacagagtctgttcctaactctggaaacatccacaatggctcactagagcaaactgaagaaccagaaacctcttctcactccccatccaggcatatgaaccactcagagcccaggccagggctaggggctgatggggatgctgcagaccccgtcgacaccagagactccaaatttctcctccccaaggaggtgaatgggaagcagcatgagccactctcttttttcttcgacatcatgcagcaccataaagaaggaaatggcaagcagaagctgaggcagaccagcaaggccagcagcgagccagcgaggaggcccacagagccccccaaggccacagaggggcagtccaagccccgggcccagactgagtcaaaggctaaggtggtcgacctcatgtccatcacagagcagaaaagagaggagagaaaagtcaacagtaataacaataacaaaaagcagctgaaccacatcaaggacgaaaagtcaaacccaacccctatggagcccacctctcccggtgagcatcagcagaacagcaagctggtgctggcagagtcccctcagccaaagggcaagaacaagaaaaataagaagaagaaaggagacagagtcaacaattcaattgatggagtttcgctcttgttgcccagtctggggtacaatggtgcaatcttggctcactgcaaccttcgcctcccaggttcaagcgattgtgctgcctcagcctcccaagtagttggaattacagatgatgtctttctacctaaagatattgacctagacagtgtggatatggatgagacagagagggaagtggaatatttcaaaaggttctgcttggattctgctagacagacccgacaaagactgtctatcaactggtccaattttagcttgaaaaaagccacctttgctgcccactgaatgaggactccctggagagggacacgcgagaggcaggccaggctgcaccaccccaagagccacgcccctcgctggcgccccagagccgtggtgcttgccaagggctgtgcggagctggtgctgcctgaaaccccagaccgagaagttgatgctcggcccacgccgttagctcgtgtgcgtgtagtctgtgcgtgagactccttcgattgtagctctgtgctgtcggattggaacagtagttcccgccaagtcctcccaccaccgcggcctcggaggcctgggccgtggccagataggagtttgcatcatccacgtggctccgttgcctctgcattgcgccctgtcctgtcatgtgtcctcaccggggtatcggccgtcactcagctctcctgtgcccctgcgtctcaccctaggcgggctgggcggggcaggcctcctttgttctccacaatctactgtctccgagtgtacacgttgcgctgtttgtgtttgatccccctgacttgtagccagcttgtgtaagatcccttgcagaacgagaaagttaaaaacaagcccacccagtactcacaccatcaagtctgttatagagtgtacgactgtattaacacggaggcctgcctggctacttttttaacatattgttaagtaatattaaaatcatgtctttctttttgaaagatg

SEQ ID NO: 158429 - DNA, 4663 bp, Homo sapiens
cacaatgacatgcagacctgcatattggagctggacggagaaactgggctaatgtgacagacagcaacaagagtaaggcagttgcttcgctattgagagaaagaaccatatgaagaaatttcggcagaggcggaccgggaacctcagcagctgcagaactactggtcagaagtgcgctacacggtgcgctgcatctaccgccaggcaggaaccccgctggcagatgaccaggaccagtctctggtgcctgacaaggagggagtgaaggagctcgtggataggctctgcgagagggacccctaccagctgtaccagcgtctggaacagcaagctcgagagtatgtgctggagatgaaggtccgcctgctccggcagctgtcggctgcggccaaggtgaaggcaccatctggcctgcagggcccgccgcaagcgcaccagttcatctccctcctgcttgaggagtacggcgccctctgccaggccgcacgctccatcagcaccttccttggcactctggaaaatgaacacttgaaaaagttccaagtgacgtgggaactgcataataaacacctgtttgaaaatctggtcttttcggagccacttcttcagagcaacttgcccgcactggtgtcacagatcaggctaggaaccaccacacacgacacctgcagtgaggacacatacagtaccttgctgcagaggtaccagcgttccgaggaggagctgcgcagagtcgccgaggagtggctggagtgccagaagaggatcgacgcctatgtcgacgagcagatgacaatgaaaaccaagcagcgcatgttaacagaagactgggagctttttaaacaaagaagattcattgaagaacagttaaccaataagaaagcagttactggcgagaacaacttcacagacaccatgaggcacgtgttatcgtcccggctgagcatgcccgactgccccaactgcaactacaggagaagatgtgcttgcgatgactgcagtctctcacacatcctcacgtgtggtatcatggacccccccgtcactgatgacatccacattcaccagctcccacttcaagtggatcctgctcctgactatcttgctgagaggagcccgcccagtgtgtcatctgcaagctcggggtccggctccagctctcccatcacaattcagcagcaccccaggctcatcctcacagacagtggctcggcaccaactttttgtagtgatgatgaagatgttgcaccattgtcagccaaatttgctgatatttatccattgagtaattatgatgataccgaggtggtggccaacatgaatggaatccacagcgaattgaatggtggcggggaaaacatggccctgaaggatgagtctcctcagataagcagtaccagcagtagttcctcagaagctgatgatgaagaagcggacggcgagagtagtggggagcccccaggggccccgaaggaagatggagtgctgggaagcaggagccccaggacagaggagagcaaagcagacagtccacccccatcctacccaacacagcaggctgaacaagctccaaacacttgtgaatgtcatgtttgtaagcaagaagcttctggactgacaccatctgcaatgacagccggagcccttcctcctggccatcagttcttgagcccagagaagcccacacaccctgcactgcacctttaccctcacatccatggacatgtgcctttgcacactgttccacacctgccacgccctctcatccaccccaccttgtatgcaacgccccccttcacacacagtaaggctttaccgccagcacctgttcagaatcacacaaataagcatcaggtattcaatgcatctcttcaagaccatatttatccgagctgttttgggaatactccagagtggaatagttctaaatttataagtctttggggatcagaagtgatgaatgataagaactggaatcctggcactttcttgccagatacaatttctgggagtgaaatattagggccaacactctcagaaacaagaccggaagcccttccacctccatctagcaatgaaacacctgcagtctcggatagtaaagagaaaaagaatgctgcaaaaaagaaatgtttatacaatttccaagatgctttcatggaagcaaataaagttgtcatggccacgtcatcagccacgtcctctgtgtcctgcacagctaccacagtgcagtccagcaacagccagttcagagtgtcatccaagagacctccttcagtaggtgacgtgtttcatggcatcagcaaggaggaccacagacactcggccccagccgccccgaggaatagccccacgggcttggcccccctcccagcgctctcgcctgctgcgctgtcacctgctgcgctctcacctgcctccacacctcaccttgcaaatcttgcagccccatcattccccaaaacagcaaccacaactcctgggtttgtggacacacgcaagagtttctgtcctgcacccctacccccggccacagatggctccattagcgcccctccaagtgtctgcagtgaccctgactgcgaagggcaccgctgcgagaatggtgtctacgacccacagcaggatgatggggacgagagtgcagatgaggacagctgctctgagcacagctccagcacctcgacctccaccaaccagaaggaggcctccagctgcaccaacaagtagaaattatgcagaaatgagggaaaagcttcgcttacggctgaccaagaggaaagaggagcaacctaaaaaaatggaccagatctcagaaagggaaagcgtcgttgaccatcggagggtggaggatttgttgcagtttataaatagctccgaaaccaaaccagtgagcagcacgcgtgcagcgaagcgagcaaggcataagcaaaggaagctggaggagaaagctcgcctagaagcagaggccagggcccgggagcacctgcacctccaggaggagcagaggcggcgggaggaggaggaggatgaggaagaagaggaggatcgtttcaaggaggaatttcagcggcttcaggagcttcagaagctaagagctgtaaaaaagaagaagaaggagaggccaagtaaagactgccccaagttggacatgctcactagaaatttccaggcagcaacagagtctgttcctaactctggaaacatccacaatggctcactagagcaaactgaagaaccagaaacctcttctcactccccatccaggcatatgaaccactcagagcccaggccagggctaggggctgatggggatgctgcagaccccgtcgacaccagagactccaaatttctcctccccaaggaggtgaatgggaagcagcatgagccactctcttttttcttcgacatcatgcagcaccataaagaaggaaatggcaagcagaagctgaggcagaccagcaaggccagcagcgagccagcgaggaggcccacagagccccccaaggccacagaggggcagtccaagccccgggcccagactgagtcaaaggctaaggtggtcgacctcatgtccatcacagagcagaaaagagaggagagaaaagtcaacagtaataacaataacaaaaagcagctgaaccacatcaaggacgaaaagtcaaacccaacccctatggagcccacctctcccggtgagcatcagcagaacagcaagctggtgctggcagagtcccctcagccaaagggcaagaacaagaaaaataagaagaagaaaggagacagagtcaacaattcaattgatgatgtctttctacctaaagatattgacctagacagtgtggatatggatgagacagagagggaagtggaatatttcaaaaggttctgcttggattctgctagacagacccgacaaagactgtctatcaactggtccaattttagcttgaaaaaagccacctttgctgcccactgaatgaggactccctggagagggacacgcgagaggcaggccaggctgcaccaccccaagagccacgcccctcgctggcgccccagagccgtggtgcttgccaagggctgtgcggagctggtgctgcctgaaaccccagaccgagaagttgatgctcggcccacgccgttagctcgtgtgcgtgtagtctgtgcgtgagactccttcgattgtagctctgtgctgtcggattggaacagtagttcccgccaagtcctcccaccaccgcggcctcggaggcctgggccgtggccagataggagtttgcatcatccacgtggctccgttgcctctgcattgcgccctgtcctgtcatgtgtcctcaccggggtatcggccgtcactcagctctcctgtgcccctgcgtctcaccctaggcgggctgggcggggcaggcctcctttgttctccacaatctactgtctccgagtgtacacgttgcgctgtttgtgtttgatccccctgacttgtagccagcttgtgtaagatcccttgcagaacgagaaagttaaaaacaagcccacccagtactcacaccatcaagtctgttatagagtgtacgactgtattaacacggaggcctgcctggctacttttttaacatattgttaagtaatattaaaatcatgtctttctttttgaaagatg

SEQ ID NO: 158430 - DNA, 2295 bp, Homo sapiens
atgggactgctgctcaaagctagcagtttggcatctgtcacgggcttctgccttttacaagaaggtcctcaagaccaagaagtcttctacttgttactttttgtcaattacttctcagcaaagcagctcttagcttatcgctgctttgtagaaatggggagtgaaatattagggccaacactctcagaaacaagaccggaagcccttccacctccatctagcaatgaaacacctgcagtctcggatagtaaagagaaaaagaatgctgcaaaaaagaaatgtttatacaatttccaagatgctttcatggaagcaaataaagttgtcatggccacgtcatcagccacgtcctctgtgtcctgcacagctaccacagtgcagtccagcaacagccagttcagagtgtcatccaagagacctccttcagtaggtgacgtgtttcatggcatcagcaaggaggaccacagacactcggccccagccgccccgaggaatagccccacgggcttggcccccctcccagcgctctcgcctgctgcgctgtcacctgctgcgctctcacctgcctccacacctcaccttgcaaatcttgcagccccatcattccccaaaacagcaaccacaactcctgggtttgtggacacacgcaagagtttctgtcctgcacccctacccccggccacagatggctccattagcgcccctccaagtgtctgcagtgaccctgactgcgaagggcaccgctgcgagaatggtgtctacgacccacagcaggatgatggggacgagagtgcagatgaggacagctgctctgagcacagctccagcacctcgacctccaccaaccagaaggagggcaagtactgcgactgctgctactgcgaattctttgggcacggcgggcctccagctgcaccaacaagtagaaattatgcagaaatgagggaaaagcttcgcttacggctgaccaagaggaaagaggagcaacctaaaaaaatggaccagatctcagaaagggaaagcgtcgttgaccatcggagggtggaggatttgttgcagtttataaatagctccgaaaccaaaccaaatgggtttgttcttgtgctggccatcatgagggcagcagcagacactccagctttatctgctggagaaccttcttttcgaagaaaggagccgtcaactgtagagatgatagaagaaaggcccagctgttgtgattgttctaccctcaagagctctgctcatacctcgcagtcctacagtagatttagactgactattgggcctgattgggaggctttgggggagaagccttgtcccgtgccccagaagactagagactgctggagtgcagagaacacactggaggagaaagctcgcctagaagcagaggccagggcccgggagcacctgcacctccaggaggagcagaggcggcgggaggaggaggaggatgaggaagaagaggaggatcgtttcaaggaggaatttcagcggcttcaggagcttcagaagctaagagctgtaaaaaagaagaagaaggagaggccaagtaaagactgccccaagttggacatgctcactagaaatttccaggcagcaacagagtctgttcctaactctggaaacatccacaatggctcactagagcaaactgaagaaccagaaacctcttctcactccccatccaggcatatgaaccactcagagcccaggccagggctaggggctgatggggatgctgcagaccccgtcgacaccagagactccaaatttctcctccccaaggaggtgaatgggaagcagcatgagccactctcttttttcttcgacatcatgcagcaccataaagaaggaaatggcaagcagaagctgaggcagaccagcaaggccagcagcgagccagcgaggaggcccacagagccccccaaggccacagaggggcagtccaagccccgggcccagactgagtcaaaggctaaggtggtcgacctcatgtccatcacagagcagaaaagagaggagagaaaagtcaacagtaataacaataacaaaaagcagctgaaccacatcaaggacgaaaagtcaaacccaacccctatggagcccacctctcccggtgagcatcagcagaacagcaagctggtgctggcagagtcccctcagccaaagggcaagaacaagaaaaataagaagaagaaaggagacagagtcaacaattcaattgacagtaagaacctggaccccatcatccatggtgcctttactgacttgctgagtcctacaacacag

SEQ ID NO: 158431 - DNA, 4712 bp, Homo sapiens
cacaatgacatgcagacctgcatattggagctggacggagaaactgggctaatgtgacagacagcaacaagagtaaggcagttgcttcgctattgagagaaagaaccatatgaagaaatttcggcagaggcggaccgggaacctcagcagctgcagaactactggtcagaagtgcgctacacggtgcgctgcatctaccgccaggcaggaaccccgctggcagatgaccaggaccagtctctggtgcctgacaaggagggagtgaaggagctcgtggataggctctgcgagagggacccctaccagctgtaccagcgtctggaacagcaagctcgagagtatgtgctggagatgaaggtccgcctgctccggcagctgtcggctgcggccaaggtgaaggcaccatctggcctgcagggcccgccgcaagcgcaccagttcatctccctcctgcttgaggagtacggcgccctctgccaggccgcacgctccatcagcaccttccttggcactctggaaaatgaacacttgaaaaagttccaagtgacgtgggaactgcataataaacacctgtttgaaaatctggtcttttcggagccacttcttcagagcaacttgcccgcactggtgtcacagatcaggctaggaaccaccacacacgacacctgcagtgaggacacatacagtaccttgctgcagaggtaccagcgttccgaggaggagctgcgcagagtcgccgaggagtggctggagtgccagaagaggatcgacgcctatgtcgacgagcagatgacaatgaaaaccaagcagcgcatgttaacagaagactgggagctttttaaacaaagaagattcattgaagaacagttaaccaataagaaagcagttactggcgagaacaacttcacagacaccatgaggcacgtgttatcgtcccggctgagcatgcccgactgccccaactgcaactacaggagaagatgtgcttgcgatgactgcagtctctcacacatcctcacgtgtggtatcatggacccccccgtcactgatgacatccacattcaccagctcccacttcaagtggatcctgctcctgactatcttgctgagaggagcccgcccagtgtgtcatctgcaagctcggggtccggctccagctctcccatcacaattcagcagcaccccaggctcatcctcacagacagtggctcggcaccaactttttgtagtgatgatgaagatgttgcaccattgtcagccaaatttgctgatatttatccattgagtaattatgatgataccgaggtggtggccaacatgaatggaatccacagcgaattgaatggtggcggggaaaacatggccctgaaggatgagtctcctcagataagcagtaccagcagtagttcctcagaagctgatgatgaagaagcggacggcgagagtagtggggagcccccaggggccccgaaggaagatggagtgctgggaagcaggagccccaggacagaggagagcaaagcagacagtccacccccatcctacccaacacagcaggctgaacaagctccaaacacttgtgaatgtcatgtttgtaagcaagaagcttctggactgacaccatctgcaatgacagccggagcccttcctcctggccatcagttcttgagcccagagaagcccacacaccctgcactgcacctttaccctcacatccatggacatgtgcctttgcacactgttccacacctgccacgccctctcatccaccccaccttgtatgcaacgccccccttcacacacagtaaggctttaccgccagcacctgttcagaatcacacaaataagcatcaggtattcaatgcatctcttcaagaccatatttatccgagctgttttgggaatactccagagtggaatagttctaaatttataagtctttggggatcagaagtgatgaatgataagaactggaatcctggcactttcttgccagatacaatttctgggagtgaaatattagggccaacactctcagaaacaagaccggaagcccttccacctccatctagcaatgaaacacctgcagtctcggatagtaaagagaaaaagaatgctgcaaaaaagaaatgtttatacaatttccaagatgctttcatggaagcaaataaaagttgtcatggccacgtcatcagccacgtcctctgtgtcctggacagctaacacagtgcagtccagcaacagccagttcagagtgtcatccaagagacctccttcagtaggtgacgtgtttcatggcatcagcttgggggatccaaaaaaattcggccccagccgccccgagaaatagccccacgggcttggcccccctcccagcgctctcgcctgctgcgctgtcacctgctgcgctctcacctgcctccacacctcaccttgcaaatcttgcagccccatcattccccaaaacagcaaccacaactcctgggtttgtggacacacgcaagagtttctgtcctgcacccctacccccggccacagatggctccattagcgcccctccaagtgtctgcagtgaccctgactgcgaagggcaccgctgcgagaatggtgtctacgacccacagcaggatgatggggacgagagtgcagatgaggacagctgctctgagcacagctccagcacctcgacctccaccaaccagaaggagggcaagtactgcgactgctgctactgcgaattctttgggcacggcgggcctccagctgcaccaacaagtagaaattatgcagaaatgagggaaaagcttcgcttacggctgaccaagaggaaagaggagcaacctaaaaaaatggaccagatctcagaaagggaaagcgtcgttgaccatcggagggtggaggatttgttgcagtttataaatagctccgaaaccaaaccagtgagcagcacgcgtgcagcgaagcgagcaaggcataagcaaaggaagctggaggagaaagctcgcctagaagcagaggccagggcccgggagcacctgcacctccaggaggagcagaggcggcgggaggaggaggaggatgaggaagaagaggaggatcgtttcaaggaggaatttcagcggcttcaggagcttcagaagctaagagctgtaaaaaagaagaagaaggagaggccaagtaaagactgccccaagttggacatgctcactagaaatttccaggcagcaacagagtctgttcctaactctggaaacatccacaatggctcactagagcaaactgaagaaccagaaacctcttctcactccccatccaggcatatgaaccactcagagcccaggccagggctaggggctgatggggatgctgcagaccccgtcgacaccagagactccaaatttctcctccccaaggaggtgaatgggaagcagcatgagccactctcttttttcttcgacatcatgcagcaccataaagaaggaaatggcaagcagaagctgaggcagaccagcaaggccagcagcgagccagcgaggaggcccacagagccccccaaggccacagaggggcagtccaagccccgggcccagactgagtcaaaggctaaggtggtcgacctcatgtccatcacagagcagaaaagagaggagagaaaagtcaacagtaataacaataacaaaaagcagctgaaccacatcaaggacgaaaagtcaaacccaacccctatggagcccacctctcccggtgagcatcagcagaacagcaagctggtgctggcagagtcccctcagccaaagggcaagaacaagaaaaataagaagaagaaaggagacagagtcaacaattcaattgatgatgtctttctacctaaagatattgacctagacagtgtggatatggatgagacagagagggaagtggaatatttcaaaaggttctgcttggattctgctagacagacccgacaaagactgtctatcaactggtccaattttagcttgaaaaaagccacctttgctgcccactgaatgaggactccctggagagggacacgcgagaggcaggccaggctgcaccaccccaagagccacgcccctcgctggcgccccagagccgtggtgcttgccaagggctgtgcggagctggtgctgcctgaaaccccagaccgagaagttgatgctcggcccacgccgttagctcgtgtgcgtgtagtctgtgcgtgagactccttcgattgtagctctgtgctgtcggattggaacagtagttcccgccaagtcctcccaccaccgcggcctcggaggcctgggccgtggccagataggagtttgcatcatccacgtggctccgttgcctctgcattgcgccctgtcctgtcatgtgtcctcaccggggtatcggccgtcactcagctctcctgtgcccctgcgtctcaccctaggcgggctgggcggggcaggcctcctttgttctccacaatctactgtctccgagtgtacacgttgcgctgtttgtgtttgatccccctgacttgtagccagcttgtgtaagatcccttgcagaacgagaaagttaaaaacaagcccacccagtactcacaccatcaagtctgttatagagtgtacgactgtattaacacggaggcctgcctggctacttttttaacatattgttaagtaatattaaaatcatgtctttctttttgaaagatg

SEQ ID NO: 158432 - DNA, 450 bp, Homo sapiens
  misc_feature (1)...(450): n = a,t,c or g
ggggtgccatataaaagacacatcgagggtttctaaccgggtttaaacgggccccttaaattcaacggcccccnnnnnnnnnnnnnnnnngatggcttactacgtttattttctggcggttctggaggccagagtccaaactgggtcccactgggctcatatcaaggcaggagcaggccggtccctcccgggggctccagtgcggaaccgttcccgccttccccagcatctggaggcacccacgtccctcagcttagggcccttcctccccttcacggccacagcgcggcccatccccatctctctctggctctcaccgtcccgcctcctgtcgtgaggaccctgtgaggacactggggccctggaccccccaccctggatgctcctccatctccgtcccacctgcaggtgcctttgtcctcgcaaggcggaattccaccgcactggact

SEQ ID NO: 158433 - DNA, 375 bp, Homo sapiens
  misc_feature (1)...(375): n = a,t,c or g
cacatcttgaactagggtgagaaccccttaatgaggtggccagaggcacttccaggagtctttaagacctgtttctccccacccacctaggggtatggtgggggcctcatgtttctttgccaccatgctgacagcattaacttttctgccttccagccaatcaacaatgctgacttcatagtgcctatagagattgaggggaccactcaccaggtgagctgccagccagaccacacccagcccagagggtggggggtctgccttctgcctcacctgtactggggtcctccacccatctcagggnctgggttctgtcagttgatcccttttctataactccagcctcccctttttattggtatctttcactcaagg

SEQ ID NO: 158434 - DNA, 808 bp, Homo sapiens
ccgctcccattcccgcttcttctctctttccaacagtccgctaacgaaccaggtactgtaggcgctgtctataactttgcttttcgatggttcagtcattattagcattatgattggtttttacaaaacgcaactggaatcttaaagaatcttttccctttgctctgctgccctttcaaaaaaacatggaaacccccaggactgctcccgaagggcccctgggaatgtgccggctgcaatctcaagggctccctcacttgtcttgggtctgagggcgcgaacggtgacgagaaaggggggactacggcccaggaaaggggagcagggcccaatcccctcccctagcgatcccgcagtgaagggcccgggcgccgagccaggacaggcgcgattcgctcccgtttatcaaatccttatcggtgccccgaggtgggaaccgctgctttcgaccggaggatacacggtttctggctccagtcccgtagtggaagttggaacaagagcaaatcaacctcggcagtgagccctcccggccagtcacctccctcccttagcgagtcggtcctcctcatcctcgcacctctataccgccgctccgccgctggtttcccgcggctcaggcggttcagccggccgcgcgttggattccagcttcccgcagcatagcctcgccaagccgcggccaagcgcggggctggaagctccaggccactggggccgcacgggtggagacaggaggagaaaggggacaggcggcgagccgcacacatttgcagaagttgaggccctgcctgcttctgcgcggccg

SEQ ID NO: 158435 - DNA, 369 bp, Homo sapiens
  misc_feature (1)...(369): n = a,t,c or g
nnnnnnnnnnnnnnnnnnnnnnnnnnnnnnnnnnnnnnnnnnnnnnnnnnnnnnnnnnnnnnnnnnnnnnnnnnnnnnnnnnnnnnnnnnnnnnnnnnnnnnnnnnnnnttttggcccaggcccccccctttaatccccccttttttaggggccnnnnnnnnnnnactccggggtcgggaaataaaacccttcttttttacccgggggaacccccgttttttttaaaaatccaaaatttcccccgccgtggggggggccccctgtttccccccttttttgggggggtgaaacaggaaattggggtaaccccgggggggggactttggaagggcccggatatccccccttggccctccccggggggaaag

SEQ ID NO: 158436 - DNA, 394 bp, Homo sapiens
tggacgcgtgggcaggaatacaggagaagaggtcggtcacgatgccgagagatttgaactccaccgggaagatcaagaacttaggattggaggagaaggaggagagactctcggagctcatagagagaagattgtcaaagcacaatctacgtgaggaaaagggccaaatctaattgttggtgttggagcaaagagaaatcaaagagtcatgaaagagattcaatacctattagaattgaagaaaagaggatgaggtcacggagtaaaggaagggatcatgaaaatgttaaagaaaaagaaaagcagtctgattctataggaaatgatcaggaagggagtagaagtagagagaagtctaatcagtttgattcaaagagtaatgagcgtgatcaca

SEQ ID NO: 158437 - DNA, 2257 bp, Homo sapiens
cgcggcgcagggccgccggagagcgcgggtgacctggcggcggcagatgccgctcgcccagctcaaggagccctggccgctcatggagctagtgccgctggacccggagaatggacagacctcaggggaagaagctggacttcagccgtccaaggatgagggcgtcctcaaggagatctccatcacgcaccacgtcaaggctggctctgagaaggctgatccatcccatttcgagctcctcaaggttctgggccagggatcctttggcaaagtcttcctggtgcggaaagtcacccggcctgacagtgggcacctgtatgctatgaaggtgctgaagaaggcaacgctgaaagtacgtgaccgcgtccggaccaagatggagagagacatcctggctgatgtaaatcacccattcgtggtgaagctgcactatgccttccagaccgagggcaagctctatctcattctggacttcctgcgtggtggggacctcttcacccggctctcaaaagaggtgatgttcacggaggaggatgtgaagttttacctggccgagctggctctgggcctggatcacctgcacagcctgggtatcatttacagagacctcaagcctgagaacatccttctggatgaggagggccacatcaaactcactgactttggcctgagcaaagaggccattgaccacgagaagaaggcctattctttctgcgggacagtggagtacatggcccctgaggtcgtcaaccgccagggccactcccatagtgcggactggtggtcctatggggtgttgatgtttgagatgctgacgggctccctgcccttccaggggaaggaccggaaggagaccatgacactgattctgaaggcgaagctaggcatgccccagtttctgagcactgaagcccagagcctcttgcgggccctgttcaagcggaatcctgccaaccggctcggctccggccctgatggggcagaggaaatcaagcggcatgtcttctactccaccattgactggaataagctataccgtcgtgagatcacgccacccttcaagccagcagtggctcagcctgatgacaccttctactttgacaccgagttcacgtcccggccaccctatgagtcctcctggcaaccccccccagaattggggcccaacacctggttctggggcgtcccatccgtggccaccggcttgatggaagacgacggcaagcctcgtgccccgcaggcacccctgcactcggtggtacagcaactccatgggaagaacctggtttttagtgacggctacgtggtaaaggagacaattggtgtgggctcctactctgagtgcaagcgctgtgtccacaaggccaccaacatggagtatgctgtcaaggtcattgataagagcaagcgggatccttcagaagagattgagattcttctgcggtatggccagcaccccaacatcatcactctgaaagatgtgtatgatgatggcaaacacgtgtacctggtgacagagctgatgcggggtggggagctgctggacaagatcctgcggcagaagttcttctcagagcgggaggccagctttgtcctgcacaccattggcaaaactgtggagtatctgcactcacagggggttgtgcacagggacctgaagcccagcaacatcctgtatgtggacgagtccgggaatcccgagtgcctgcgcatctgtgactttggttttgccaaacagctgcgggctgagaatgggctcctcatgacaccttgctacacagccaactttgtggcgcctgaggtgctgaagcgccagggctacgatgaaggctgcgacatctggagcctgggcattctgctgtacaccatgctggcaggatatactccatttgccaacggtcccagtgacacaccagaggaaatcctaacccggatcggcagtgggaagtttaccctcagtgggggaaattggaacacagtttcagagacagccaaggacctggtgtccaagatgctacacgtggatccccaccagcgcctcacagctaagcaggttctgcagcatccatgggtcacccagaaagacaagcttccccaaagccagctgtcccaccaggacctacagcttgtgaagggagccatggctgccacgtactccgcactcaacagctccaagcccaccccccagctgaagcccatcgagtcatccatcctggcccagcggcgagtgaggaagttgccatccaccaccctgtga

SEQ ID NO: 158438 - DNA, 1848 bp, Homo sapiens
atggctgaaggggatgctaagggagataaagcaaaggtgaaggacgaaaaacctgctcctccaaagccagagcccaagcctaaaaaggcccctgcaaagaagggagagaaggtacccaaagggaaaaagggaaaagctgatgctggcaaggaggggaataaccctgcagaaaatggagatgccaaaacagaccaggaagggcctgctgcccagctgcagggagtttggacagcagacagcctccagctgtcagctccagggctggcctcagatgcagacagcctcctcgcccaagatcacatccttccacatccttcctcatccttccccagggcggcccccatcagaaagcgcttcaccaccatcacctggttctcgcacataaattgctcattgagaacgggccatgatgacaatggcggttttgtggaacagaaaggggggaaagtacgtgaccgcgtccggaccaagatggagagagacatcctggctgatgtaaatcacccattcgtggtgaagctgcactatgccttccagaccgagggcaagctctatctcattctggacttcctgcgtggtggggacctcttcacccggctctcaaaagaggtgatgttcacggaggaggatgtgaagttttacctggctgagctggctctgggcctggatcacctgcacagcctgggtatcatttacagagacctcaagcctgagaacatccttctggatgaggagggccacatcaaactcactgactttggcctgagcaaagaggccattgaccacgagaagaaggcctattctttctgcgggacagtggagtacatggcccctgagggctcagccttgatgagtcccgggggctgtttcagggcgaagctaggcatgccccagtttctgagcactgaagcccagagcctcttgcgggccctgttcaagcggaatcctgccaaccggctcggctccggccctgatggggcagaggaaatcaagcggcatgtcttctactccaccattgactggaataagctataccgtcgtgagatcaagccacccttcaagccagcagtggctcagcctgatgacaccttctactttgacaccgagttcacgtcccgcacacccaaggattccccaggcatcccccccagcgctggggcccatcagctgttccggggcttcagcttcgtggccaccggcctgatggaagacgacggcaagcctcgtgccccgcaggcacccctgcactcggtggtacagcaactccatgggaagaacctggtttttagtgacggctacgtggtaaaggagacaattggtgtgggctcctactctgagtgcaagcgctgtgtccacaaggccaccaacatggagtatgctgtcaaggtcattgataagagcaagcgggatccttcagaagagattgagattcttctgcggtatggccagcaccccaacatcatcactctgaaagatgtgtatgatgatggcaaacacgtgtacctggtgacagagctgatgcggggtggggagctgctggacaagatcctgcggcagaagttcttctcagagcgggaggccagctttgtcctgcacaccattggcaaaactgtggagtatctgcactcacagggggaatggaagtgggcgctcagacctaactacctgagatcctgctggctgggccgctaccccttatctcttcggggttccaactccgacagcccctcgcaactagaattcccctctaacaagtgctctgcgcccctgcggggctccgagaggggcgtcgggggcgcagctgccgccggggccgtgggaaccagagctgagagacacaagaactga

SEQ ID NO: 158439 - DNA, 450 bp, Homo sapiens
  misc_feature (1)...(450): n = a,t,c or g
nctgattcccntcggaaccgccctgaattacctctgtcgacccacgcgtccggggaaacgcttctacaggatatggaaaaatttggctcgatgatgtttcctgtgatggagatgagtcagatctctggtcatgcaggaacagtgggtggggaaataatgactgcagtcacagtgaagatgttggagtgatctgttctgatgcatcggatatggagctgaggcttgtgggtggaagcagcaggtgtgctggaaaagttgaggtgaatgtccagggtgccgtgggaattctgtgtgctaatggctggggaatgaacattgctgaagttgtttgcaggcaacttgaatgtgggtctgcaatcagggtctccagagagcctcatttcacagaaagaacattacacatcttaatgtcgaattctggctgcactggaggggaagcctctctctggg

SEQ ID NO: 158440 - DNA, 384 bp, Homo sapiens
tttgtatgatagagaaaaaaagttccagtaacggcatactggaagcagcagttttccaattattatgaggagttgacacctctgtgcctgtgtctaggctaatttagtctggactgttaacaaaatgaatcagtagtccatatgaagaccttcctggctgtttttaagctaccgctgaaaatcagacagataaaatgtatttatattttttacaattaggagttgaagttatattctgtaatattaaaatatttttttctttacgattttagaccagtctgcttagttttaagtgaaattccttttatgtctacttggtttttacttgtgtcaacatttaggtaagtcatatcaatttccatatattttcagtataattcttgg

SEQ ID NO: 158441 - DNA, 383 bp, Homo sapiens
ctgaaaaaggaccactttctcctaaagttctttttaatcacctttgtcagaaggcacctcgatttaaagatttccagcaacaggacagccaggagcttcttcattatcttctggatgcagggaggacagaataaacaaagcgaatacaagctagcattctaaaagcatttaacaacccaactactaaaactgctgatgatgaaactagaaaaaaagtcaaaacatatggaaaagaaggtgtgaaaatgaacttcatagatcggatctttattggtgaattaactagcacggtcatgtgtgaagaatgtgcaaatatctccacggtgaaagatccattcattgatatttcacttcctataatagaagaaagggtttcaaaacct

SEQ ID NO: 158442 - DNA, 344 bp, Homo sapiens
tccatactaaattttagaagtgcagatccagaaactgaactgcttaatttcacagattgaatgctaaagctctaagtctgttgacgcttctgaatgtctatcagaagaaacatctggttgaaattttgtcataccacaattgtgattcacaaactcgaaatgctccagaattggattgccttatcagacttcaggctcagaacatacagcaacgacacatagtctttttaacaggtaaagagagcactcctaagctttctactatgaatataggaatgtgaatgaaaggattttatggggctgtggtgggtattgctaagctttgattctgaaaatgtgaagga

SEQ ID NO: 158443 - DNA, 398 bp, Homo sapiens; identical to SEQ ID NO: 158236

SEQ ID NO: 158444 - DNA, 1154 bp, Homo sapiens
ttttttttttttttttttgaggtggagtttcactcttgtcgcccaggctggagtgcagtagtatgatcttggctcactgcaacttctacctccagggttcaagtgattctcctagtctacgactccggagtagctaggacatgaggcacataccaccaagcccagctgatgtgtgtatttagaatagagacggggtttcactatgttggccaggctggtctcaaatgcctgaccttgagtgatccacccgcctcggccctccccaaagagctgggattaacaggtgtgagccaccaggcccggcctccctagattaaatcttgacattttttggatcaagtaagaacccactggagcctttccctggaaaaaaagaacacatactccagtctcacacacaatttcttgggggctcacagaccctcttgaagcctatccataaaaccccctgggtgaagtccccctgcccgatagcctgagggaagacatgtgagtggatatatgtgcactaacaggggcgaagacagacctggatggtctgcaatcccagagagcatgaggcaccatgtcccaaagcttggtatgtggccctgggctcctccccctaattttatctctctgaagaagctgagttttttttttttttttttgagacggagtctccctcttgtcgcccaggctggagtgcagtggcatgatgtcagctcactgcaacctccgcctcccgggttcaagcgattctcctgcctcagcctcctgagtagctgggattacaggtgggcaccaccctgcccagctaatttttgtagcttttagtaccagccggggttttgccatgttggccaggctggtcagcaactcctagcctcaggtgatctgcctgcctcagcctcccaaagtgctggggattacaggggcgtgagccaccacgcccggccacgttctgagttttgaggatccagaaacaaaaggctggaaagcgacacttctacaggtttactgatgaagtccggagaaaatccaaaaacaaagccccactgaggggtttgtgaatttggctgttctcagtggccaggcagagtctctgctccactcttctttcccagctagcagggaagtgaaggcaaagaactgtctcagaaacaagtctctag

SEQ ID NO: 158445 - DNA, 346 bp, Homo sapiens
gttatgtagaaagttaacatttggagaatctgagtaaagggtatatacaaattatttgtactattttgcaagtctaaaattatgtcacatttgaaagataagtccatttaatatgcataggtatgtaataattcaatagtttcccccaatttgttatttattagagataggctctcactctgttgttcaggctggagtgcagtggcacagacatagcgcccagtatccttgaattcatgagcacaagcaatcctcatgcgtcagcctcatgagtagctagcactacagccatgtgcccccaagcccaggtaatattttacttttgtagagacgcgggtcttgcgtt

SEQ ID NO: 158446 - DNA, 348 bp, Homo sapiens
cgcaggggtcccccccggtaatccccccctttgggggggggagggggggggttcccctaggggggggggtttaaaaccgggtttcccacaaaggggaaacccctttttttttaaaaaatcccaacctaccccccccggggggggcccccccttaatcccccccccttggggggggggggcagggggttcccctttaccccaggggcaaaggttccaataaaccaaaattgggccctttccctccccccggggcaaaaaaaagaaaccccccttcccaaaaaaaaaaaaaaaaaaaaaaaagagaaaagaaaagagtgagatgcctggatttatggtcttaaatgcagc

SEQ ID NO: 158447 - DNA, 498 bp, Homo sapiens
  misc_feature (1)...(498): n = a,t,c or g
cgganncacananntttgacnnccntnnnnntttgccncgcctgcaggaattcggcacgaggtactttgtatgtgttgagagtttacagagctctttgacatacgcgatcttagtctttacaaataaggaaaacagctcagtttgggaagtatcagagatgggattcaaacccagatcctctggtccaagttgtatgtgcactgaactaatcaggcaggaaaaaagcccagccactgtctcacagattgttttttgtatattgtagcaaaatcctgaaacaatggggtccttccagtctcatcatacaaaatggcaatcttnnnnnnnnnnnnnnnnnnnnnnnnnnnnnnnnnnnnnnnnnnnnnnnnnnnnnnnnnnnnnnnnnnnnnnnnnnnnnnnnnnnnnnnnnnnnnnnnnnnnnnnnnnnnnnnnnnnnnncnnnnnnnnnnnnnnnnnnnnnnnncctgggggggggcccggggcccaatttccccttt

SEQ ID NO: 158448 - DNA, 474 bp, Homo sapiens
  misc_feature (1)...(474): n = a,t,c or g
gtggtntnnnnaattgctcgctcgtcctgcaggaattcggcacgaggtactttgtatgtgttgagagtttacagagctctttgacatacgcgatcttagtctttacaaataaggaaaacagctcagtttgggaagtatcagagatgggattcaaacccagatcctctggtccaagttgtatgtgcactgaactaatcaggcaggaaaaaagcccagccactgtctcacagattgttttttgtatattgtagcaaaatcctgaaacaatggggtccttccagtctcatcatacaaaatggcaatcttnnnnnnnnnnnnnnnnnnnnnnnnnnnnnnnnnnnnnnnnnnnnnnnnnnnnnnnnnnnnnnnnnnnnnnnnnnnnnnnnnnnnnnnnnnnnnnnnnnnnnnnnnnnnnnnnnnnnnncnnnnnnnnnnnnnnnnnnnnnnncactggggggggcccggccccaattc

SEQ ID NO: 158449 - DNA, 1127 bp, Homo sapiens
  misc_feature (1)...(1127): n = a,t,c or g
cgagtttaccctgcaccatgtccccccctgaccctaattttttttttaaagtggttccccaggggattagggaagaaagggatgaaccaggttaagccttggggaggttttaggccagtgaacctattctgtatgattctataattgtagatatcatcatacatttgtctaagcccatacaatgtacaacaccagagtgaatcttcatgtaaagtatggacctttgggtgataatgatgtgtccaatggaggtttattgattgtaacaaatgtacccactctggtgtgggatactgatagtggtgggaggctatgcatgtgtgagggcaggggatatatgaagnaaattcccttttgtcccacttttgcctgtgaacctacaactgatttaaaaaaataattatttaaaataattttttaactacactctgaagatgaaatcaagagtaataggatgggcctctggactcaaaaatgaaatttttttttttttttttttttttttttggagagacaggtatcgtgcaatgttgcccaggctggtcttgaatctcctattcttaatagagccacctgtctctattcttgtaaagcactgggattataggcatgaaccaccgccacccaggccmagattgccattttgtatgatgagactggaaggaccccattgtttcagggattttgctacaatatacaaaaaacaatctgtgagaacagtggctgggcttttttcctgcctgattaagttcagtgcacatacaaacttggaccagaggatctgggatttgaatcccatctctggatacttcccaaactgaggctgttttccttatttggtaaaagactaaggatcgcgtatgtcaaagaggctcctgtaaacttctcaacacatacaaagtactaccctgctggaaaatggatttataaaatggtatctttaaagaatggtcccagatgagtgaatggttgggttatgatggcatggaccacacctttagtgggctcctgggtcagctcctgactttgagaaaacacagataggaaggcccatgtcccacgcacaagacaaccagctcgaagcagggacaggcaatgagaggtgaaagagacctagtactacagct

SEQ ID NO: 158450 - DNA, 818 bp, Homo sapiens
aaacaggaaattgagggaagggagaggcagatacagggaagagaaaataaagttaaccccaccccccaaaagaagaaaaggagagggttcaaggccctcagaggaaggaaagtttcgtaacacagcaagggttcacaggttcagagcccagggcctgagcccagctctgcaggacccaaaccaggtgcccaaccacagccaacttggggactggcggctcctgaggaagggagggagggagggaagtgtggccgccactgcaggaactccaagcccctgtcccagccctgtgctggagtgtggagtggcagaggggcagaggaaggaggagcaggcccagaccatcctgcccgtcctacaggacccccttcctctccctcctgctcagcaggactgcctgacctttagtgaggcctgaagccgcctctggaggcaagcagtatggaccctggttttgtcttagaagggggacccagggtcagggaaggagtgtgtcaggatggaatctgagcatgagagttagaggaggtcccctctcctgggggctcagccacctctggagcagccaccttgtcagacaggagaggtggcaatggggccagccaggcaaggctgccctaaccttcacactggcttccacgggcaaagtaagcccctcagggctgagcttccccaggctccccgacggcttgccccgcccatccacactcatggaaagggggctctgctgggccaggaatgggcaggggcagggtagtaggggacagaggcggtgcttgggggacaggcagccactgcaaccccactccctctagtct

SEQ ID NO: 158451 - DNA, 368 bp, Homo sapiens
ctgaaactagtctttcacatgctgctttcagatgcataccaaacttttgtgccttaacacactttgcaatacttttctctccactggggctttcttcctcattgttttgacttggctatctcctattgctgtcaggcttagtttaaatgtcatttcagagagacctttcttattcatcctgtctgtagtagatccttgtgcccatattctctatctcagccttttgtttgtgtcataggtcttaccacaatatgtaattgctttatttgttccccacaaaagaatgtaagagaccatgtatgcttgtttaccagtgtgtccctagctcttaaccgcatgcctggaacataactgttcaatatttattt

SEQ ID NO: 158452 - DNA, 6162 bp, Homo sapiens
ttactccagacagaagtgctggctggtagggtggtgtgggcagaggagctctgtgtagcctgagggttcctggtagtcgggcttggtgaagtagtcgaggctggcaatgtggtccaggaagaggtggaactctgacggcatgtgcttcagcagcatccggtgctcatacttctccttgatcatccctacctgttccttgtccttgatcttcctccagggcagctggcccactgcaaactccaccagcatgtagaagagggaccacaggtcgtcgtggcggcccatctcccggttcttgtgggcattgactgaggcatagcgaaccgttcctcgaaacccggccacattccgagggggccgcacatcccccgtggtgttggtgtactgccgggccagcccgaagtccagcatatagcacttcctgtaggtggagggcagcctgcccatggcaaagtttgaaggcttgatgtcacggtgcaggaagcccacagagtggatggcctcgatggactccaagatctgcttgcccagccgcaatgtggtgctcagcgtgaaggtgcctcgcggctggctacggcgcaggtcggccaggttccggccctggagctgcatcactacatagttaaacttctcgttcctgccacagccaatgaacctgcacacatggtccttccctctcttagcccctggcttcatcatctcttccttcccatccccctgcccgaggcccgaaccttgcaacttcttgagcacggccacctccatcttgaggacctgcttgggctgctgggctgactccaccttgagggccacattctccctggtcagcaggtccatggcctcgtagatctcaccaaagcccccgcccccgatctttttcagctctttgtttgctgtctgcggaacgttttgccagttgccgttatcctttctccactgtacgtcatagaaaactgcgtacggcactttatcccagctaacaatcatcgtttctacgctcatcccctggacgattctcgactctgaggacactttcacgttttcaggcttagggatctgatctggctcaacgatgcttgtcggtcggtcgtcgatgttaaccccgtaatcaatttcatcgtacttattaggatcgtactccaccgccgtgattttgtaggtaaattcctcatcatcatcgcccttgtcgatttttgtaactacgtactgctgcaacgcaaggtcggtgcggtcgattgcgaataccgtgttaggcttcacaggaaagccaaagccgatgttaatctctatggtcttaccatccgcactaacacttgagattgtgcgcttcacgggcttgccatctggcttatttacgataataaagtcacctgcgcgcgcatcaacgcggaacggcaggaaaatctgactacctgacacttcgagcaatcgccctgacaggttcatcgtcaagttacttgaccagaagttatcagatattgccaccacgtctccgattgtcggaatcatcccttccagtccggtagcgaagtttaccgtagtgctgcggaggttggttttcagaatccatctcccgcgtcggttggcctcgcttcgacgtgtgcacccgatcgctgtaatgctcgttacgttgttcccgaaccgtagagtggcctcacgatcgaatactggctcaacgtcctgttgatacatgttttgctcatcatcaaacatcacgttgcacgtcgtgtacatgctcttctcgcttgcgaaagtatatgagaagtcaccattaactacgttgtcgttagtgaagatgtacgcaggttcacgcggcctgtcgatgattacagaaatgctttcaccattccaaaaactcattccacggaagattgagcaaatatctcgaaccaccttgtacgcatcagtctgagactggattatcacgtcacaaaggtagcgaggttccgtgccgcctttgccgtcagggaccatctggtcgcaatattgcgccgcctcatagagcgcccatttgtctacggagattccaagctctttctgatccagaccataacgctgattaatcatgaggtcataaagaacccatgccggattattagtccatgcttttttgaaagtgccatcccaattgccgttgtatgttcgcgattctggatcgtagttcgacggaacgtttacaatcttccagcgcttacgaattgagatcgtaggtaactggttggggaacatcttcgaatcgaactctacgaaaagaagaccagtcagaggatatcggaacttggcatcaatgacctcagcatagcttcttacctggattgcatcaacgacattcgagtcattggaatcaggcgtctttcgaacaactctgaatattacctgattgttgaagttaggcaggtttacgcgacggcttcgatcataacctgacattgttttaccttcgattacgtcagtaagaacagtctcaaacgaaccgccatcaaccgcttgctgcacctcgtactcaactcgaacgccatttttatcaccgttactttcaattcgtacgccgcgaggcatgaacattttgatacggattgccgacagcgttttgttggttactgagatcgtgtatgggttatcggtagtaacctcacgatttacagttacctcactagagctatcttccattcccttgatgtattcctgcgtctgagttcccggcctgaattcagcctttaccccttcgaagttgaacgatccatcctcgttttgcaccgggactgagttaaacatcaactgctttaggctgaatgtttcgtcaatttcaccatcagatacagctggcacgagctgattgtcattcggagaagctctaggtgggaggcagtggcccttcctccactccctctgctggacccagagggcagtagagggccttgggagggcctcaagttgacaaggagggctctgtccggagaagtttcctgagtgttctgggagcttctgcatcagcgtggggtggacgtcaaaggctgtccacccaggagtcctcccctcagctggtctgctggtgatggctgtgtccaatgctggggccgcgccatgggatctgctggcgggctgctgggctgcaacaggcatgggcatgcggaggccaatggggcggggaatccggctcctggtggcggctgccctcccgctcttcctgggcaaggccgctgccggctcagaggcgggcgtgtcctcctcagagcccgtgcctgagagggtctcagaggcacggcgctgctcctcactggaggaggacgaggcccctgaggccagccgcaacagcaggcggccctgcctcttctccatcaccagccgcgccaggtcctgctgcggccgagcccgcttgctccaccgctctttggccgacagtgagcctgagggctccgagcccgtgtcctcctcagagagcaggacagggatacggctcctggggcgagagcctggcatagcatggcgtctgggggagatggtggccactttctcagggcttggctccagcggggacaccggggctggcccgtctgcaagggccgggccattgggcagtgagtttgtggccatctctgagggggtttcccggggggccccagacagggcagagccctctatctcagccccattcagccctgacagggcgaggccgttctccaggggcgctcgggccccctcctccacagcgcccccatcagaggccagctccagacccagctcgcccccagcgctgaactcctcagaccgcaaggcttgtccaccggaagacatgacgttgaggtgggttttctccgcaatgtgcacaaaggtcctctcaactttggtgaagggtgaggaggtgactgccacgcccccgacccctgtggtcactgtcccggcccccagccctgccccaggccccgggggcttgggctcagacttgaggacagaggacagggtgcctggctcagatacgtccagctggctgcccgtgggctggggccgctcatgctgaggagtgagggcagccagggtgcccaggtcggggtcgggggccagttcggcagtgacgggcgacttcttcatgtcgccaggagagacaagcaccagcgttttggagccctcctcaggctccaggtccccatcggccatggaggcccggcccctggactccttctgatcgtctgccagcagcgtggacggggcaccctcctggctccggtcagtgctcctctcactcccctcactgctggagccactacgaggccccagcacctcccccaaggcaactgccgctgcagcctcctcctcctcttcctcctcctcctcttcttcctcctcctcttcctcttcctcctcttcttcttcctcatcctcttcttcctcttcctcatcttcctcctcctcctcctcttcctccttcccattagcctgaggctgaacaggagccagtgggacctggggggtggtgagcagcatgtgcgagaagcccaccctccggaccctgttgagcaaccgcgcccgttctcggtaatcggagaggtctcttttgaagtcctggtagggcagactcagaggcacagctcgtgggaggccattcacctcaaatgggggcgccacggagaacaccttggtttggaggtcattggccccctccccaaccccagaaaagcctggatgccacacctgctgcagctgggaccgcgagatgcggagcaccgagggcatgagtctgtggttgccagcagcgaggggcgcgtggcgccggtggggcgcccgcacagggctgctctcagccgagcggctgcgctgaatgagggaaccggaggagcccgaggagccgccgccgccggggtgagggtaatgctccgtctccagcgtggaggaggagaacacggaggacgccagtcgtcgcagggggctgtaccgcgggagggagtgccccgagagtctgtcctcctccaactgtctctgtgggcctgtggggtccgactctctccgtcgagggcggggtcccgagtgcaggggtgagtgggaagggctgccaggcgtggggggctgtgacgtctcggaacggccatcgccctggctcagctggggtggcaggggctggggcggcaaatgctgcaggtcctcctccgccagcgcctgcatgctgcgtccccggggccggacggtgggctctgcccccagccgccgccgctcttcgccctcctcgggcagtggccgcagctcctcgggctcctcatccgtggtgcccgatgtgctgggctcagcccctggagggaagtccttgagctccgtctccttgtcgatgatgacccactctttgctgtcgaaatcctcctcctcagccagcggcaccgagcggaaggcgttgctcagggcctcctgctccacagaggctgacacgtccatgcggccactggcctgtcggtcagcgtggcctgtgtccactgacagcatctgggctggctgagaggagcaggcctggcgcgagggcgagccaggcagatccatccgtgacctcctctcaggtagctccactcgcccgtccgccgtggacagcctttctgactcagggctgttcaccctccggtagcgcagagaacggactggggttgtgggggagtctgggggggcacgcactggggagctggggacccccatgcctcggctctgttcctcctccacacaggggctgcccttcgccctggcggcagttactttgccgatgttgatccggagtttgttccggttgacatctgtctcctcccagacttcagcctcaggacccccggggtgggggacaaggtggggactggggcccagcccctcagagggcctcccgggcagaattgggggtgcattctcctggtcactcaggtgctctccctgtagcacatcctcggtgttctcccggagcaggtccccaggcactggcgtcacattgaccaccccaaacatggctgccgtctgccgggtgttctgctggggcggggtagaggtgctcgtggacaggagggcatcggtgcctgccttctcccagtcaaaggcctcattctcggcaatgcccctctccttcatgctgttctcaaacactgacatgatcaactccgtcccctgtccccatggcttcacccctggctctcctgtcat

SEQ ID NO: 158453 - DNA, 567 bp, Homo sapiens
gaagaaaggccttagtgtgccccagcagtctggctgcgtccagccaccatcacccggaaggatgcccacaaggcagctgaccctgaaagcagcctccccctcatggagagtcagcagcttgggcagccacttccaggccagggtggtggcttctctgcagaccagctgaggggaggactcctgggtggacagcctttgacgtccaccccacgctgatgcagaagctcccagaacactcaggaaacttctccggacagagccctccttgtcaacttgaggccctcccaaggccctctacttgccctctgggttccagcagagggagtgggagggaagggccactgcctcccacctaggagctttttccgaatggacaatcagttcgttgccaggttgggggaccaggatatgactcctggtgcccaggccctgggcctgctccttgcccgccaaccgaaccgtgaatgtagggcccccaagccctcacctctgccccaggaccaaacaaacaccctggtttggagctgggaggaagaagggggcctgagagagccccaggtccattct

SEQ ID NO: 158454 - DNA, 347 bp, Homo sapiens
caaagccctggcctgtccccccacatgctgtgttctgggggtgcaccatgcagtcagtgcaggcggcttccctggccaccgtcccctggtcaggaggcacatagcccctgctggtcaccaagtaaccctaagctttctgcatccaaccctctgctgccacccgaaaagcaattgcactccttgtggttcaagaagggcagtccctactcccacacctttgccagccccagggccgcaggctttctgtcctgtgccagggtcccactggctggcctggagcccaagaggacgctcaccacccacctctgttgcccccactcaaccatattgacagccacccagctgca

SEQ ID NO: 158455 - DNA, 359 bp, Homo sapiens
ggcacgagggaactgttcaacagcctcaagccaggggcctgtatgaggatttgcttatgtctgaaggagaaaatgatgaggatgatgctgggagtgatgataatggagacaatattttctctgctatacacctgagtgaaagtggaagggactctgatgcgtgatttggcggaataagacccaaacaatcccgcatgcttaaggagaacactaggatggttatggataatgaagaacgcctgttgttctatgagggagactgtggtgaggcttcccatggtttggaggatagctgccttagttatgggagctatgaggatcctgatcccaagtggaacacccaaaacacaagcttttgt

SEQ ID NO: 158456 - DNA, 534 bp, Homo sapiens; identical to SEQ ID NO: 144862

SEQ ID NO: 158457 - DNA, 464 bp, Homo sapiens
ccccacagactcagagagaacccaccatggtgctgtctcctgccgacaagaccaacgtcaaggccgcctggggtaaggtcggcgcgcacgctggcgagtatggtgcggaggccctggagaggatgttcctgtccttccccaccaccaagaactacttcccgcacttcgacctgagccacggctctgcccaggttaagggccacggcaagaaggtggccgacgcgctgaccaacgccgtggcgcacgtggacgacatgcccaacgcgctgtccgccctgagcgacctgcacgcgcacaagcttcgggtggaccgcggtcaacttcaagctcctaagccactgcctgctggtgaccctggccgcccacctccccgccgagttcacccctgcggtgcacgccctccctggacaagatcctggcttctgtgagcaccgtgctgacctccaaataccggtaagctggag

SEQ ID NO: 158458 - DNA, 526 bp, Homo sapiens
ttagacaagggtcttgctctgtcacccagcctggagtgcaatggaacaatctgggcttgctgtagccttgacctcctgggctcaagcaatcctcctacctcagctccccgagtagctgggactataggtgcgtgccaacacgcttggctaattcatactttaaatttatataatatgttttcttctgtctcttctaatttcagagaccctagacaaacaataataaaatacttgtacagaatgtgagactttaatagcaaaataaatctagacctgatatcataattggttttctaaagcttctcaaaatcctttaagggctaaaagggtaaaggaacctctggaaggatggtctatttttggataaagtgcagtgaaggaggaagtacctgtgttataagttgtcacatctgttagtgctcagcgctgtcctcagattgtaatgactggagtatgtcccctcacccactgaccccgaatctaatcaaatatgtcgccccataggatttactcagcgcctcgtgcc

SEQ ID NO: 158459 - DNA, 346 bp, Homo sapiens
ctctttgcacagccaaatccagtcacttttaaaatcagaatctattgtatgtctaaggacattatcgataaagtgagagcccgccccccagaatgtgagaaaatatgtgcgaaccatgtatataataagggtctaggatccagaatatataaagtccttctattagagtaaaaaaatattgtcagattaaatcaaaaagcaaatgctcaattttatgctggatataagttaaggtgttacagaaagtttagtaataaaagtatagtcaatgaataaaaggttcttctcttcatgcgttaggagtatatcccagtaagtacacacttcatatgttgtgtgattttac

SEQ ID NO: 158460 - DNA, 523 bp, Homo sapiens
  misc_feature (1)...(523): n = a,t,c or g
nggtggcattgccgcctgaggaatccggcacgagtgccgccagaacacatgtgtcgtgaaaactacccctaaaagccaaaatgggaaaggaaaagactcatatcaacattgtcgtcattggacacgtagattcgggcaagtccaccactactggccatctgatctataaatgcggtggcatcgacaaaagaaccattgaaaaatttgagaaggaggctgctgaagctgactgtgctgtcctgattgttgctgctggtgttggtgaatttgaagctggtatctgcaagaatgggcagacccgagagcatgcccttctggcttacacactgggtgtgaaacaactaattgtcggtgttaacaaaatggattccactgagccaccctacagccagaagagatatgaggaaattgttaaggaagtcagcacttacattaagaaaattggctacaaccccgacacagtagcatttgtgccaatctctggttggaatggtgacaacatgctggagccaagtgctaacaa

SEQ ID NO: 158461 - DNA, 706 bp, Homo sapiens
  misc_feature (1)...(706): n = a,t,c or g
ttttttttttngcaagggttttgccgccagaacacaggtgttgtgaaaactacccttaaaagccaaaatgggaaaggaaaagantcatatcaacattgtcgtcattggacacgtagattcgggcaagtccaccactactggccatctgatctataaatgcggtggcatcgacaaaagaaccattgaaaaatttgagaaggaggctgctgagatgggaaagggctccttcaagtatgcctgggtcttggataaactgaaagctgagcgtgaacgtggtatcaccattgatatctccttgtggaaatttgagaccagcaagtactatgtgactatcattgatgccccaggacacagagactttatcaaaaacatgattacagggacatctcaggctgactgtgctgtcctgattgttgctgctggtgttggtgaatttgaagctggtatctccaagaatgggcagacccgagagcatgcccttctggcttacacactgggtgtgaaacaactaattgtcggtgttaacaaaatggattccactggcattgccatccttacgggtgactttccatcccttgaaccaaggcatgttagcacttggctccagcatgttgtcaccattccaaccagaaattggcacaaatgctactgtgtcggggttgtagccaattttcttaatgtaagtgctgacttccttaacaatttc

SEQ ID NO: 158462 - DNA, 1789 bp, Homo sapiens
gcttttttttttttttcgcaacgggtttgccgccagaacacaggtgtcgtgaaaactacccctaaaagccaaaatgggaaaggaaaagacctatatcaacctttgccgtcattggacacgtagattcgggcaagtccaccactactggccatctgatctataaatgcggcggcatcgacaaaagaaccattgaaaaatttgagaaggaggctgctgagatgggaaagggctccttcaagtatgcctgggtcttggataaactgaaagctgagcgtgaacgtggtatcaccattgatatctccttgtggaatatttgagaccagcaagtactatgtgactatcattggtgccccaggacacagagactttatcaaaaacatgattacagggacatctcaggctgactggtgctgtcctgaattgttgctgctgggtgttggtgaatttgaagctggtatctccaagaatgggcagaccccgagagcatgcccttctggcttacacactgggtgtgaaacaactaatatgccggtgctaacaaaatggattccactgagccaccctacagccagaagagatatgaggaaattgttaaggaagtcaagcacttacattaagaaaattggctacaaaccccgccacagtagcattttgtgccaatttctggttggaatggttgacaacatgctggagcccaagtgctaacatgccttggttcaagggatggaaagtctccccgtaaggattggcaatgccagttgggaaccacgctgcttgaggctctggactgcatcctaccaccaactcgtccaactgacaagctcttgcgcctggcttttcaagaatgcctaacaaaatggtgggattgggactgttcctggttggcccgagtggagactggtgttctcaaacccgggtatgggggtcaccttttgctccagtcaacgtttacaacgggaagtaaaaatctgtcgaaatgcaccatgaagcttttgagtgtaagctctttcctgggggacaaatgtggggctttcaatgtcaagaaatgtgtctgtcaaggatgttccgtcgtggcaacgttgctggtgacagcaaaaatgacccaccaatggaagccagctggcttcactgctcaggtgattatcctgaaccattcaggccaaataagcgccggctatgcccctgtattggattgccacacggctcacattgcatgcaagtttgctgagctgaaggaaaagattgatcgccgttctggtaaaaagctggaagatggccctaaattcttgaagtctggtgatgctgccattgttgatatggttcctggcaagcccatgtgtgttgagagcttctcagactatccacctttgggctgctttgctgttcgtgatatgagacagacagttgcggtgggtgtcatcaaagcagtggacaagaaggctgctggagctggcaaggtcaccaagtctgcccagaaagctcagaaggctaaatgaatattatccctaatacctgccacccaactcttaatcagtggtggaagaacggtctcagaactgtttgtttcaattggccatttaagtttagtagtaaaagactggttaatgataacaatgcatcgtaaaacctttcagaaggaaaggagaatgttttgtggaccactttggttttcttttttgcgtgtggcagttttaagttattagtttttaaaatcagtactttttaatggaaacaacttgacccccaaatttgtcacagaattttgggacccattaaaaggttaactggg

SEQ ID NO: 158463 - DNA, 358 bp, Homo sapiens
cacgtttcactgggcattatcgaatgctctctggggagaaaccttatgaatggatagagtggggaaaacgattaagctccaacacagccttgactcagcatcagcgaattcacactggggagaacccctttgaatgtaaggagtgtgggaaggcattcaatcaaaaaataaccctgattcagcaccagcgagttcacactggcgagaaaccttatgagtgctaagcgtgtggcaaaaccttccgctggggtggaagattcattctgcatcagaatctccccactcaaaagacacctgtccaagcgtagggctatccatagttaggcccactgtgcctctccttttttctctttatttt

SEQ ID NO: 158464 - DNA, 440 bp, Homo sapiens; identical to SEQ ID NO: 155438

SEQ ID NO: 158465 - DNA, 1190 bp, Homo sapiens
ggaattaattctgccatggtcctagattgtggatatagggaaagcctggtgttacccatatatgaaggaatcccagttctaaattgttggggagcactaccccctaggaggaaaagctcttcacaaagagttggaaactcaactattggaacaatgtactgttgacacaagtgttgctaaagaacagagccttccctcagtgatgggttcagttccggaacgtcgtcttagaggacattaaagcgcgtacttgctttgtaagtgatctgaagcgaggactaaaaatccaagcagcaaaatttaatattgatgggaataatgagcgtccctccccacccccaaaatgttgactatccattagatggagagaagattttacatatccttggattcaatccagagattcagttgtgggaaattctttttgaacaagataatggaagagccatcagttggccacttttaatattgggattccctttatacagtgtcccgataggacaccagggaaggcaactaggcaggaggaatttgggtaggtcatagggtgggcacttctatgttgccagggatttctccacaggattgcttgcaggaaataaggtatttgggtaggaaaaacccaaaatattaaaaaagcactttggcactaaagacatttccgaattccatactcccaccttggcaaaaagcctaattgtggtggcctgggtttggggagggggctatttttgggggcctttccaggatatacttggggagccgttctggtttccaaagggatattataatccagacggggccgtatacctggattggtggtcctctcaataacccacctttgggaaatgatggttgaatggccgggggaaaacccaaccacctctggatggaagagagcattttcccactggagaaattagaagttttggatttaaaaatccaaccttggctttcatatcaaatattttaacccaatttataagcaaattgtacaaagtatgtaggatgttttgttatagaggactatagtggaagtgaaagcattctgtgtttactctttgcattaatatataattcttttgactttgtttctcttgtgtagtggtaaaatggtagctggtgcttattcccctctctgctgtatttatatcaataaagaaaaataaagcaaaaaaaaaaaaaaaaaa

SEQ ID NO: 158466 - DNA, 333 bp, Homo sapiens
ttttttttttttttttttttttttttttttttttttttgggtttataacaggaatgaaaggtttatttataatttgaatcaatcaatataacttaacacagaataagaccaatctgttcacctcaatacatggaaaaagtatatgtgaccaaaaacaataattatagaatattagaaattgatatgaacttttttttcccccccgagacagagggtgtggggggccaggtcctggaagtcatgccacatgaagagcttaagcctagcatttttttttttttttgagacagagtctcactctgtcacccaggctggagtgcagtggtgcagtca

SEQ ID NO: 158467 - DNA, 378 bp, Homo sapiens
  misc_feature (1)...(378): n = a,t,c or g
atccctgaagaatgtagatgcaaaagttctatactaacaaatgtnnnnnnnnnnnnnnnnnnnnnnnnnnnnnnnnnnnnnnnnnnnnnnnnnnnnnnnnnnnnnnnnnnnnnnnnnnnnnnnnnnnnnnnnnnnnnnnnnnnnnnnnnnnnnnnnnnnnnnnnnnnnnnnnnnnnnnnnnnnnnnnnnnnnnnnnnnnnnnnnnnnnnnnnnnnnnnnnnnnnnnnnnnnnnnnnnnnnnnnnnnnccacagaaagtctgtaccttaatacaataaaggccacctatgaaaagttcactgctaacattacactcaacaatgaaatgctgaaagctttttctctaagattagacacccgataagaacactcactctcg

SEQ ID NO: 158468 - DNA, 759 bp, Homo sapiens
gcacgaggttgtttttcattttcttttttttttcttaaaaaggacttatccaaataatctggataataaatcgtttgcgtttcctaagaaactgggtttttcttttcccttgtggttttggtgtttttcttcttctttgagccttactagcggtctgaagctttctttctttcctttgcctttttgcttttgggacaggagaaagcagtttgtctgaattgtacttgactcttcaaagaggaaaagggcgtggaagcataatggggccttcgggagtaaggatatatcaataacggaggaagaaaacgaagaacggaactaaaacccacggaacccagaagttgccgggctgagggtggcggggtggagggagggcctcctgcctgcccgcccccaaccaactgcctccagaggcttcagccccatcttggttcctgcacagagatctcaggccaagagagagagagcgggggtggagaaggaaactctgggccctctaacaacagagtacatggattttctaaggctggtcatggtctgggggttggggaagaggaggaggagaggcaactctggctgtgaactgggaggaagcagaggccaaacatccccatcaggaggctgccccaggcctccctgcacctgcctcctgccagtccctgccagcccgctgtcccaggggcgctcagcagtccccgtcggtggccacagccaccagcatctcactcttgcccatctcctccaaggcacacgaaatcc

SEQ ID NO: 158469 - DNA, 401 bp, Homo sapiens
attttggtgctcgaccctccacctcagcctccaaaactgctctccgtcaaagggaatccagaagacttcatcttcagacaatttttcttctctccctaccctttattcccatttccacccttttcttatgccaaaccccctgttagcaatgagaccccatttccaccccatccccgcttctcaaaactcctttcccaaggtccagctgacatgccacctcttcctggaagcctcccctgacttcttcactattctgcctgcatgctgcatcatttgctcttctgttctcttgctcactgtgcattccggcttcttagctgtcagggatgtcaatatctgcatggactgatgcacatgttcaggtctgggcatatgcacatatatgcagccggacgcgtggg

SEQ ID NO: 158470 - DNA, 378 bp, Homo sapiens
  misc_feature (1)...(378): n = a,t,c or g
caatatttacattgtttggatattctaatagtgtgtttatacattcatctgctgagaaataagcggattgtttccagtttggggctaatacagaaaataaagnnnnnnnnnnnnnnnnnnnnnnnnnnnnnnnnnnnnnnnnnnnnnnnnnnattttaataaatacagtagttgtatgtttaactttttctaaaattgctaaactgtcttgcagagtggttgtaccatattacttttgcaccactggtgtatgagagttttaagtcctccatagtgtcagcaacacttggcagtttttttttcaattatagctattttattaagtgtttagttacatctcactgtaattttcatttgcattccacaaatcactagtaa

SEQ ID NO: 158471 - DNA, 434 bp, Homo sapiens
tttttttttttttttttttttttttttgagacggctcctcgctctgtcgcccaggctggagtgcagaacaagactgtgtctcaagcgggggggaaaagaaaaagaagggacgagacaatattgaagatgaagcctgcagcagcagaccatccagataattgtttgaggaaaatattcatcttgttcatgccctcattgaagaggaccaactagccaatatcatagacatctctgctggttcagcttacacaatcctggatgaaaaattaacactgagcaaacgttttactagatgggtgccaaaaccattgccctcagatcagctgcagacaagagcagagtttctaatggaaattttaaacgggtgggatcaagatcctgaagcatttcttcaaagaattgtaacaggtgatgaaacatagttttaccagcgc

SEQ ID NO: 158472 - DNA, 340 bp, Homo sapiens
gcatcccaaagcccatggcaaaattacctttcatgaaatacagagacctgcatactaacttactttattcccgaatggagacaggaccaaagcatattcctatgaagacactattgaagatcatggaggatattgccctgggaatggacaatctgagcctcatgaattatctttatctagaattaactgctagaaactgcatggagcgagatgacatgactgactgcgaagcggacttcggcctctctaggaagaggtacagcggcgagaattacctgcattgccgaattgctaacaggcctgtttaagggagcgccatagaaagtcttgcacaccgagt

SEQ ID NO: 158473 - DNA, 378 bp, Homo sapiens
ctctgatcaaaaaacatgttgactttgacttagcgactaacgtccaggaagagaaaattgctgctctggaagactttgccgaccaactcatcactgccggccattatgccaagggagacatttttagccggcgcaatgaggtcttggacaggtggcgacgtgtgaaaacccaaatgattgagaaaagggcataggtatgaaaatctcaaaccctccaacagttcaaccgggatgtggatgaaaacgaggcttggatcagtgaaaaattgcacacagcgagtgatgattcgtacaaggatcccaccaacatccagctttgcaagctgctgagcaagcaccaaaagcaccaggctttttgaacagaactgcctgccaccg

SEQ ID NO: 158474 - DNA, 375 bp, Homo sapiens
  misc_feature (1)...(375): n = a,t,c or g
aggagaaccctttttccttcacgcatattaacggaaaccactataacccccaacatgcatatttgttattccagaaacactcctttnnnnnnnnnnnnncttcataaatctcttactttaaaggccagcaccctgtcttcatcatctaattgatcagccattttgtagtccagtagtagcctccctttacacatcaccaacaacccccttcaccaacaaccccttccaccccagctcccagcatacactggtgcagagggagatccctgtgctttactttcctaatactgtctcatacatcttctcaacacagaggctgtcaacaatatcatcacatttctgggcaagcagccatgtaagaggtacgataaagtc

SEQ ID NO: 158475 - DNA, 310 bp, Homo sapiens
acttttcctgtggaggagacagctgacgctcaccgaaaacccacggtggtggccgacgctgggggatggtcaggccagggactgctccgacgcttgctgcccacacaggcctcagcttccgtccagccacttctcggacctcctgaatgatctcttctggaaggacgaagttcctctctggattcgggaatggaagaatctcagactcatgcagcgcctgcatgtcgtacatggtgctcagatggtcccagatgaccttggatgggacctgccgcccgatgttctggctgaacttgtcccgaatacaaat

SEQ ID NO: 158476 - DNA, 462 bp, Homo sapiens
cacttttcctgtggaggagacagctgacgctcaccgaaaacccacggtggtggccgacgctgggggatggtcaggccagggactgctccgacgcttgctgcccacacaggcctcagcttccgtccagccactgctctcaaacaaagtcctctccaatcccggaggttccaagaccacccaagcacaggtagggcggggtctgcgctggaccctcacacctccctggaggcccggggtcctcaccctcacctccctgcccttggccagggtctggccttttctgaatcgcaagcccaacctttcccgagcctcaccttctcggacctcctgaatgatctcttctggaaggacgaagttcctctctggattcgggaatggaagaatctcagactcatgctgatatcaaatagagagttttgtttaagaaacaagggtgaagatgcagtttcaagaagtcactag

SEQ ID NO: 158477 - DNA, 1330 bp, Homo sapiens
atgaggctcctctcccccagcagattggaaaaagacaatgagaagcagctcagcccgcaccccccagcccataccctaaggagcacccggcagggagagcaccgcccaccctgcccctcagtcatgcagctcacatcgggcagaggtgacgctgtggacctgggtgggccccacgtttcaagtcaaatcaagctgctgaccaggaggggacatcgtgggaacaataattgtccaagtctagtgctgggggcatcatgggcgctgccccagagccacaaccagcccgcctttcagtcagcatgtgtctggggtctcaggtatgagtggcagagggagcagtcccatcagccatgtcagcctcgttgcaatggaattccacttctgtcccagacactcagccagacaggaggaaactgtgaccacaggcatgtggacacgcaaggaggaacacgttttaagaacccccgcgcggggcggagcagggcggagtccccggcgggaagggacccgagacctcggctgcgcctgcgccgacgccggcgcgtgagcccgagcgcgtacccggcggagcgcgcgcccgcccccgagtgcgcctgcgcggagctcgtggccgcgcctgctcccgccgggggctccttgctcggccgggccgcggccatgggagaggccgaggtgggcggcgggggcgccgcaggcgacaagggcccgggggaggcggccaccagcccggcggaggagacagtggtgtggagccccgaggtggaggtgtgcctcttccacgccatgctgggccacaagcccgtcggtgtgaaccgacacttccacatgatttgtattcgggacaagttcagccagaacatcgggcggcaggtcccatccaaggtcatctgggaccatctgagcaccatgtacgacatgcaggcgctgcatgagtctgagattcttccattcccgaatccagagaggaacttcgtccttccaagaagagatcattcaggaggtccgagaaggaaaagtgatgatagaagaggagatgaaagaggagatgaaggaagacgtggacccccacaatggggctgacgatgttttttcatcttcagggagtttggggaaagcatcagaaaaatccagcaaagacaaagagaagaactcctcagacttggggtgcaaagaaggcgcagacaagcggaagcgcagccgggtcaccgacaaagtcctgaccgcaaacagcaacccttccagtcccagtgctgccaagcggcgccgcacgtagaccctcagccctggtggcggcagagaagcgggcgaggcactgtggtcgctgatgggg

SEQ ID NO: 158478 - DNA, 417 bp, Homo sapiens
gggttacatgtggaaaagcctttgctcagaaggcacaactcattgtgcatcaaataattcatactggaaagaaaccatatgactgtggtgcatgcggaaaagactttagggagaaggttcatcttgttcgacatcagagaactcatactggggagaaaccttatgatcgttctgaacgtggaaaagccttctctcacaaatcggaccttattatacatcatagagttcacactggggaaaaaccctatgaatgttgtgaatgcgggatagccttctcccagaaatcacccctcattatacattgcagaatacatactggggaaagaccctatgaatgtataaagtgtgggaaggccttttaccacaagtgacagctgagtattgcccacagagctcatactggagatatagcaggtg

SEQ ID NO: 158479 - DNA, 411 bp, Homo sapiens
agacctgtctctaaaaataagtaaataactaattaaaaagttagccagctgtggtggtgagcacctgtactcctaactactcaagaggctgagatgggagaattgatcaagcctaggagtttgaggctgcggtgaactatgatcacaacactgtactccaacctgggtaatggagtgaggccctgctcaaaaacacaaaaacaaaacaaaaaaacttttataacatgtacctaacaaagatgcagagttaaattttatttgccagtttgtaaaagcctttgatacttcattttaagggcacttagtaattacaatgccattatgtaattaactctatagagaacattactttcaaataatgggtggtcaggccatttaggacagccccagagagcccctacagctatcctt

SEQ ID NO: 158480 - DNA, 372 bp, Homo sapiens
  misc_feature (1)...(372): n = a,t,c or g
gnnnnnnnnnnnnnnnnnnnnnnnnnnnnnnnnnnnnnnnnnnnnnnnnnnnnnnnnnnnnnnnnnnnnnnnnnnnnnnnnnnnnnnnnnnnnnnnnnnnnnnnnnnnnnnnnnnnnnnnnnnnnnnnnnnnnnnnnnnnnnnnnnnnnnnnnnnnnnnnnnnnnnnnnnnnnnnnnnnnnnnnnnnnnnnngatctgtcagccactttccttgtcctctacagctaatcacccagttctgtgcctgtgttttacacacaaaaacctgcacatatttatagcagctttatttataattgccaaaagttggaagcaaccatgatgtacctcagttgatgaatggatttggctgggcctggctcccctctatct

SEQ ID NO: 158481 - DNA, 375 bp, Homo sapiens; identical to SEQ ID NO: 150124

SEQ ID NO: 158482 - DNA, 481 bp, Homo sapiens; identical to SEQ ID NO: 150125

SEQ ID NO: 158483 - DNA, 655 bp, Homo sapiens; identical to SEQ ID NO: 150126

SEQ ID NO: 158484 - DNA, 977 bp, Homo sapiens; identical to SEQ ID NO: 150127

SEQ ID NO: 158485 - DNA, 1766 bp, Homo sapiens; identical to SEQ ID NO: 150128

SEQ ID NO: 158486 - DNA, 730 bp, Homo sapiens; identical to SEQ ID NO: 150129

SEQ ID NO: 158487 - DNA, 351 bp, Homo sapiens; identical to SEQ ID NO: 150131
  misc_feature (1)...(351): n = a,t,c or g

SEQ ID NO: 158488 - DNA, 353 bp, Homo sapiens; identical to SEQ ID NO: 150160
  misc_feature (1)...(353): n = a,t,c or g

SEQ ID NO: 158489 - DNA, 360 bp, Homo sapiens; identical to SEQ ID NO: 150161
  misc_feature (1)...(360): n = a,t,c or g

SEQ ID NO: 158490 - DNA, 491 bp, Homo sapiens; identical to SEQ ID NO: 150162

SEQ ID NO: 158491 - DNA, 579 bp, Homo sapiens
atcgtttgaagccgggctggtggtgcacgctgcagtcccagctacttgggaggctcaggcaggagaatcgcttgaacaagaaagtgggagagtttggacatgtcataggttgtgggtaagagaaaacctaagataatctattcttccttccccgttgtttataccttatgtttgcagtgcctttattatttcttctgttttccctgtcacaattctgatgttacaaaatctagcccaaatctctctcaaagccatcccagactctttcatgccactctgatttctccctcttactctatttttatctgtaactgtatgtaacacatagcttattgtctgagtataggacattcagcaaactttgggttgattgggaaagagctccgatttaaacttctaatttctctaagggaaccgagttgaaggcaggttaatatggctgaaggaatcattcacgacacagaaaccaagatggaagaattcaaggaccaattacctgctgatgagtgcaacaagctggaagaagagatttccaaaatgagggagctcctggctagaaaagacagcgaaacaggagaa

SEQ ID NO: 158492 - DNA, 2542 bp, Homo sapiens
  misc_feature (1)...(2542): n = a,t,c or g
ggtttccagaagcgctgccgccaccgcatcgcgcagctctttgccgtcggagcgcttgtttgctgcctcgtactcctccatttatccgccatgataagtgccagccgagctgcagcagcccgtctcgtgggcgccgcagcctcccggggccctacggccgcccgccaccaggatagctggaatggccttagtcatgaggcttttagacttgtttcaaggcgggattatgcatcagaagcaatcaagggagcagttgttggtattgatttgggtactaccaactcctgcgtggcagttatggaaggtaaacaagcaaaggtgctggagaatgctgaaggtgccagaaccaccccttcagttgtggcctttacagcagatggtgagcgacttgttggaatgccggccaagcgacaggctgtcaccaacccaaacaatacattttatgctaccaagcgtctcattggccggcgatatgatgatcctgaagtacagaaagacattaaaaatgttccctttaaaattgtccgtgcctccaatggtgatgcctgggttgaggctcatgggaaattgtattctccgagtcagattggagcatttgtgttgatgaagatgaaagagactgcagaaaattacttggggcacacagcaaaaaatgctgtgatcacagtcccagcttatttcaatgactcgcagagacaggccactaaagatgctggccagatatctggactgaatgtgcttcgggtgattaatgagcccacagctgctgctcttgcctatggtctagacaaatcagaagacaaagtcattgctgtatatgatttaggtggtggaacttttgatatttctatcctggaaattcagaaaggagtatttgaggtgaaatccacaaatggggataccttcttaggtggggaagactttgaccaggccttgctacggcacattgtgaaggagttcaagagagagacaggggttgatttgactaaagacaacatggcacttcagagggtacgggaagctgctgaaaaggctaaatgtgaactctcctcatctgtgcagactgacatcaatttgccctatcttacaatggattcttctggacccaagcatttgaatatgaagttgacccgtgctcaatttgaagggattgtcactgatctaatcagaaggactatcgctccatgccaaaaagctatgcaagatgcagaagtcagcaagagtgacataggagaagtgattcttgtgggtggcatgactaggatgcccaaggttcagcagactgtacaggatctttttggcagagccccaagtaaagctgtcaatcctgatgaggctgtggccattggagctgccattcagggaggtgtgttggccggcgatgtcacggatgtgctgctccttgatgtcactcccctgtctctgggtattgaaactctaggaggtgtctttaccaaacttattaataggaataccactattccaaccaagaagagccaggtattctctactgccgctgatggtcaaacgcaagtggaaattaaagtgtgtcagggtgaaagagagatggctggagacaacaaactccttggacagtttactttgattggaattccaccagcccctcgtggagttcctcagattgaagttacatttgacattgatgccaatgggatagtacatgtttctgctaaagataaaggcacaggacgtgagcagcagattgtaaatccagtcttctggtggattaagcaaagatgatattgaaaatatggttaaaaatgcagagaaatatgctgaagaagaccggcgaaagaaggaacgagttgaagcagttaatatggctgaaggaatcattcacgacacagaaaccaagatggaagaattcaaggaccaattaccctgcctgatgagtgcaacaagctgaaagaagagatttccaaaatgagggagctcctgggctagaaaagacagcgaaacaggagaaaatattaggacaggcagcatcctctctttcagcaggcatcatttgaagctgttccggaatggccttaccaaaaagatgggctcttgagccgaggagggctctgggaagttctgggcactgggggaacaaaagggaagattcaaaagggagggaaaaaccagttaattaattaggcaggaattttttgaagccaggaaggacaacatatgaagcttaggagtgaagagacttcctgagcagaaatgggcgaaccttcagtccttttacctgtgtttttgcagtattcctatatataatttccttaatttgtaaatttagtgaccattagctagtgatcatttaatggacagtgattctaacagtataaagttcccaatattctatgtccctagcctgtcatttttcagctgcatgtaaaaggaggtaggatgaattgatcattataaagatttaactattttatgctgaagtgaccatattttcaaggggtgaaaccatctcgcgggttcatgaagtggtctccttgncttgaatgggncccctttgggttggtcc

SEQ ID NO: 158493 - DNA, 752 bp, Homo sapiens; identical to SEQ ID NO: 150178

SEQ ID NO: 158494 - DNA, 1713 bp, Homo sapiens; identical to SEQ ID NO: 134834

SEQ ID NO: 158495 - DNA, 3789 bp, Homo sapiens
atgagaccaggcttcgtggtgtcagtgggaatggtggaaggtgtacctggagagcctgatccatacccagtgctctgctacaccccatggcctggccacgacctccctgcctccagagcagccctggcccagggaagaagctggtctctgcatcgaatgatagggcaggattctgggagacggaggagcagacgccagcatttcgcccccggcacctccagcgggctgcggtccgctcccggcctcactcgagcaggtcccgccccgccagaggccgttagtccaagtcacgtgatcgtcgactcagctgacctggcgggaccggaaaaagaaattcccgggccctggcttcctcgcgcgatgtatgaggcaccaggggtgaagcgggcatgggctgctggagcgggaatgagggggcgccagtggctccggaaacgggttgaggttgtctgcactggccgctccgcaaacacagtgtgtgcgggcgtcagggcagcaggtctggtagagaaaagtccaccgccatccctctcccgaatggggcggaggtttcggttctgtggtgatctggactgtcctgaccgggtcctggcagagatcagcacgctggccaagatggttgagtgcacagggtctacactgggtggaggagggtataagaagatcctgaaactcacagctgatgccaagtttgtggaggagcatgagggaaagaaagacattgacagtcccaccttcctgtcctctgccagctcctggtggagcagtagcagtgcctatggctccaggaggcctgggggctttgagctgaagttaatagggcaacagggagagtcaggcgatgtgaaggccacagtggcagtgctgagtttcatcctctccggtgcggccaagcacagtgtcgatggcaaatccttggccagtgaactgcagcagctggggctgcccaaaggagcccaagcccagcccccacctgctacctccagagcttctccattctacccccagagcacgcggccagcccgtgctgctgttatgaggagaagcaaagcccccttgcagaagcacttgcgggtctgcagcctacgcacgtggtccctggcagcacgagtggcagaagggacagcagagactgtggacccctcagctgcacctaagacctctgtgtggtctagccgtgtgtgctgggggaggcttttggccaccatttccccctctgtaaatgagaccgatacctgtggcatggaggacaggaggctgggtgtgcaggccctggcgtgcacagtgccacatgacggcctgggctggcgccaccctgaagaaggtggcacccactctggcgggtctcccttggagcacctggagcccaagaagctgtccctcacctttgcaatcccagggactcgccccctgatcatgatgaaggtggacccaaacccgctgaggggcctgaaggagcaaagtgagccaattctctcccctgacgcccgtaagggctccagtggtgatggagaagtacagaggaacctggtgccggccgcagtcaacccctatgtgatgatctttctacccgccctctttcgtgtcttggtgctggctgctgtctttggccagctaaaagaatatcagcaaaggaagagccctggtattccagcaggagcaaagacaaaaaagaaaaaaactgacagtagccctgagacaaccacttccggtggttgccactcacctggggatagccagtaccaagaactagcagtagccctggagtcaagctcagtgacaatcaatcagctcaatgaaaacatagaatcattgaaacagcagaagaaacaagtggaacatcagctggaagaagcaaagaaaacaaacaatgaaatacacaaagcacaaatggagcagttagagacaatcaacatcctcacattggaaaaggcagacttgaagaccaccctttaccatactaaacgtgctgcccgacacttcgaagaagagtccaaggatctggctggccgcctgcaatactccttacagcgtattcaagaattggagcgggctctctgtgctgtgtctacacagcagcaggaagaggacagggggcactgcctgagctccccagatcaaaacttctcactcttcaccatccagtcctcgagctgcagagaagcggtcctccagcggcggttacagcagaccataaaggagcgggcgctgctgaacgcacacgtgacacaggtgacagagtcactaaaacaagtccagctagagcgagacgaatatgctaaacacataaaaggagagagggcccggtggcaggagaggatgtggaaaatgtcggtggaggctcgaacattgaaggaagagaagaagcgtgacatacatcggatacaggagctggagaggagcttgtccgaactcaaaaaccagatggctgagcccccatccctggcacccccagcagtgacctctgtggtggaacagctacaagatgaggccaaacacctgaggcaggaggtggaaggtctggagggaaagctccagtcccaggtggaaaacaatcaggccttgagtctccttagcaaggaacaaaagcagagactccaggagcaggaggagatgctccgagagcaggaggcgcagagagtgcgggagcaggagagactgtgtgaacaaaacgagaggcttcgggagcagcagaagatgctacaggagcagggtgagaggctgcgaaagcaggagcagaggctacgcaaacaggaggagaggctgcgaaaggaggaggagaggctgcaaaagcaggaaaagaggctgtgggaccaggaggagaggctgtggaagaaggaggagaggctacaaaagcaggaggagaggctcgcgctctcccagaaccacaagctcgacaagcagctggccgagccacagtgcagcttcgaggatctgaacaacgagaaaaagagcgcactgcagttggagcagcaagtaaaggagctgcaggagaagctagacgaggtgaaggagatgcagtacatggccacctatcagcagctgacctctgagaaggaggcgctgcacaggcagttactgctgcagacccagttcgtggaccagctgcagcagcaggaagcttggggcaaagcggagcacctagaagctgccagccaccagaaccaacagctagagacccagctaagcctcgtggctctccctggagaaggagatggaggacaacatctggacagtgaggaggaggaggcgcctcggcccacgccaaacatcccagaggacctggagagccgggaggccacggagccagaggcagaggccccagccccagggactgggggtgagtttgtgtgtggggagagctaccgggccctgaaggaggccatggtgaagctgaaagggagagagtccttcaccgtatatgaaagccagggggcagtgccaaacacgcggcaccaggagatggaggatgtcatcaggctggcccagaaggaggaggagatgaaggtgaagctgctggagctgcaagagttggtgttgccccttgtgggcaaccatgaggggcatggcaaattcctcatcgctgcccagaaccctgctgatgagcccactccaggggccccagccccccaggaacttggggctgccggtgagcaggatgttttttatgaagtgagcctggacaacaacgtggagcctgcaccaggagcggccagggagggttctccccatgacaaccccactgtacagcagatcgtgcagctgtctcctgtcatgcaggacacctag

SEQ ID NO: 158496 - DNA, 969 bp, Homo sapiens
atgctgttcagcggacactcggtggaccagcgggtgttcagagaccttatgagtgagaagctgcctcggttgcatggccactttgaacagtacaaagtcgactacactctcatcactttcaactggtttctggtggtatttgtggatagtgtcgttagtgacatcctctttaaaatatgggactctttcctttatgaaggaccaaaggttattttccgttttgctctggcactttttaagtacaaggaagaggagattttgaaattgcaagattcgatgtctatatttaagtatctccgctacttcactcgcactatccttgatgctaggaagctgatcagtatctcctttggggacctgaaccctttccccctacgccagatccggaaccgacgcgcctaccacttggagaaagtccggctggagctgaccgagctggaggccatccgtgaggacttcctgcgtgagcgggacaccagccctgacaagggtgagctggcccacttcttaccccagatagcctcgggcgctgcctgtagtcatgctgacagctgtacagtagccgccaagactgctgacagctggagacggttctggtttcaactacgaagagtcaacagatacaacaggcccagggaggtgcccctgggggccccagtccccatcactccaaggggcagtcctgcaagtgacaaggtgggcccaatccctgtggaacaggtctctgaggaccacagagtggggccccagggaaagctgggagccgagctagaggcaggcagcaaactctctgaaaagatcccagagaccccaggagacccacgatcacactttgagagaggccattctagaagcagttgggactttacccagaagcccacactccagagacccttccacaagggcttcagctgtcttgatgccattccagcagcagagggtctgttcattagcaaaatggatggctga

SEQ ID NO: 158497 - DNA, 393 bp, Homo sapiens
cgccagagtgggtgccaccttcttcagggtggcgccagccccaggccttcatgtggcactgtgcacgccagggcctgcacaccaccagcctcctgtcctccatgccacaggtatcggtctcatttacagagggggaaatggtggccaaaagcctcccccagcacacacggctagaccacacagaggtcttaggtgcagctgaggggtccacagtctctgctgtcccttctgccactcgtgctgccagggaccacgtgcgtaggctgcagacccgcaagtgcttctgcaagggggctttgcttctcctcataacagcagcacgggctggccgcgtgctctgggggtagaatggagaagctctggaggtagcaggtgggggctgggcttgggctc

SEQ ID NO: 158498 - DNA, 4136 bp, Homo sapiens
  misc_feature (1)...(4136): n = a,t,c or g
aaacagcagaagaaacaagtggaacatcagctggaagaaataacgtgattttctttgcttacaacatgactgctgggtttggggggcactcagatgcagagaacaatgagaaaaagagcgcactgcagttggagcagcaagtaaaggagctgcaggagaagctagacgaggtgaaggagatgagccagtaccaagaactagcagtagccctggagtcaagctccgtgacaatcaatcaactcaatgaaaacatagaatcattgctggcccttgtagagcatagcgtcaaagtggctgcactggacgtggcggaaggaggggcggccagcggagcaggcctgcaggttgcagaggcggaagcgcttccgctcacccacacagtatctgcctttgtatttgggcctgtggggagaaccggggtgggccccagtgagggcccagcagggggccggcgtggggacttcatctatgtggacatatttgagggccacctgcgggccgtggtggagaagggccagggtacggtattgctccacaacagtgtgcctgtggccgatgggcagccccatgaggtcagtgtccacatcaatgctcaccggctagaaatctccgtggaccagtaccctacgcatacttcgaaccgaggagtcctcagctacctggagccacggggcagtctccttctcggggggctggatgcagaggcctcttgtcacctccaggaacaccgcctgggcctgataccaggggccaccaatgtctccctgctgggctgcatggaagacctcagagtcaatggccagaggcaggggctgcgggaagctttgctgacgcgcaacatggcagccggctgcaggctggaggaggaggagtatgaggacgatgcctatggacattatgaagctttctccaccctggctcctgaggcttggctggccatggagctgcctgagccatgcgtgcctgagccagggctgcctcctgtctttgccaatttcacccagctgctgactatcagcccactggtggtggccaaggggggcacagcctggcttgagtggtggcacgtgcagcccacgctggacctgattggagctgagctgcgcaaatcccagtgctcagccccctgtggcagtggcgtccagcggcgcctagtcaagtgtgtcaacacccagacagggctgcccgaggaagacagtgaccagtgtggccatgaggcctggcctgagagctcccggccgtgtggcaccgaggattgtgagcccatcgagtctccccnagctacacatgtgaacgtctgggtcatcaccaatgtggatggagagggtacagagcagggggaatggtggagctgtgacatggaaacagaaggtgtccttgactgcctccgaggcacgtgccatggccccataggtcacccggccagcctgtacatcatcctagggagagccacgaggctcaaccgggtctctagctgttggttccgctggctggcagcttctaggtgctcccaaggggatgggaaacagagtgagaaggcacggaggttgccaggtcatccccctcggggccccatcctcagcaactccctcccctgggtctcctgcaacttttggcgggccatctcagccaccgctttgccccaagcttcctgctgctgcagctggtccacgagctgggtctgcagcagtaactgcctgtgcagcgcctccttctcagaggacgaaggaaccctagagtttacactcaccacacagagccggcaggcacccttggccttccaggcagggggccggcgtggggacttcatctatgtggacatatttgagggccacctgcgggccgtggtggagaagggccagggtacggtattgctccacaacagtgtgcctgtggccgatgggcagccccatgaggtcagtgtccacatcaatgctcaccggctagaaatctccgtggaccagtaccctacgcatacttcgaaccgaggagtcctcagctacctggagccacggggcagtctccttctcggggggctggatgcagaggcctcttgtcacctccaggaacaccgcctgggcctgataccaggggccaccaatgtctccctgctgggctgcatggaagacctcagagtcaatggccagaggcaggggctgcgggaagctttgctgacgcgcaacatggcagccggctgcaggctggaggaggaggagtatgaggacgatgcctatggacattatgaagctttctccaccctggctcctgaggcttggctggccatggagctgcctgagccatgcgtgcctgagccagggctgcctcctgtctttgccaatttcacccagctgctgactatcagcccactggtgtgctctaccacctgcggcctgggtgtggtctggaggccggtgcgctgtagctctggccgggatgaggactgtacccccgctggccggccccagcctgcccgccactgccacctgcagccctgtgccacctggcactcaggcaactggagtaagctaaaagaatatcagcaaaggaagagccctggtgttccagcaggagcaaagacaaaaaagaaaaaaactggcagtagccctgagacaaccacttctggtggttgccactcacctggggatctaaaagaatatcagcaaaggaagagccctggtgttccagcaggagcaaagacaaaaaagaaaaaaactggcagtagccctgagacaaccacttctggtggttgccactcacctggggatagataccccgtggcagtgctgagtttcatgctctccggaactgccaagcacagtgtcgatggcgaatccttggccagtgaactgcagcagctggggctgcccaaagagcacgcggccagcctgtgccgctgttatgaggagaagcaaagccccttgcagaagcacttgcgggtctgcagcctacgcacgtggtccctggcagcacgagtggcagaagggacagcagagactgtggacccctcagctgcacctaagacctctgtgtggtctagccaaccacctggtcggtcggctctgaccgacatagacctgcagctgcagttctccacgtcccagcccgaagccctccttctcctggcagcaggcccagctgaccacctcctgctgcagctctactctggacgcctgcagactcggaaggtagggagggagcgtggccagggcggctgcctgcaggtgcgtgtcctgctgctccccaactcaacatgctcacctcatttcacaccaacaagccccatcctcagaggaggagcccaaggctctgagaggaagaagctgatcagtatctcctttggggacctgaaccctttccccctacgccagatccggaaccgacgcgcctaccacttggagaaagtccggctggagctgaccgagctggaggccatccgtgaggacttcctgcgtgagcgggacaccagccctgacaagggtgagctgtccatggcagaagtccttgctaaaaaagaagagctagcagatcgtctagaaaaggccaatgaagaagccattgctagtgctattgctgaagaagaacagttaactagagaaattgaagctgaagaaaacaatgatattaacattgaaactgacaacgacagtgatttttctttcacagtgagtacattggatgatgtgaagaattctggcagtattcgagacaattatgttcgaacttctgaaatatctgctgtccacattgatacagagtgtgtttcagttatgctgcaagctggtacacctcctttacaagtaaatgaagaaaaatttccagcagagaaagcaaggatagaaaatgaaatggacccttcagatatttcaaatgtgagtgctgctaacttgttcacagtgagtacattggatgatgtgaagaattctggcagtattcgagacaattatgttcgaacttctgaaatatctgctgtccacattgatacagagtgtgtttcagttatgctgcaagctggtacacctcctttacaagtaaatgaagaaaaatttccagcagagaaagcaaggatagaaaatgaaatggacccttcagatatttcaaatgtgagtgctgctaacttggatatgctggctttgtaa

SEQ ID NO: 158499 - DNA, 582 bp, Homo sapiens; identical to SEQ ID NO: 150338

SEQ ID NO: 158500 - DNA, 449 bp, Homo sapiens; identical to SEQ ID NO: 150339

SEQ ID NO: 158501 - DNA, 1966 bp, Homo sapiens; identical to SEQ ID NO: 150340

SEQ ID NO: 158502 - DNA, 587 bp, Homo sapiens
ggcacgagggagatcatgtcctagtggaacgtgcggccagatcattctgggtattataggccatggtcaagagtttgtattttatttcacataaaatatattttggggaggtattggagagttttcaggcaaagagaatgacctatctttggggggttgaaatcaacaaagccctaccgaataaatgtaaaactgcccacaagtcaagttccctgcccctgacagacccaagctctcttcccttgatggtgggcaaatttggggttgctcccctattttaaaaccattgcccacccgtagtccccactgtaggaatttccttaggtgggccatattattttactacgtggaactctgggctttccttggttttatacctcatgggctgagttgttaagattcctactcttttccggcattggggttgggggtgttagggaacagggtctcactctgtcacctaggctgaagagcagaggtgtgatcacagctcactgtaaccttgaactgctgggctcaagcagtcctcccgcctcagccttccaaggagctaggattacaggtgtgcaccatgacccagctaatta

SEQ ID NO: 158503 - DNA, 343 bp, Homo sapiens
acaagagcaactacgaagacctaaatacataatttaccaaagagcaacctgacaatctttccaaacaagcgatagagcattaccagtaagatagctgaaacaaataaatactagacgaattagaatcactttcaacatgactttccaaccacctcagaccaacaacactgtatctctaaccaaccctctccccttcttcaccctcatccctcccagtaccagtgccaagctgcatacccccatcccccacactgcaacgcccacgggaccggtgccaagctgtccccttctccccgtcccccacaactcccacctcagggtcctcttactagaatctcgtgcc

SEQ ID NO: 158504 - DNA, 637 bp, Homo sapiens; identical to SEQ ID NO: 144817
  misc_feature (1)...(637): n = a,t,c or g

SEQ ID NO: 158505 - DNA, 700 bp, Homo sapiens
aattttgccctcgaggccaagaattcggcgagggcaataagctcctagtcccagacgcccatggggtcatttcacagaggaggaccaaggctactatcgacaagcctgtggggcaaaggtgaatgtggaaagatgctggaggagaaacccctgggaaggctccctggttgtctaccccatggaccccagaggttctttgaccagctttggcaacctgtcctctgcctctgccatccatgggcaacccccaaagtcaaggcacatggccaagaaggtgctgacgatccttgggagatgccaacaaagcaccctggatgatctcaagggcacctttgcccagctgacgtgaactgcactgtgacaaagctgcatgtggatcctgagaacttcaagctcctggggaaatgtgctggtgaccgttttgggcaatccattttcggcaaagatttcacccctgaaggttgcagggcttcctgggcagaagatgggtgacttgcagtggccagtgccctgttcctccaggataccactgaagcctcttggcccatgaattcagaagctttcaaggataaggcttttattcttgcaagcaattacaaataataaatctatttctgctaagagatcacacatgattttcttcagctcttttttttacatctttttaaatatatgagccacaaagggtttatattgagaa

SEQ ID NO: 158506 - DNA, 349 bp, Homo sapiens
  misc_feature (1)...(349): n = a,t,c or g
ggcacgagggaggaagattcagactcatatgccaaaagaccactcggacatccctgacatcaatcgggctcatatcattaacgacgccttcaacctgaccagtgcccatactgtccctgacactctggcactgatcaacaccctcttcctgattgaccagagacagtacatgccctgtgaggccgtcctgagcagcctgagctacttcaagctcatgtttgaccgctcccatgtctatagccccatgaataactacctgaataccctggtcacacccctcttcattcacttcacaaataataccatcaactggatggagatcccagagcacctgatggaccattacaan

SEQ ID NO: 158507 - DNA, 397 bp, Homo sapiens
  misc_feature (1)...(397): n = a,t,c or g
ccaaacttgctcttccngggttcaagtgattctcntgcctcagcctccnaaatagctgatatttttagtagagacagggtttctccatgatggtcaggctggtttcgaactcctgacctcaggtgatctgcccaccttggcctcccaaagtgctgggattacaggtgtgagccaccacgcccggcctatttttttgtatttttttagtagagatgggatttcaccatgttagccaggattgtctcgatctcctgacctcgtgatccacctgccttggtctcccaaagtgctgggattacagcacgagccactgtgccctgacttttgtttttgtttttgttnttgttttttttgagacagagtgttgctcttgttgcccaggctagagtgcaatggc

SEQ ID NO: 158508 - DNA, 1624 bp, Homo sapiens; identical to SEQ ID NO: 149718

SEQ ID NO: 158509 - DNA, 314 bp, Homo sapiens
catgccatccctctagtgcccaaggctcagggtcccctcccacccacagctccggattcagatggccagcattggagtgtgcgaacccaggggctctctggctctcattagcagggggctccccgaatgtgttcctgagaacacctgttctgtaagaagctccttggggaagagaagggttccctgtcaaaagagtttgggaagtgctgggttaaaccacgttagaaatggaattctaggccgggcgtggtggctcacacctgtaatcccagcactttgggaggccgaggagggcagatcacgaggtcgggagt

SEQ ID NO: 158510 - DNA, 559 bp, Homo sapiens
caaaactcttttgttttttttttttttcagatttgaaccacacaatttattaacaagcatgatttgtggcctcgtttataaccagcccccaccccagcacttggtgcacattctccttaagcgcagaatttggcctcaaggtaatattttaggaataaataaaaagaggccgggcacggtggctcacacctgtaatcccagcactttgggaggccgaggtgggcggatcacgaggtcaggagttcgtgactagcctggccaacatagtgaatcaccgtctctaccaacaatacaaaaaaattacccgggcgtgatggcgggcgcctgtaatcccagctactcgggaggctgaggcaggagaatcgcttgaacccaggaggcagacagttgcagtgaaccgagatcgtgtcattgcactccagcctgggcaacaagagcaaaactctgtgtcaaaaaaaaaagaaagaaagaaagaaagagataaaatttccccttaggtctggaccttttgatacaagccgatgctcagcgggtgttgttgactgacaggtggatgaat

SEQ ID NO: 158511 - DNA, 477 bp, Homo sapiens
tttagtagagatggggtttcactgtgttagccaggatggtctcgatctcctgacctcgtgatccgccctcctcggcctcccaaagtgctgggattacaggtgtgagccaccgcgcctggccaaccctgctcttgaaatgtctaaatcttttcctcactagcatatacaattcaaatgcacaggcctccatgacttctttggaatttaaaagaagccttcatttcaaggatacgaaatatgtaaaattttaccaaccatggataagtttgttatgggagtagtggaaggacagtggaaaaaaaaataggttttttcatgatacttttatttttccttttttaaaaataaatttaggggggtacaagtacagttttagatacatgaatatattgtgtagtcgtaaagtctgggcttctagtgtaaccatcacgcaaatatacttggatttttctaattacagttctaccaaacatttgc

SEQ ID NO: 158512 - DNA, 15030 bp, Homo sapiens
gttataagcctaaggcagcttgacttgcagcaacaagtttttgaccctgaacacaaagacatgacagatgttaggaaaatattagcattactattaggatacaaaattaacatttatgaagctattgatgattgcaaagtgatttcacgtgcatcatagcctttaattacaatttactactataatctctggatggaagctcacggacatagttgtccccaaatgaataaaaaaaagttactgtcaggccataaagggaaattttaagtgatttagacatttgaatgtaaattctcccactagcctataaaatcaactaaatcacaaaccaccacatttcaagtaaatgtttaaataaattaatattttgatttcatgatcaaaatatttcaggccttacaaatattcctattaatattcataagcatcacaaatttggaaacagaacatgcattataaacattcaacagtatggcacaatagagcaggagataaaaacaaagtgctgttttagtcattttgtaagacaattgtgtgtaaaataagatcccgggcccacatgtacaaagcctcctttgatatataaatccgtaagccctagcctaaccaaacatgcaaaaatgaatactggacatattaaaatgaagagaactgtagtacctcctcggcaaagcaggtctccttatcgtcagccttgcagcacttctctacaaaagctgcgaaatcatccataacaactttcagttgctcttttgttgccttgggcttgtgtttcacgagctcaacaagtgcactgagtttgaatggaaaaagaaaaaaaaaaaacagaaaaaacattactcacgtatagaaaaatggagagagtaaggatggtagtcccatcatttaagattataaatcttggagccaggcaactctgagtacttgggccaggcataccgctataagtctcaatattctcatctgcatgatgaggataataaaatccactttcatggagttggtgggaagaccaactgaaacaatcagtataaaccactcatcacgttatgtagtgtcaacaaatttcttttcagtaaatctctgaaaagaagtatgtcattgcaattatatattattcagattttggaagtgccatattatgtcatattgagttttattgctattaaagagctaaaaatgatccttaaaaatttaattatcttggactttatttaaaatgggtctcatctataaagatgagaaactttatatttggttcttaaactttgctcccttcaaagctaatagtggggaggctatagaaaataaggctatgcaaactcatgggagctgctgggtcgcgttcactgacatctgcaaagacaacaatgccagggagagattggtgtgggcatgacaggttttgcaatattactcttaagcctagacgaggagtacagcccacaagagatgacagcaactttctatagctaaattttatgcaattataacccctgtgatagcaatagggagttgagcttcagggcttgcatttctacatgttttttatccaagtctcattctcaaaagtcacatcttgggggtttgtctcatgtgtggggccaccatagggcaaacttaaaataattatttacatctagaaataaattctcctatggttcccattaactaatttgccatgtgcacaaatttatcagttaattggtcatctttttctactgaatatggtctaacatgttattctattgtggctttaatccacaatattactctgaataattttagcaatattataacagaggattttatctttaaaaagttattcattttattctgggtactcttatcagcataataagggcaacactccaatactttcctctaagaaatataatcactacttcaggaaaaagttgctagcttgaattgacagttcttgctatcaagactacaaacacatgcagtaatgaaatactcctcacgtttgtttcttgatttgtctctccttctcagaaagtgtgcatatatctgcatggaaggtgaatgtttcagcattaaactctttgggaacgtatgtttcatcgacttccagagctgaaaagcatggtcgcctgttcaccaaggattctgtgcagcatttggtgactctgtcacttactggcgttttctcatgcaacacacataactggttcaggaccacggatagctaaagaacaggcaggagagcagaaattcaaaagaggtgaagctgaaaattttctactaaaaatacaaaaaattagccaggcatggtggcatgcacctgtagtcccagctacttgggaggctgaggcaggagaatggcttgaacttgggaggcggaggttgcagtgagccgagatggcaccactgcactccagcctggacaacaaagcgagactccgtctcaaaaaaaaaaaaaaaattatcatcctcggggccttgactgccaatatcacacatacacacacgtgcatgcacacacacatgcacaaaacatgcacacacacacattacttccttctgcttatgaaaggtagcattagcaatatctaaagggaaaattttttcattattaatttattatatgtttttaaagactcacatagtcttctgcacagggcattctttttgcttcaggatgtttacaacatttgctgctgacttttcctaggtttcttgagacctctacaagagttggagttgacacttggggtactttcttggtgtaacgaactaatagcctgaaaaaaagaagtcatgtgttttcagcaaggcaagaaactgtctaacatagtagataaaacagagaacacttggccggaatcaactaagatgttgctatgttccattcatcatattatctccatctgcagagtagtgggttagtggagggtagaaaacattctcctgaacaactagttaaacttggctttgagttccacctgtaccacgggcataatcttgggaaagtgagttgcctaattcagggacagtaataaattgattaatttcttctttcaataaaacctggagagagcttcatatgtatcagcatatgctaaacttgaaagatacaagtagaaaatggaaggaaatatatctgactcaatagggatagttcaagggttaaattaaaaatagtaaagtattataattaatgtgacatagtacctaatatataataatcatgtattaagaatgccagtcaccattaaaagtcaatgtaggactttaatctactcgaggaaagaaactatgtcttgttcactgttattatctctaaaatccataatcagaagagcaccatgtgtatgagccacacaagaaatatctactgtataatatgtctcttcttgtttttaaccttcgtagataagactctattgaattgggacattagtccagcaagccattctgtctctgtctcttctatggagggaaaggtttaaccatcaaagactaggtgcatctcccaaacaacctgaatttaatattcaaatatgtatctaaattcatttgttacatttttgtgttcagcttacatattactttttgagcgacatctattcaaggcctactacttgctgctctacaaaatattgccatgctctatttgcccattaactatttcttaaccgtcaagggacatgctcagttctgatataccaagatttggtatttaccctcccagcctacatacttccaatcttaagagaacaatttttagactacatwcaaatatagacctctccaccccatcaactattttatctctcctctcctatctttcttgacaaagagtgattagaaatatgcaatgtattttcattctgaaaagttctatgctaggtggctctatattaagtcttaaataattacaaattgataaaaaaaatcagtcaataaaaattacttacgcattctggaatttgtactctccaagctgctcaaaaagctcacaattttgtttgattaaatttctgaggctcttccacaagaggtttaaattcatcgaactgaaacataaaagaattgtgttaatagtattatgcctcaggatcagatgcaggttgtttttcaccgctctggtcagaatgatatcctttcttcttcctactcaaagccacatgaatagatgaatatcaatgccgctctgtcacaatacattcgaactatttatttggtcagcttgcatcatgtaagtggttaagaatattcaggctctggagttcaatgaccagtatttgagccaagtcatgtaagtcatgcttcagttgtgcaatttgacttaccatctccacatttcggaatccttatccctaaaataggggcaaagatggcactcatctcatagagctgctctgtaaaccaggtaagctaaggaaattaaacagtgccttgcatagaagaaaagtttaataaatgatggctatgattgtacatagtattattattagttcacctttccagttagattccaggctctccaaaatgagagattttacgttggtcattgtttgtgcatggtgcctggcatacagtagcttcttgaaagcaggaaaaatgagttttctctgattctgaatagttcagaaaccattacatatgctagtgggaaccctaaaaatcctccagaacagatttcctctcctaacttaatttcttgtaaaactattcctaaacatcctcaaaaagatttgaaaatattctaaagggataggttctataatttaccataagatactaattctagtacgtgatgaatcctggaatcaggttaactcactttacatctaagttaaatatcttctaattaacatttaaatttaatttttttttgttctcaggattgtgaaaaagagaaaaaaagatcaaaagtgtgtagagattgctctattcagatctttctattctaactagtctaaattttgttaatcattctaaggctactttttctttcatgtttaagattccagaattgaaacgatctcaagaaaagatctaaattgcactgtatatcattttacattcttgcattatttttctttctcattattggaatcatcagtcaaagaactacattttttgcgaacaataaacctaccactttggcatagcattcatgaggatctgcaccggcacagcacttctctagagtggtttcatatgtcttggcaagtctcagcagcagcacgacagagtaatcaggatgccttcttggatattcatacaaaaagcgaattaagatgaaaataaaatagactttgttggacaaatgagcacaaaaaatatcacaaagctaatctcaaaagtaacgcatattccaaaagtcttaatttgactaaaccccatgcagtaaagcttagtagctaaggacttggggtccagagttaaagttaccaaggctcaattcctagctctgctacttatatcactgcatcaccttaggcaacttatttaaatgatcagagccttagtctccttctcggtagaatggaaataataatagtatctgtcggctgggcacagtggctcatgcctgtaatcccagcactttaggaggctgaggcaggcatatcaccagaggtcaggagtttgagaccagtctgaccaacatggtgaaaccccatctctagtaaaaatacaaaattagccaggcatggtggtgcatgcctgtaatcccaggaggctgaggcaggagaatcgcttgaacctgggaggcgaaggttatagtgagccgagatggcaccattgcactccagcctgggcaacaagagtaaaactctgtctcaaaaaataaatagtatctgtctcggaaggtggattatgagaactatatgacataatctacacaaaacacacactgcttggcacatatgaagtctttgatgaatgatacttgttatttttattaacaggttgtttgatttaaactacatctcaaaaggattctgataaatagatgggcagagatatgttcttaaaatattctctttcttctctgtatgagtgaaatcttgtagggtacataattttaggaaatattatttagtgcattatcataatccaacaacaaaaatgcagtttatcaccacaacttctgacaatacgtaaacatttattttgtaattgagttgcctaccatattgccaggatactgaacttctggtcttttcaccaaatataaagcacctgtgtcagactctatatttctttttatacttctttgctatcattgcatagagtagatagatagactagattagattagattagttagatagacaggcaatacatagtcacacacatatattatagatgttcaagaaatacacttggaatgaatgactgaagtatacataatttatatatacacaaaatgtttctagacgtattttcagaaatacccctaaggagtaaggaatgttgagctttgccgtgaacatgtattatgttatgacaatgtattcaacgaattaacgatgtcaaaaattgggaaagcgtgggaaagggaaggaggaagaaacattgtgggcagcagggaaattgtaggaactccacagaaaagcctaggctatcctcctaagttgtgaggtcatgccaaagctataaaagaataatttcttatctacgtacatgcccaggaagacatcgtttgcctgagcatagtttttgcaaacatccttactttcaacaaaatcagcagctaatgaaggcaagtcagcaggcatctcatcattttccacttcggcaatgcagtgggatttttccaacagaggtttttcacagcattccttcagtttactggagagcgaatcttgattttcacagatatacggggcaaggggcgcctataagtaagttggtggaaattgttcaacacgaagggacattgctacactttctcctcagacctttattaagttggcagaacatgttcattgtattctaagaccatacacatattccttctatgaacatactctgtttgctcctaaacctggagatggagataggactacaaaaacattcccacggaagtaaaatagactaatcagtagcaggtgctcagctcagttatttattaattttatatttctactgttagggcatttaagtttttttcattaaaactcaatgctggttttccaaataatcccccaaaattaagtgcaggccttttgaaaccaaataactaaataaaatatagaagatttttgaaaaatgaatcaagatcatagtcataggccctgcttacatatataaaataaccgccttaaattttccagaaagtgccatgagagattaggattctagtatttgcccataagtttaatcttgaagaaagggagaaagaaaatattataagttttgagaaaagagatatcattccaaatatttgcacatctaacaaacagagtgaatttagggaaggaatatagagaagaaaaatacatcatttccaaaaatctcttcaagtagtgaccttctccaagtccacctacctccctcaaaaaatcttcttaggctgggcaaggtggctcatgcctgtaatcccagcactttgggaggccaaggcgggtggatcacctgaggtcaggagatcgagaccatcctggctgacacggtgaaaccccgtctctactaaaaaatacaaaaacaagattagccgggcgtggtggcgcatgcctgtaatcccagctacttgggaggctgaggcatgaaaatcacttgaacccaggaggcagaggttgcgctgagccaagatcacaccattgcaccccagcctgggaaacaagagcgaaactctgtcttaaaaaaagaaaaaaaaatcttcttagacatctaccttgcaagatgttctgccaagtaaaaccttgtaactgttctacttcagtttaagccttcatttacagttagagcatgactgaaaggagttacaaatcagtgaatgggtttatctggtaatttatagcaggttaaaaacagaaaggtaccaccaccataggcagggaaagattgaagataggacagacgaaagcacagaagacaatccaacccactgtcagctatcaccaatgataccaaacgcatccattctaccaacttgagcatgcaagctaccaaaaagcatatcgacgactctttaccctgtcatcagcacattcaagcagatctccatggcagcattccgtgtggactttggtaagatctgtcactaacttggaaacttctgcaaactcagctttgggaaatctctggctcaggcgagctactgccctaaaaagaaaatcgccaatcaaaatggtattatcatgcgagattttatatgaaaacactaggcaaatactatttctcataagaaaattcaaaatggacatacagaaataatttttaaaattcattagttcgagttgtgaaccaaatggtaatcacttatcctgagggcagaattatccatttaagagtgtgtgtggtaggtagaaatctagcaagtcataaaagcagaaattaaaaaggaactctaaaaggggcaacaggctgagaagcatcaggtttggagtccagatgtgacttccagctcgggctttatcacttgttagcagtaggacttgttagcagagggctcagcgtctctgagcttcagcctctgcagtgtcatgacaacatgctaaattgaagaagttttgaggattaaattagataatacatacaaaagcattttataatctgggaagtactacacaaactccagttatcttttttcgcaagggaaacacattttttctgacttctaaaggtctcttagaaaagaaatcataacttctacagaatgagggagtttttattgatcttacttataaaaagaaagatccagcactatctgcaaagtctatgacaagatgtaaacgtctaattttcggcattctctagtcatttcacagttgcctaaatcaggtaaaggtgactgctttcccaaaaccaatcatagcctgtttatctgtgtagaattgtatggtggggcggtttttttttcataaattgggttgattttggtggtgtagatggtaggaatgatgagcaaatacagttcaattgacagtttctagagagcatacataatgtctattattttcattttatttcctgttgtgttgatttgctgttgactagcaggtgaggagtgtgggtgacggggcagctagtatttttcttgactcggctattaaagtatgctcccagaaccaactaagtaatatgaaaacagaggctcaggcaaaaacatgagatgaagatcagagctggagctatgcaaaaataagaagtaacttcaacttagttggtgactgaatttaactataagacagaaaaggacaagcaaatagttttagatcattggggggaagataaaattaaataaagggattatatatgttgtatacttagatcaaaatatctcatataccccgtaaatatgtatacctactctatatccacaaaaattaaaaataactttaaaaaattaaataaagaaccatgcctacagctctataaaaataatgaaccattagaataagagtccaagattttataaataaatagaacttaaatatgtgtccctttttttaggacaaaaaggacagcgtcctctaaattattcaactatttagaaaagaaaagattaaaaataatgtcaaattgtcattgatattctgattttgacctctattagagtgctacctgttagacaaccaaagaaatgtatttgacagcactttgcaaaatacagaaaaatgtacaatttgtcactgaagcattatcatttacatcgttataaagatgccaactatgtttaaaagtatttaccatgctttgaaagctctttctccaaatttttggagactggcacacttgagtctctgtttggcagacgaagccttcccttcatcccgaagttcatcgagctacaaaaaggaataatttgatgaaaattagaagaaaaattctacatgaaacacccctccataagctcagatgagactgtgccaaattaaattttgaaggcataatttatgcctaaattcccaagtactccctttagcgaataatgattttgctctctaagaaaaggaaagatcattcgatcattctggtcacagcggaattccctatgtagttagaaaccaactggaaacattgccaggaaaaagagccttaaaagtgggagaaaagtcagagaaagagtacgctaatatcccaggggctgcaattttgctaatttttaaattttgtgtataattcatttcagtctctcctccaccaacatcagtaaactcctcagaaaagaaaataaagcattccataatatatatttatggaatgaatgcatgaactcaggcatctagatgcagtaaaattctctactttgaattccctccctactaaaaattatcatgaaaagataaacaagaactgtgtccccttgctgtgcaatttgacaaacaagtttcagtatttcactatagtgatcaccagcagaaaaagtggtgaaatctttaaacacatgcacagtgattacctctgacagatcagcattggcaaatcttaaaagaagaaacgagagtgtaggccttcaaagatgaaagattttcaagacagataaaaggaaggcttttttgaccatgtgggaaagtttgtatcagacactcagggtccctaaatctagccacaaaatggacaaaatcaggttggataataaactctttttttctattcgtgtgcataatacctttggcaacaggcaggcagctttatcagcagcttggcaacattctgtaaaagcagctttataccttttagcaaagaaaaggagttccggggcataaaagtaaggatgtcttctggcaatttcatataagtatctaaattttaaaaaagaaaaacagtcacttttctatagcagacaatattacagaaataattgtaatcgacattctccccagaacctccaaattccaaagatatctaattaaccaattaagctcaatttgcacatgatggtcttgtctctgtcattctttaagtatgtggaaaaaagggttaagtgtgtgtgtgtgtgtgtgtgtgtgcataaatggttaaattttggcaatataatgttgctgactaaaacgaaatcaattataacaaccatatatacatatctgcggaatacattaaagaatttgtctatcttaaatttttgagaaagattgtatcctgtttcaataaacttcaaaatatctttgatcatattttttgctgtgtagaattttgtggtatcaaatactacttctttaaaaaatcatcataacaaaacttccaagtcttaatgttgaaaatatttttgttatggtaatttttatagagtgttggcctatggagttactccatgctttttaattttgaactataaacatctgattacttactttttcaaaaatgtctctccattgtcatgaaaagcagtgcacatcacatcaacctctggtctcaccaatcgggggaggtttgggttgtcatctttgtgttgcaagaagcattcatttctctcaggttcttgttttgcacagcagtcagccatttcaccataggtttcacgaagagttgcaactgtgcataatttgtctccaaaaagggtatgctaaatggaagaaagctaggtttcagttgctggacagtaccttttttctttatagccaaagaacagtacaaaggatttaatatactggttaagcttggtcaggaaatcatttaaaaatccgcttcccctcccaatcgttggtttacagtttctgatgatttaaccatctctatataattttcataagaattaactgtcacactataactcatggtgaataaaacaggacaaaaagacagtcaatagctttaaggaaagttatatgactcctattttgaaacttaaaactaaagggtaagagcaatcattataacagaaatcaagagaaaataagcttctaagcagcaggtgaattcacctaggggagaaaaacattcagagagtttctcatttcatttgccccctttttagagggccatgttttaatatatgccattgaaaactgaggagtaacacaatccatcatagattaagtgactattaagatatagagatttttcttccagaaatgttacctaaaatcactttccaataaatgagtcctttccttatctctaatttttattatgaaagtaatcgtaaccccagggaaaatatactactctagacbgaatttattaatttttatgtatttttaagatttcatatgtagagccatagtattgtgtaaagttaaagtcctgactctgctgtgagggagaggtacataataaaaaggggaaaggctccagtgataaaaactggccttgcccacaagaggtatatatagattgagtggtgagagaaagataaacctgtccttgttttgaagattgatctggaaatactaaaagtttaaagttcttcaacatgactaagtactctgcttttttattgtatgtagaaatacaaagatatctaaaatgaggaatatatagctgtactattattccacccaggtaacaaaattagcatagaaatcagtgggtgttttctgatgataaaaaccatgatatcatctctaagagatagtagctctcctgtgttcattgcaacactattcatgatagtcaagatgtagaaaaccaacctaaatgtctatcaatcaacaaattaatggataaagaaaatgtggtacacacatgcactggaatattattcagccttgaaaagaaggaaattctgcaataggcaacaacatggttggactttgaatgcactatgctaagggaaataagtcagtcataaaaagataaacagtacataataccacttatataaggtagctaaagtagtcaaactcatagaatcaaagagtataatgctggttgccagtggctgggggaggacgaaacgaggggttactaatcaatgggcacaaagttttaatacagcaagatgagtaagctatacaacagtgtacccgtagttaacaataatggattgtacacttaaaaatataacagggtagatctcatgttaagggttcttactataataaaataagataaataaataaataaatacatgctatcatatccctattagcctctacaaaaagaaaccaaacctcaaattttaaaaagaggtgtttataaatgacaaattgccatttaaatacaccatgactgttgtgtttggtctcaataaagaaatgattttaaaactgtggacatagctaaagcatctctatcacaaaagaaacaatggcttatcagtctatgagcaactttttagtgtttcttacaaatcaggacacttaataataattgagaaaacttaaaaaaaattcctttgaaatgcttgggattacttcaaacagaagaaagaatctccacaattagaatgtacttacaagtgatttgtcacaattttcagctgactcatcagcaacacatgtttttgcaaattcagttacttcattcactaatttttacatgatcttcaaatggacactgctgaagatactgagcaaaggcaatcaacaccctgaaacaaaggatgtagaaaaatgtagtataataaaactttaatatgtaacaggttgctacgctagagaacaaatcatgtatgggtataggttctatcttttatacatcttcttcaccattatccagaaagcctattcatatcaggtatgatctgaggcctagataggcatatgtggcttcctacgcaaagagaatggtagttccctaatgtttatatgtatgcgtgtgtcagtagatctatgcacacacatagattaagcaagcaaattgtatgccaaatagatctaattgtcaagactaggcatttttaaagtccttagaattacttaaaactaaaacaaaccccacagatttcctttttcttttttgagacggagtctcactctgttgcccaggctggagtgcagtggcgtgattttggctcactgcaacttctacctcccaggttcaagcgattctcttgcctcagcctcctgagtagctgagattacaggcatgtgccaccatgcccggataatttttgtatttttagtagagacggggtttcaccgtgttggtcaggctggtcttgtactcctgggctcaagcaatcctcctgcatcagccttccaaagtgctgggattacaggtgtgaaccaccgcacctgatccccacacacgtctttaattagcctgtaggattaggtagacttttaaaaaaacaattttctcattttttactagattaaaaaacatttaaataggccgggtgtggtggctcacacctataatcccagcactttgggaggctgaggcaggcggatcacttgaagtcaggagttcgagaccagccttggccaacatagtgaaaccctgtctctactaaaaaatacaaaaaaatattggccgggcgtggtcgcgggcgcctgtaatcccagctactccgggaggttgaggcgggagaatcgcttgaacccaggaggcggagcttgcagtgagccgagattgcgccattgcagtccgcagtccggcctgggcgacagagcgtgagactccatctcaaaaaaaaaataaatagctggatgcaggccgggcgcggtggctcactcctgtaatcccagcactttgggaggccgaggcgggcagatcacctgaggtcgggagtttgagaccagcctggccaatatggtgaaaccccatctctactaaaaatacaaaaattaggcaggcgtggtggcaggcgcctgaaatctcagctacttcgggaggctgaggcaggagaatcgcttgaacctgggaggcagtttgcagtgagccgacatcgtgcaactgcactccagcctggcaacagagcgagacttcatctcaaaaaaa

SEQ ID NO: 158513 - DNA, 340 bp, Homo sapiens; identical to SEQ ID NO: 66445

SEQ ID NO: 158514 - DNA, 346 bp, Homo sapiens
gtggcagccgagataccggctctgaactggaaccagaatgggctatgcctcagaccaggccacacagggccccttgagagcccggcttccccacggcccccaggctgtggggacaggcctgccacagacttcctggccagaggtgtggctgggtgccatggtagggaaagacagccagacattgggggccatggtgcggcccggccaccgcagtctaaatcgccttgggggtgcgtttctgccaactgtggtgctggccattcatgccgtctctcaggctgtcgggccctgccctgcctgactcctggctcttggagctggagaaaggactctcagatctcgtgcc

SEQ ID NO: 158515 - DNA, 610 bp, Homo sapiens
ccctgacagatgatgagatgcgcaggctcaacatacccgtactacaggatgatggctttctcttcctctgggtcacaggcagggccatggagttggggagagaatgtctaaatctctgggggtatgaacgggtagatgaaattatttgggtgaagacaaatcaactgcaacgcatcattcggacaggccgtacaggtcactggttgaaccatgggaaggaacactgcttggttggtgtcaaaggaaatccccaaggcttcaaccagggtctggattgtgatgtgatcgtagctgaggttcgttccaccagtcataaaccagatgaaatctatggcatgattgaaagactatctcctggcactcgcacgattgagttatttggacgaccacacaatgtgcaacccaactggatcacccttggaaaccaactggatgggatccacctactagacccagatgtggttgcacggttcaagcaaaggtacccagatggtatcatctctaaacctaagaatttatagaagcacttccttacagagctaagaatccatagccatggctcttgtagctaaaccctaagagtgatatttgtacaatagctttcttcttt

SEQ ID NO: 158516 - DNA, 975 bp, Homo sapiens
cacatggaactgccctatgggaccctgacagatgatgagatgcgcaggctcaacatacccgtactacaggatgatggctttctcttcctctgggtcacaggcagggccatggagttggggagagaatgtctaaacctctgggggtatgaacgggtagatgaaattatttgggtgaagacaaatcaactgcaacgcatcattcggacaggccgtacaggtcactggttgaaccatgggaaggaacactgcttggtgagcagcagtggggcccaattcaataggtggagcacaaagaagaatcatttgatttcttactgagaaaaagttcaaaggtgtggtttcataaggtaatctgttatcctgtggtgagcaggttggtgtcaaagaaaatccccaaggcttcaaccagggtctggatttgtgatgtgatcgtagctgaggtatgtgcttctcaggcctccaaagcttccacatttttgttgggtatcagttattcatggttgggtgtattctcatccccagattttttctcatttagatcataaacataataggaaaggggctaggaattgcaatcttgtgtaacttaaaaaagcagctagtttttatttcctaggttcgttccaccagtcataaaccagatgaaatctatgggcatgattgaaagactatctcctgggcactcgcaagattgagttatttggacgaccacacaatgtgcaacccaactggatcacccttggaaaccaactggatgggatccacctactagacccagatgtggttgcacggttcaagcaaaggtacccagatggtatcatctctaaacctaagaatttatagaagcacttccttacagagctaagaatccatagccatggcttctgtaagctaaacctgaagagtgatatttgtacaatagctttcttctttatttaaataaacatttgtattgtaaaaaaaaaaaaaaaaaaa

SEQ ID NO: 158517 - DNA, 323 bp, Homo sapiens
ggcacgagataggctgagagtacctgtccgtattacaacgggactcctggctcaggaaggaggcctcctgtgcctctaccacctttcctatggggtggccccctgtcctccctgaggtcccactaccagcacccctccccatactgcaggcttgctggatctggcaatgcagatgggtggccggttcctgctgtgcctgatcctgggatcaggtggcatgcacaggctctgcggcattcatctccttgtctcacgctgcaaccacagctcctgtacccgctgatcctgtggcaagccacgtacgctcgagacgccctcgccct

SEQ ID NO: 158518 - DNA, 336 bp, Homo sapiens
cacaggaggggcagaagagagatgtctgtgagcaccacggaaaaaaactccagatcttctgtaaggaggatggaaaagtcatttgctgggtttgtgaactgtctcaggaacaccaaggtcaccaaacattccgcataaacgaggtggtcaaggaatgtcaggtaggctccaagatagaggaagagagagcagagagcagaagatggtacctaatgtgaaatctccactttttttgtcctgctttattccccttgtcaccatagaacggagagccctgtgatctctttccatactctttgcttagtttctgatgcctgaaggacactgcctcgtgcc

SEQ ID NO: 158519 - DNA, 330 bp, Homo sapiens
ggcacgaggtccggttctttgtggtggattgccgtcctgcagaacaatatggtgctgggcatttatcaactgctttccacttagattcagacctgatgcttcagaatccatctgagtttgcacagtcagtaaaatccttgctggaagcacagaagcagtccattgagtctggctccatagctggtggggagcacctctgttttatgggcagtggcagggaggaagaagacatgtatatgaacatggtcctggcacactttttacagaaaaacacagaatatgtgagtattgccagtggaggatttatggcactgcagcagcacctggcag

SEQ ID NO: 158520 - DNA, 332 bp, Homo sapiens
ggcacgaggatgaatttaaacctcttgtgggagatcctcataatttaatggatcccaatcgtgagctttttgatcagctcggagagtacaaattccagaatgcgctattatttcattacaccaagacagtaccccacgtgtcgactccaactcttgtagaggtctcaagaaacctacgaaaagtgggcagcacatgttggaaacatcctgaatcaaaaagaatgccctgtgctgaatactatctatccgcggtcctgatccacttatgtgtgctgcatgagaacacgctcttccgtgacagagtcatcaaatgctgcacagaatccttggtg

SEQ ID NO: 158521 - DNA, 1434 bp, Homo sapiens; identical to SEQ ID NO: 146376

SEQ ID NO: 158522 - DNA, 471 bp, Homo sapiens; identical to SEQ ID NO: 153006

SEQ ID NO: 158523 - DNA, 1603 bp, Homo sapiens
tgcaggaattcggcacgagggaacccatacttgctggtctgatccatgcacaaggcggggctgctaggcctctgtgcccgggcttggaattcggtgcggatggccagctccgggatgacccgccgggacccgctcgcaaataaggtggccctggtaacggcctccaccgacgggatcggcttcgccatcgcccggcgtttggcccaggacggggcccatgtggtcgtcagcagccggaagcagcagaatgtggaccaggcggtggccacgctgcagggggaggggctgagcgtgacgggcaccgtgtgccatgtggggaaggcggaggaccggggagcggctggtggccacggctgtgaagcttcatggaggtatcgatatcctagtctccaatgctgctgtcaaccctttctttggaagcataatggatgtcactgaggaggtgtgggacaagactctggacattaatgtgaaggccccagccctgatgacaaaggcagtggtgccagaaatggagaaacgaggaggcggctcagtggtgatcgtgtcttccatagcagccttcagtccatctcctggcttcagtccttacaatgtcagtaaaacagtcttgctgggcctgaccaagaccctggccatagagctggccccaaggaacattagggtgaactgcctagcacctggacttatcaagactagctttcagcaggatgctctgggatggacaaggaaaaagaggaaagcatgaaagaaaccctgcggagtaagaaggttaggcgagccagaggattgtgctggcatcgtgtctttcctgtgctctgaagatgccagctacatcactggggaaacagtggtgaacttgagcgtgatgttcacgggtggaggtgtctgcagagctgccagctggaaggaaggtggcacgggaactcccaggacgccacgggaatccccgaggcagcgcgagcccggagagaatcaggccaggtcctctccccgcatggccctacgacccgagttccctcccgagtcagcaagtacaagctggatgggtcctgagccggtggggaatagagaaaggccctgcaagccggcaagaaaggtcggcgccagcccgcgggctctcaggaggctcggcagcgcgacgcgcatgctcagtcgggcagctctccgggccggcgtgggagcccgcgctccaaggcccggtggggggaggggcgctcacgcaaccgccactgtctggagcgggctcgcctctgcggcagccctcaccgcccgggctttactgaagcggagtctagcatgtgcggctgctccacagcggtgtgggtggcggcggctcctctgcagcagcctcggcagtaggggtcagggtggccaagcccaccgtggagctcatctgagagttgtaaggtacgggactgcctcggtctttgggacgccccgtctggtagcatcccagatccagcacgttccttccggccctgcaccccggcccggtgcctcacaccccgctaccccaagcatccagactctaaggcagcccctgcatctcagtcctgacatcgctgtccctggagcatcctccgctggagctggagcttga

SEQ ID NO: 158524 - DNA, 357 bp, Homo sapiens
  misc_feature (1)...(357): n = a,t,c or g
tgcacgagacaaccagcatgatctgcaagaatgggaggagcacctacaggagcatacgaatgtcacgtgggtgggaaaccccaccataaagcctcattcattgccatctcataccgtatggacttggtgcttctcctgctttcatactccatgcgtggcttaccgtggctgaactgtcaacaagttatcaattgctttaaaacctaatcaatatttggataataagtgcagaacacttgcttcacatttctctgcacatctttgtccctcttcatgcagcatcgaatttgtttccaatgagtgttctctagaaacaacccttaattatgcctactcacgcacagttcagaggtgctn

SEQ ID NO: 158525 - DNA, 823 bp, Homo sapiens
ataagccatgtatgatggacactacaggtatgtcctgtagtgatcatgtaactgttgatagcccttatgtagttgcagttagaatagctgatgagacctctattaatacacgaagtttctcaaagtttgtaggaatgagtgcagatgcaacccctcttcatgtagctagaagtgggaatgacactgaagatttcagcaacccttctgcttgctcagatatttatggtgagagtatttcatctcattttacagagtcaacaggaaagttgatagagagcttgtcagattgtgcttcctccttacctataaaaaagattgctggtagtaattataacacttttttggactctgaactcagtatgttaaatgggacaaaagttctttcagacagtgccgtgggcattgacctgggtagtactggtgatacaacagaagcattgcacgaactaagaactgccgaagagttcaaaacagaagagcaagatgcctcagggagtatagaatttggtgtatcttttcctgatagggaatcatcatctatggaaacatccatcgaaccaaaagcaactgaaacttctcgcacagagggaattactgccattgaggagagctgggagtctatgtttaacgatgatggtgactgcctggatccacgtcttctacaagagttatcagggaataccaagagcagagagagcatccaggaacctagatctgattactacaatcatgaagttcctgatattgacctcagtgattgtgaattcccacatgtcattgaaatttatgactttccccaagaatttcgtactgaagaccttct

SEQ ID NO: 158526 - DNA, 468 bp, Homo sapiens
gacggtgctatgtgctacaggaggtggtgcttacaagtttgaaaaagattttcgcacaattggaaacctccacctgcacaaactggatgaacttgactgccttgtaaagggcttgctgtatatagactctgtcagtttcaatggacaagccgagtgctattattttgctaatgcctcagaacctgagcgatgccaaaagatgccttttaacctggatgatccctatccactgcttgtagtgaacattggctcaggagtcagtattttagcagtccattccaaagacaactataaacgagtgactgggacaagccttggagggggtacctttctgggtttatgcagtttattgactggctgtgaaagttttgaagaggctcttgaaatggcatccaaaggtgatagcacacaagctgacaagctggtccgtgatatttatggaggagattatgaaagatttggtttgcc

SEQ ID NO: 158527 - DNA, 2697 bp, Homo sapiens
atgaccagcgagggcgtgcccagtgcccgtgctgtgctggccctgtatgagaatgatctcaaggctcttcgcaccctctgctcctgccctctgggctttgaggggcagcggtgtgagatcaacccagatgactgtgaggacaacgactgcgaaaacaatgccacctgcgtggacgggatcaacaactacgtgtgtatctgtccgcctaactacacaggtgagctatgcgacgaggtgattgaccactgtgtgcctgagctgaacctctgtcagcatgaggccaagtgcatccccctggacaaaggattcagctgcgagtgtgtccctggctacagcgggaagctctgtgagacagacaatgatgactgtgtggcccacaagtgccgccacggggcccagtgcgtggacacaatcaatggctacacatgcacctgcccccagggcttcagtggacccttctgtgaacaccccccacccatggtcctactgcagaccagcccatgcgaccagtacgagtgccagaacggggcccagtgcatcgtggtgcagcaggagcccacctgccgctgcccaccaggcttcgccggccccagatgcgagaagctcatcactgtcaacttcgtgggcaaagactcctacgtggaactggcctccgccaaggtccgaccccaggccaacatctccctgcaggtggccactgacaaggacaacggcatccttctctacaaaggagacaatgaccccctggcactggagctgtaccagggccacgtgcggctggtctatgacagcctgagttcccctccaaccacagtgtacagtgtggagacagtgaatgatgggcagtttcacagtgtggagctggtgacgctaaaccagaccctgaacctagtagtggacaaaggaactccaaagagcctggggaagctccagaagcagccagcagtgggcatcaacagccccctctaccttggagctttcccatggtttggcatggacattgggggaactctagtaaagctctcgtactttgaacctattgatatcacagcagaggaagagcaagaagaagttgagagtttaaaaagtattcggaaatatttgacttctaacgtggcatatggatccaccggcattcgggatgtacaccttgaactgaaagatttaacactttttggccgaagagggaacttgcactttatcaggtttccaacccaggacctgcctacttttatccaaatgggaagagataaaaacttctcaacattgcagacggtgctatgtgctacaggaggtggtgcttacaagtttgaaaaagattttcgcacaattggaaacctccacctgcacaaactggatgaacttgactgccttgtaaagggcttgctgtatatagactctgtcagtttcaatggacaagccgagtgctattattttgctaatgcctcagaacctgagcgatgccaaaagatgccttttaacctggatgatccctatccactgcttgtagtgaacattggctcaggagtcagtattttagcagtccattccaaagacaactataaacgagtgactgggacaagtttattgactggctgtgaaagttttgaagaggctcttgaaatggcatccaaaggtgatagcacacaagctgacaagctggtccgtgatatttatggaggagattatgaaagatttggtttgccaggttgggctgtagcatctagttttgggaatatgatttataaggagaagcgagaatctgttagtaaagaagatctggcaagagctactttagttactatcaccaataacattggttctgtggcacgaatgtgtgctgttaatgagaaaataaacagagttgtctttgttggaaactttttacgtgtcaataccctctcaatgaaacttttggcatatgcactggattactggtcaaaaggtcaactaaaagcattgtttctagaacatgagtttggctacaacattggagtcatcagtgctcctgagacagtcatacaggactttctcagttacactttgaaagagaggtcagaagactctccctctgaggttttgctcatgtccccctggccctcgtctgtggccatcttccccaatggtgatatgattggctcctttctgttgcactctttgtcaaccactttggcagcccaaaatctccttaagctgataagcaacttcagcaaagtctcaggatacaaaatcaatgcacaaaaatcacaagcattcttatacaccaataaaagacaaacagagagccaaatcatgagtgaactcccattcacaattgcttcaaagacaataaaatacctaggaatccaacttacaagggacgtgaaggacctcttcaaggagaactacaaaccactgctcaatgaaataaaagaagatacaaacaaatggaagaacattccatgctcatgggtaggaagaatcaatatcgtgaagatggccatactgcccaaggtaatttatagattcaatgccatccccatcaagctaccaatgactttcttcagagaattggaaaaaactactttaaagttcacgtggaaccaaaaaagagcccacatcaccaagtcaatcctaagccaaaagaacaaagctggaggcatcacgctacctgacttcaaactatactacaaggctacagtaacgaaaacagcatga

SEQ ID NO: 158528 - DNA, 533 bp, Homo sapiens; identical to SEQ ID NO: 153782

SEQ ID NO: 158529 - DNA, 1563 bp, Homo sapiens
gatcttctctgtggcggagacagccagaacttaaggcatacagaacgatggagtatatggcagaatccaccgaccgcagccctggacacatcttgtgctgtgagtgtggtgttccgataagtccaaatcctgccaatatttgtgtggcctgtttgcgaagtaaagtggacatcagccaaggtattccgaaacaagtctcgatttcgttctgcaaacaatgtcaaaggtattttcaaccaccaggaacttggatacagtgtgctttagaatccagggaacttcttgctttgtgcttgaaaaaaatcaaagcccctctgagtaaggtacggcttgtagatgcaggctttgtttggactgagcctcattctaagagacttaaagttaaactgactattcagaaagaggtgatgaatggtgctatccttcaacaagtgtttgtggtggattatgttgtgcagtcccaaatgtgtggagatggccatgagagtgagaagctgaaggatttctggaaaggctgtgattcaagtgaggcaaaagactttgcataaaaaaactttctactatctggaacagttaattctgaaatatggaatgcatcagaatacacttcgtatcaaagagattcatgatggtctggatttttattattcctcaaaacaacatgctcagaagatggtcgaatttcttcagtgtacagttccctgtagatacaaagcatcacaaagactgatctctcaagatatccatagtaacacatacaattacaaaagcactttttctgtggaaattgttccaatatgcaaggataatgttgtctgtctgtctccaaaactggcacaaagcctgggaaatatgaaccagatttgtgtgtgtattcgagtaaccagtgccattcacctcattgatccaaacaccctacaagtggcagatattgatgggagcactttctggagtcaccctttcaatagtttatgtcatcccaaacagctagaggagtttattgtgatagaatgcagcatagtccaagatataaaacgtgctgcaggtgctggaatgatatcaaaaaagcataccctcggggaagtctgggtacagaagacatctgaaatgaatacagataaacagtatttttgtcgtactcatttgggacatcttctaaatcccggagacctggtgttagggtttgatttggccaactgtaacttaaatgatgagcatgtcaacaaaatgaactcagatagagttccagatgtggtattaatcaagaagagctatgaccggaccaaacgtcagcgtcgtagaaactggaaattgaaagagcttgcaagagagagagaaaacatggatacagatgatgaaaggcaataccaagattttcttgaagatcttgaagaagatgaggcaattcgaaaaaatgtcaacatttacagagattcagccatccctgtggaaagtgacaccgatgatgaaggagcacctcgaattagtctggctgagatgcttgaagaccttcatatttcccaagatgccactggtgaagaaggtgcatcaatgctgacataa

SEQ ID NO: 158530 - DNA, 330 bp, Homo sapiens
ggcacgagcattagtaaaaaccgcctcttaagtattaaaacatttctttattggaccatcctgggcttcagtcatgcctttattttcttttttggatcctatttactaatagggaaagatacatctctgcttggaaatggtcagatgttccgaaactgcacatttgacgcttaggggatatcaccgtctggtgtttcatgactagtcattttgcagatacagcggttaattttgtcaatcacatgatcgtttgtcgctgcgcacctcacgtgtctaattttttcgacaactgtagtactgatacccctttaacggcttcttgccgtcacg

SEQ ID NO: 158531 - DNA, 659 bp, Homo sapiens; identical to SEQ ID NO: 156402
  misc_feature (1)...(659): n = a,t,c or g

SEQ ID NO: 158532 - DNA, 777 bp, Homo sapiens
  misc_feature (1)...(777): n = a,t,c or g
gtcctccgatcataagtctgaaatcccgggccgcttcaacgggttaaaaccttatgaacatctgtaggggcccctgtcttctccccggtgctcccttcatgcgtgacctggcagctgtagctttgtgggacttccacggtcaggcgtcaggctcaggtagctgctggccgcgtacttgttgttgctttgtttgaagggtgtggtggtctccactncccgccttgacggggctgctatctgccttccaggccactgtcacggctcccgggtagaagtcacttatgagacnccccagtgtggccttgttggcttgaagctcctcagaggagggcgggaacagagtgacgaagggggcagccttgggctgacctaggacgctcagcttggtcccggcgccgaacacccagagattagagccgcctgtgaatgaactgcagtaataatcagcctcgtcctcagcctggagcccagagatggtcagggaggccgtgttgccagactgggagccagagaagcgattggaaacccctgacggccgatcactgacatcaaaaatcaagagtttgggggctttgccggggtgctgttggtgccaggagacatagtgataaccaccaacgccagtgcaggagatggtgatcgactgtccaggagacccagacacggaggcaggctgagtcagggcagactgggcccaggacgctgtgccctgagtgaggagggtgaggaacagcagagcccaggccatggtggagacgtcccgagagcgctgcgtcg

SEQ ID NO: 158533 - DNA, 677 bp, Homo sapiens
tggcagctgaagcttctgtgggacttcactgctcaggcgtcaggctcagatagctgctggccgcgtactttgttgttgctttgtttggagggtgtggtggtctccactcccgccttgacggggctgctatctgccttccaggccactgtcacggctcccgggtagaagtcacttatgagacacaccagtgtggccttgttggcttgaagctcctcagaggagggcgggaacagagtgaccgagggggcagccttgggctgacctaggacggtcagcttggtccctccgccgaagactatacgatcagtagttgcccacacctgacaggaatagtcggcctcatccccggcctcgactccgctgatggtcagggtggccgtgttcccagacttggagccagagaatcggtcagagatacctgagggccggtgactatcatcatagacgaccagcataggggcctggcctgacttctgctggtaccactgcacattctcagttccaagattgtctcccccacaggttatgctggccgtctttcctggggccactgacaccgagggtggctgagtcagcacataagaagtcacagagcctgtgcagtgagagaggagaccgaggaggagaacggtccaggccatggctgaggcacgcgcagtgcgaattacaccacgctc

SEQ ID NO: 158534 - DNA, 684 bp, Homo sapiens
agtgtggtgtaattcccatggcctggaccccactcctcctcctcttccctctcctcctccactgcacagggtctctctcccagcctgtgctgactcagtcatcctctgcctctgcttccctgggatcctcggtcaggctcacctgcactctgagcagtggacacagttggtactacatcgcgtggcatcagcaacaggcaggaaaggcccctcggtacttgatgaggcttgaacgtagtggaagctactacaaggggagcggagttcctgatcgcttctctggctccagctctggggctgactgctacctcaccatctccaacctccagtctgaggatgaggctgattattactgtgagacttgggacactgacactctggtgttcggcggagggaccaagctgaccgtcctaagtcagcccaaggctgccccctcggtcactctgttcccgccctcctctgaggagcttcaagccaacaaggccacactggtgtgtctcataagtgacttctacccgggagccgtgacagtggcctggaaggcagatagcagccccgtcaaggcgggagtggagaccaccacaccctcccaacaaagcaacaacaagtacgcggcgcagcagctatctgagcctgacgccctgaacagtggaaggtcccacaaaaagctacagctgccaagca

SEQ ID NO: 158535 - DNA, 683 bp, Homo sapiens
gggatcccttcaagggttgcctgggcaaagctttagttttggtgggcttccactgctcgggcgtcaggtcagggtagctgctggccgcgtacttgttggttgctctgtttggagggtttggtggtctccactcccgcccttgacggggctgccatctgccttccaggccactgtcacagctcccgggtagaagtcactgatcagacacactagtgtggccttgttggcttggagctcctcagaggagggcgggaacagagtgacagtggggttggccttgggctgactcaggacggtgaccttcgttccacgtccgaagacaaagtctgctgattgacaataatagtcagcctcgtctgctgcctggacttcactgatggtcaatgtgacagttgtgcctgaactggagccagagaatcggtcggggatccctgagggcctctcagtgtctctataaatcaataatataggggcctggcctgacttgtgttgataccacgaaacaaattgctttgacaaaacatctccagagcaaaagatcctggccgtctgtcctggggacactgacaccgagggtggctgtgtcaattcatcggaggcctcagagcctgtgtagagagtgaggagggggagaagtagagggatccaggccatggtgagacacccaggaattccaccacact

SEQ ID NO: 158536 - DNA, 739 bp, Homo sapiens; identical to SEQ ID NO: 145400

SEQ ID NO: 158537 - DNA, 862 bp, Homo sapiens
cgacttttttttttgattgacaatgagaatatttattgagggtttattgagtgcagggagaagggcttgatgccttggggtgggaggagagacccctcccctgggatcctgcagctctagtctcccgtggtggggggtgagggatgagaacctatgaacattctgtaggggccactgtcttctccacggtgctcccttcatgcgtgacctggcagctgtagcttttgtgggacttccactgctcaggcgtcaggctcaggtagctgctggccgcgtacttgttgttgctctgtttggagggtttggtggtctccactcccgccttgacggggctgccatctgccttccaggccactgtcacagctcccgggtagaagtcactgatcagacacactagtgtggccttgttggcttggagctcctcagaggagggcgggaacagagtgacagtggggttggccttgggctgacctaggacggtgaccttggtcccacttccgaagattcgaagggcgctactaccagcaaacgagcagcagtaataatcagcctcgtcgtcagcctggagcccagagattgtcagggaggccgtgttggcagacatggagccagagaagcgatcataaacccttgagggccgcttagagccctcataatggatgagtttgggggccttgtcggggtgttgctcataccaagagacaagggtatagctcccaacatcactgttggctccagtgcaggagatggtgatcgactgtccaggagacccagacacggaggcaggctgagtcagggcagactgggcccaggaccctgtgccctgagtgaggagggtgaggaatagcagagcccaggccat

SEQ ID NO: 158538 - DNA, 1974 bp, Homo sapiens
ggtggaattcctggggagtctgcaccatggcctggaccccactcctcctcctcttccctctcctcctccactgcacagggtctctctcccagcctgtgctgactcaatcatcctctgcctctgcttccctgggatcctcggtcacgctcacctgcactctgagcagtggacacagtgactacatcatcgcgtggcatcagcagctgccagggaaggcccctcgttctttgatgaaggttgaaggtgacgggagctacaagacggggcgcggagttcctgatcgcttctcaggctccagctctggggctaaccgctacctctccatctccaatttccagtctgaggatgaggctgactattactgtcaggcgtgggacagcagcactgcacacagtgacacaggcagatgcggaatagtgggaagaccccctgtcaggcagtgctggcccctgctgctgctgggtctggccatggtcgcccatggcctgctgcgcccaatggttgcaccgcaaagcggggacccagaccctggagcctcagttggaagcagccgatccagcctgcggagcctgtggggcaggctcctgctccagcccagcccccagagagcagaccccaggtgctggccccgggggttttggtctgagcctcagtcactgtgttatgtcttcggaactgggaccaaggtcaccgtcctaggtcagcccaaggccaaccccactgtcactctgttcccgccctcctctgaggagctccaagccaacaaggccacactagtgtgtctgatcagtgacttctacccgggagctgtgacagtggcctggaaggcagatggcagccccgtcaaggcgggagtggagaccaccaaaccctccaaacagagcaacaacaagtacgcggccagcagctacctgagcctgacgcccgagcagtggaagtcccacagaagctacagctgccagctgcagtgggggctggggctaggggcatcccagggagggtttttgtatgagcctgtgtcacagtgtgtggtattcggcggagggaccaagctgaccgtcctaggtcagcccaaggctgccccctcggtcactctgttcccgccctcctctgaggagcttcaagccaacaaggccacactggtgtgtctcataagtgacttctacccgggagccgtgacagtggcctggaaggcagatagcagccccgtcaaggcgggagtggagaccaccacaccctccaaacaaagcaacaacaagtacgcggccagcagctacctgagcctgacgcctgagcagtggaagcaggcacagaagctacagctgccagaaacctaaccacgcatcacacggcacttctcgcatgccttctgtgtctgctccagtctctgggctaaagagttgctggtccgggacaggggataggtccgctcttggtcagatgccaggtccctgccatggcatccctgaccctatgcaacaagccagtgactctggtcagcccaaggctgccccctcggtcactctgttcccgccctcctctgaggagcttcaagccaacaagggccacactggtgtgtctcataagtgacttctacccgggagccgtgacagtggcctggaaggcagatagcagccccgtcaaggcgggagtggagaccaccacaccctccaaacaaagcaacaacaagtacgcgggcagcagctacctgagcctgacgccctgagcagtggaaagtccacaaaagctacagctgccaggtcacgcatgaagggagcaccgtgggagaagacaggggccccctacagaaaggtcataaggtttaaaaacccttaacccccccccacgggaagaactagaacctgcaggaatccccagggagaggggtctctcctcccaccccaaggcattaaggcccttctccctgcactcaataaaccctcaataaatattctcattgtcaatcaaaaaaaa

SEQ ID NO: 158539 - DNA, 412 bp, Homo sapiens
  misc_feature (1)...(412): n = a,t,c or g
ggagaggccacaaaagtgttccaggcggggacttcgccctgttgaccattcccatggagggcgcgcatgaggaatgggcggtgagctccctccttccatctccagctgggggtggagggtgtgagcctgcccgccgagaggaatccagttacagaatcaaaatgactcagnnnnnnnnnnnnnnnnnnnnnnnnnnnnnnnnnnnnnnnnnnnnnnnnnnnnnnnnnnnnnnnnnnnnnnnnnnnnnnnnnnnnnnnnnnnnnnnnnnnnnnnnnnnnnnnnnnnnnnnnnnnnnnnnnnnnnnnnnnnnnnnnnnnnnnnnnnnnntggcctgcaggcaacaggaggacaggctgggtcagtgctgttcactgctccatcttcagtgtctggcacagagcaggtgtcactg

SEQ ID NO: 158540 - DNA, 178 bp, Homo sapiens
ctgagtcattttgattctgtaactggcttcctctcggcgggcaggctcacaccctccacccccagctggagatggaaggaggatgctcaccgcccattcctcatgcaggccatcgatggaaatgtcagacagtgcgagtccacgcctgaacacttctggggtccgctctgggactgac

SEQ ID NO: 158541 - DNA, 2101 bp, Homo sapiens
gcatttcttccttctgcgtatgggacaggaccctttctggaatgggggtcttatgacctacaatcaaacaagaacatggacttcccgtgcctctggctagggctgttgctgcctttggtagctgcgctggatttcaactaccaccgccaggaagggatggaagcgtttttgaagactgttgcccaaaactacagttctgtcactcacttacacagtattgggaaatctgtgaaaggtagaaacctgtgggttcttgttgtggggcggtttccaaaggaacacagaattgggattccagagttcaaatacgtggcaaatatgcatggagatgagactgttgggcgggagctgctgctccatctgattgactatctcgtaaccagtgatggcaaagaccctgaaatcacaaatctgatcaatagtacccggatacacatcatgccttccatgaacccagatggatttgaagccgtcaaaaagcctgactgttactacagcatcggaagggaaaattataaccagtatgacttgaatcgaaatttccccgatgcttttgaatataataatgtctcaaggcagcctgaaactgtggcagtcatgaagtggctgaaaacagagacgtttgtcctctctgcaaacctccatggtggtgccctcgtggccagttacccatttgataatggtgttcaagcaactggggcattatactcccgaagcttaacgcctgatgatgatgtttttcaatatcttgcacatacctatgcttcaagaaatcccaacatgaagaaaggagacgagtgtaaaaacaaaatgaactttcctaatggtgttacaaatggatactcttggtatccactccaaggtggaatgcaagattacaactacatctgggcccagtgttttgaaattacgttggagctgtcatgctgtaaatatcctcgtgaggagaagcttccatccttttggaataataacaaagcctcattaattgaatatataaagcaggtgcacctaggtgtaaagggtcaagtttttgatcagaatggaaatccattacccaatgtaattgtggaagtccaagacagaaaacatatctgcccctatagaaccaacaaatatggagagtattatctccttctcttgcctgggtcttatattataaatgttacagtccctggacatgatccacacatcacaaaggtgattattccggagaaatcccagaacttcagtgctcttaaaaaggatattctacttccattccaagggcaattggattctatcccagtatcaaatccttcatgcccaatgattcctctatacagaaatttgccagaccactcagctgcaacaaagcctagtttgttcttatttttagtgagtcttttgcacatattcttcaaataaagtaaaatgtgaaactcaacccacatcaccacctggaatcagggattgctcactccaggttactgcaaccctaactcactctagtgggaccttgactggagaaactccacgatcttcctgaagaagagaaatggatgtttccaaattccacaataagcaatatgtggtgataatgaaaagaatgattcagtcttgacggtgaatggaagccccttcctacccaagtactgttcattaccactcaaaattattcttgaagtagtcttaaattgtgtaagaagttaaaactggagaagcaaaaaaaatgcctgcaaaaaggaggatcattttgtatacagagacccggatgattataagcattgaagatgaacatttatggatcttctacatacaagacttcaccataaggccagggagcagtggctcacaccttgtaatcccagcactttgggaggccaaggtgggcggatcaccttgaggtcaggagttcaaaaccagcctgaccaacatggtgaaaccctgtctctactaaatattagcggggtgtggtggcgggcacctgtaatcgcagcctttcaggaggctgagacaggagaatcgcttgaaccctagaggcggagtttgcagtgagccgagatagtgccattgtactccagcttgggcaacagagtaagactctgtctcaaaaaaaaaa

SEQ ID NO: 158542 - DNA, 1751 bp, Homo sapiens
  misc_feature (1)...(1751): n = a,t,c or g
ttgaactgatgaccataggccangcggtggaattccgaagccggccgcctgacctggggcaagtgctttcaactctctgaacttcggttcctcatctgccagttggcagacgctcagcaaatcttcctagactcacggggcgaattgtacagttgggtaaatcgaggcccagagatggcaaaaggaccgtccaaggtcgtacagccacccggaattacaattcttttctgccgggtcacacgctgtcatccacgtgttacctaagagagctttccagcctgtgctaagaaaactgccccacatcatctgcagtaggacgggggagttggagccctggtcaggccactctgctactgaccacagttttctcatctctaaaaaggcgcagtaacaatataattaccgtatgcagtcccccaggatacagggtcaaaggagagcacaaccatcgcagttggaagccccagggggcaaaannnnnnnnnnnnnnnnnnnnnnnnnnnnnnnnnnnnnnnnnnnnnnnnnnnnnnnnnnnnnnnnnnnnnnnnnnnnnnnnnnnnnnnnnnnnnnnnnnnnnnnnnnnnnnnnnnnnnnnnnnnnnnnnnnnnnnnnnnnnnnnnnnnnnnnnnnctgagtcattttgattctgtaactggcttcctctcggcgggcaggctcacaccctccacccccagctggagatggaaggaggatgctcaccgccccattccctcatgcaggccatcgatggaaatgtcagacagtgcgagtccacgcctgaacacttctggggtccgtctctgggactgacactggcagatccatcggtgagctcccgcctgccacctctgggcctgcattgcggtgatagggccaagggcctgggccttcaattctccagacttgccaaaatgctcagcgcaggcctcgtcggcaactgcagacaagcagaggcagcacctgggctctgcctgtgcctggcacagtgaagcgagggtgggggcaggaatgagggtcctctccatgcaaggggggaagatagaagaacaaaatttccccctaatgtagtgtctttagaccgtgcaatgttgtgctcctgttagtctgatatcaggggcttgcagcctggcaaaggaaaaaaaacaggctgaggcacatgatagaagacaggcagggatgccacaatcataaccatggcaaagaccaggatcagaaaggcccaccatctctgaccccaaatccctgggcagatggttccagaactcagaattttcccagttgtagaaagatggggccaggtgcagtggctcacgcctgtaatcccagcattttgggaggccaagggggggcggatcacctgaggtcaggagttcgagaccagcctggccaacatggtgaaacccctgtctctactaaaaaaaaaaaaaaaaaaaaaaaaaaaaaaaaaaaaaaattagccgggcatggtggctcacgcctgtaatcccagcactttgggaggccgaggcaggcggatcacctgaggtcaggagtttgacaccagcctggccaacatggtgaaaccctgtctctactaaaattacaaaattagccggacgttgtggcatacggttgtaatcccagctactcaggaggctgaggcaggagaatcgcttgaacccaggaggtgaaggtttcaatgagccaagactgagccactgcactccagcctgggagacagagcaagaccctggacggctcgcggtcggaac

SEQ ID NO: 158543 - DNA, 399 bp, Homo sapiens
  misc_feature (1)...(399): n = a,t,c or g
aaaaaccacttgagaaaatccagcatgcttattttattaagaccctcagcacaatcagcgtagaannnnnnnnnnnnnnnnnnnnnnnnnnnnnnnnnnnnnnnnnnnnnnnnnnnnnnnnnnnnnnnnnnnnnnnnnnnnnnnnnnnnnnnnnnnnnnnnnnnnnnnnnnnnnnnnnnnnnnnnnnnnnnnnnnnnnnnnnnnnnnnnnnnnnnnnnnnnnnnnnnnnnnnnnnnnnnnnnnnnnnnnnnnnnnnnnnnnnnnagtggtagaagaagaagtctgcctattgctgcttcccaatgatatgactgtatacctagaacaccctaaagactcatccaaaaagcttctagaactggtaaatgcattcagcaaagtttcacgatacatagttac

SEQ ID NO: 158544 - DNA, 361 bp, Homo sapiens
attagcctttcgcccccgctgcaggaattcggcacgaggtgaacatgggtcagaaacaggaaattctggatctcttttcttcagtactctatgaatgtgttacccaggagaccccagagatgttgcctgcatacatagcaatggatcaggctataagaagacttgggagaagagaaatgtctgagacttctgaactttggcagataaagttggtgttagagtttttcagctcccgaagccatcaggagcggctgcagaaccaccctaagcgggggctctttatgaactcggaattcctccctgttgtgaagtgcaccattgataataccctggaccagtggctacaagtcgggggtgatat

SEQ ID NO: 158545 - DNA, 1127 bp, Homo sapiens
attgtggtgagtgccttctgtacagtcgactgcaaatgaaacgcagaggatgggtgcccagaagcacctgcggcagaggcgcacgggaagcccggggcccaggctcatgcaacacgacgctcaccgcggctcgggccgtggggccgtcagagaaacctttttaaaaaatggagatgaatgttacagaattggacaacccgaactgcttttcaaaaccagaggaaggaggttcttagccgttactcagataccagtgctggggaggttggcctgacttcagcaacagctgtgggtgggctggaggccggcgcagcttggggccccccgcgccagctgtctcagccaccacctgtgcggcgcttgctccgaggggtcagcaagagcaactgatggctgccacttccaggccccgagagacaggcctcacgtaactttactgcagccgaggtccaggccgtggagggggtcctagctccgctgcattctgcatcccaagtgggcacgtggaggaagggtctgaaggaaggctccggagcacaggccctggtgttcctgtgaggacgctggacctgcaggagcggggagctgcagtgccacctgctgggtaccacgggccgggcctggggtccacgcctttgggttgggtgtgtctgatgtcttgccaagcgcctggtcctgtcctcttgagctgcccttgcccagcactgcactctggaggtgggtggtgcaggcagtggagggacacaggccatctcaagcccgctggtggcagggcgttttcccaccgggatacgggaagccacctgtgtcagggctaggccctgggatcgggagttacactaccctgtcccaagccgagggggccggtggaatgatttgagcagctctgggagtggggaaaaaagacgactaatttccaaacccgtttgttctcagataaaaagcagttttataaacccgcaatctgctccagattcaagcagtaatatttcagcaggaggaggtggtcatgggaagccagcacagcagaggctccctgaccgggaggcctgcctgcttttcaggttgtttcccatgttcagcttggactgcagaagaggctcacgctcctgtggtgagggcagggt

SEQ ID NO: 158546 - DNA, 311 bp, Homo sapiens
  misc_feature (1)...(311): n = a,t,c or g
gctgaaaggtggtcctttctctgacagctacaggctctttcagttccattttcactggggcagtacaaatgagcatggttcagaacatacagtggatggagtcaaatattttgccgagcttcacgtanctcactggaattctgcaaagtactccagccttgctgaagctgactcaaaggctgatgggttggcaatcattggtgcaatgaagaaggatgataaggccaacccacctctggatcatgtacaagttggcgtacgtgctgataggaacttttatggtattgaggttctatctgatgcattaatcc

SEQ ID NO: 158547 - DNA, 314 bp, Homo sapiens
  misc_feature (1)...(314): n = a,t,c or g
ccaaaatgccagctgcttttgttggtgttgctgttgttgcagaaattggtgacctgatcctaaaattcatataagaatggaagggatccacaacagtgaaaaagttggaggactcacgcttctgattttaaaacttactacaaatctacaataatcaagatagtatataccggcctaataataggtaaatcaatagaataaaactgagggtcaagaaataaactctnnnnnnnnnnnnnnnnnnnnnnnnnnnnnnnnnnnnnnnnnnnnnnnnnnnnnnnnnnnnnnnnnnnnnnnnnnnnnnnnnnnnnnnn

SEQ ID NO: 158548 - DNA, 365 bp, Homo sapiens
  misc_feature (1)...(365): n = a,t,c or g
ctccaatggcattgttcacagaaataaaacacaaccctaaaattcatatggaaccacaggaacctgagtaactaaagcagtcttgnnnnnnnnnnnnnnnnnnnnnnnnnnnnnnnnnnnnnnnnnnnnnnnnnnnnnnnnnnnnnnnnnnnnnnnnnnnnnnnnnnnnnnnnnnnnnnnnnnnnnnnnnnnnnnnnnnnngatagaaagcccagaagcaaactcatgtattgatggtcagttgctttttgacggtggtatcaggattgcacactgtgcaaaggacagtnnnnnnnnnnnnnnnnnnnnnnnnnnnnnntcatccacatgcaggagaatgaaattagacccttatcatacaccaa

SEQ ID NO: 158549 - DNA, 314 bp, Homo sapiens
  misc_feature (1)...(314): n = a,t,c or g
aaccacaggaacctgagtaactaaannnnnnnnnnnnnnnnnnnnnnnnnnnnnnnnnnnnnnnnnnnnnnnnnnnnnnnnnnnnnnnnnnnnnnnnnnnnnnnnnnnnnnnnnnnnnnnnnnnnnnnnnnnnnnnnnnnnnnnnnnnnngatagaaagcccagaaacaaactcatgtattgatggtcagttgctttttgacggtggtatcaggattacacactgtgcaaaggacagtnnnnnnnnnnnnnnnnnnnnnnnnnnnnnntcatccacatgcaggagaatccaattagacccttatcttacaccaa

SEQ ID NO: 158550 - DNA, 380 bp, Homo sapiens
gttttcctgacggctacaccgtttttttttgggagagtcggaacaacccagtcctgccagctccagctccagctccagctccagcttgacaccatcccagaccaggcaacacggacctttgaggtctataatgaaagatctgcattctgatgactatgaggaggaatcatatgaagtggatgataacgacaatgactctaaaatggagaggcctgcaaatagatgacgcacccgaagtcgcacagttagcttaagtgatggcagcgatagtgaaagcaggacttcttcttgacccctacattacgaacctccaccacccttactatataccaacaacaaccagattcttgaagtggaaagcccaataacgcatagcttag

SEQ ID NO: 158551 - DNA, 3400 bp, Homo sapiens
tttggggctgagtttaataagcgagcgagcgagcaagcgagcgcggggggaaaaaggcagagaatgtccgccatctaccctccgctcctgggcgcgctctcattcatagcagcctcttcatgaattacagctgagggggggcggaggaggggggggtaccacacaacaccccagcaaacctccgggcccccaggcatggctagctcgtgttccgtgcaggtgaagctggagctggggcaccgcgcccaggtgaggaaaaaacccaccgtggagggcttcacccacgactggatggtgttcgtacgcggtccggagcacagtaacatacagcactttgtggagaaagtcgtcttccacttgcacgaaagctttcctaggccaaaaagagtgtgcaaagatccaccttacaaagtagaagaatctgggtatgctggtttcattttgccaattgaagtttattttaaaaacaaggaagaacctaggaaagtccgctttgattatgacttattcctgcatcttgaaggccatccaccagtgaatcacctccgctgtgaaaagctaactttcaacaaccccacagaggactttaggagaaagttgctgaaggcaggaggggaccctaataggagtattcataccagcagcagcagcagcagcagcagtagcagcagcagcagcagcagcagcagcagcagtagcagcagcagcagcagcagcagcagcagcagtagcagcagcagtagcagcagcagcagcagcagtagtaccagtttttcaaagcctcacaaattaatgaaggagcacaaggaaaaaccttctaaagactccagagaacataaaagtgccttcaaagaaccttccagggatcacaacaaatcttccaaagaatcctctaagaaacccaaagaaaataaaccactgaaagaagagaaaatagttcctaagatggccttcaaggaacctaaacccatgtcaaaagagccaaaaccagatagtaacttactcaccatcaccagtggacaagataagaaggctcctagtaaaaggccgcccatttcagattctgaagaactctcagccaaaaaaaggaaaaagagtagctcagaggctttatttaaaagtttttctagcgcaccaccactgatactcacttgttctgctgacaaaaaacagataaaagataaatctcatgtcaagatgggaaaggtcaaaattgaaagtgagacatcagagaagaagaaatcaacgttaccgccatttgatgatattgtggatcccaatgattcagatgtggaggagaatatatcctctaaatctgattctgaacaacccagtcctgccagcgtccagctccagctccagctccagctttcacaccatcccaggaccagggcaacaaggtcctttggaggtctataatgaaagatctgcattctgatgacaagcgaggaggaagcagatgaagcggaggatagcgacaatgactctgaaatggagaggcctgttaaatagaggaggcagccgaagtcgcagagtttagcttaagtgatggcagcgatagtgaaagcagttctgcttcttcacccctacatcacgaacctccaccacccttactaaaaaccaacaacaaccaggattcttggaagtggaaaagtccaataaagcaaagcaaattcagattaaggcaaattaaagaatggtgaatgttgacaaggccttacctagatggaactggtaggagctttcacaggaaggtttattgactttgaggaggaaagacacattctgcagcagatcgtgaaccttatagaagaaactggacactttcatatcacaaacacaacatttgattttgatctttgctcgctggacaaaaccacagtccgtaaactacagagttacctggaaacatctggaacatcctgaggatataacaactggatgcatcaagaactattgtgttttttttttttggttttttttttttttggttgtgattttttgttcttgttgtttatatgaaaacactcaaaatgatgcaaccaaaagggaaaaaataaaaatcaaacaaccttcagctttatttttctttaaagccagtcatcatctcttgataaaggagaggttaaagcaaaccagcctcagcggaccactcttctctccaaggaaatccccgggaagagttagcctggatagccttgaaaacaaacaaatcaaacacaacacaagaaaactcaaagaatgtgtatggtatcatgtatctctctgtggtggttcattccacaggacgaatgcatattcaacacactgccttattacataactgatctatttattatcgcatacagatattctaagtcgttgagggaatgacaccatcagacattataagtacttggtcccgtggatgctctttcaatgcagcacccttgccatcccaagcccagtgaccttactcgtataccgtgccactttccaccaactttttccaagtcctttaactcgttgcagtctgtattttccaccttttgtttttccagttccaggacacagattatcaactggggggaccaaatagccaccttgattttcttctttgtggtctttttcctgaaagttggggcccagtccttggctgtatccatgtaatgatcttggaccatggtagaaaatgcaccaaataggatcatatgaattgctgtctagccttagtcaataaacttgtaggacttttaaacaaaagtgtacctgtaaatgtcctgaatccagcattgttgagctgtcatcaacattcttgtgtctgttttactgttacaatattaggtgaatatggaagtaaaggcattccacaggatcatcatttaaaaaaaaagaattctggtcctgttttctaaaaaaaaaaaactgttgtagaaattcttaatttggatctatttattagtcagagtttcagctttcttcagctgccagtgtgttactcatctttatcctaaaaatctggaatcagagatttttgtttgttcacatatgattctcttagacacttttatatttgaaaaaattaaaatctttctttggggaaaaattcttggttattctgccataacagattatgtattaacttgtagattcagtggttcaatacctgtttagttgcttgctaatatttccagaaggatttcttgtattggtgaaagacggttggggatggggggatttttttgttcttgttgtacccttgttttgaaactagaaatctgtcctgtggcatgcaaaagaaagcaaattatttttaaaagaaaaaaaccaaagtacttttggtgtcattattccatcttctccataagtggagaaatgaaaagtaagaacagctcatcttcaaagtttttactagaaattc

SEQ ID NO: 158552 - DNA, 321 bp, Homo sapiens
  misc_feature (1)...(321): n = a,t,c or g
ggtacctggtgctggactaggaagagtggcctgggaaatagctatgctaggttatgcttgtcaaggaaatgaatggagtttttttatgctcttttcttccaactttgtactcaacagatgttctgaaattaataaatataaactttatccttggatccatcagtttagcaataaccggagatcagctgatcagattcgacccatctttttccctgatgttgacccccacagtcttcctcctggttctaacttttctatgacagcaggagattttcaagagatttattcagaatgcagtaagtccaaatcaagcgtttaaan

SEQ ID NO: 158553 - DNA, 323 bp, Homo sapiens
gtccactgtcttggggcagacctgctggagatcaataacaacccatgttactggggagtgatggataaatacgcagccgaagcactactggaaggaaaaccagagggtacctttttacttcgagactcagcacaggaagactatttattctctggtagttttagacgctatagtcgttctcttcatgctagaattgaacagtggaatcacaactttagctttgatgcacatgacccctgtgtcttccattctcctgacattactgggctcctagaacattataaggacccaagcgcctgtatgttctttgaaccacttctatc

SEQ ID NO: 158554 - DNA, 118 bp, Homo sapiens
gaatgactagatctaactcatatcctgtaaacgttcttagcgcagaatgttcagctctgttttccctattatcccagcccaggagttctgtttccgaagaaagagccagatgattctg

SEQ ID NO: 158555 - DNA, 4941 bp, Homo sapiens
atggagaaaaaaatcactggatataccaccgttgatatatcccaatggcatcgtaaagaacattttgaggcatttcagtcagttgctcaatgtacctataaccagaccgttcagctggatattacggcctttttaaagaccgtaaagaaaaataagcacaagttttatccggcctttattcacattcttgcccgcctgatgaatgctcatccggagttccgtatggcaatgaaagacggtgagctggtgatatgggatagtgttcacccttgttacaccgttttccatgagcaaactgaaacgttttcatcgctctggagtgaataccacgacgatttccggcagtttctacacatatattcgcaagatgtggcgtgttacggtgaaaacctggcctatttccctaaagggtttattgagaatatgtttttcgtctcagccaatccctgggtgagtttcaccagttttgatttaaacgtggccaatatggacaacttcttcgcccccgttttcaccatgggcaaatattatacgcaaggcgacaaggtgctgatgccgctggcgattcagcttccagtttcccagccagtaccaactatccaaggcgaacctcagatcccagttgcgacacaaccctcggttgttccagtccactctggtgctcatttccttccagtgggacagccgctccctactcccttgctccctcagtaccctgtctctcagattcccatatcaactcctcatgtgtctacggctcagacaggtttctcatcccttcccatcacaatggcagctggcattactcagcctctgctcacgttggcttcatctgctacaacagctgcgatcccgggggtatcaactgtggttcctagtcagcttccaacccttctgcagcctgtgactcagctgccaagtcaggttcacccacagctcctacaaccagcagttcagtccatgggaataccagctaaccttggacaagctgctgaggttccactttcctctggagatgttctgtaccagggcttcccacctcgactgccaccacagtacccaggagattcaaatattgctccctcttccaacgtggcttctgtttgcatccattctacagtcctatcccctcccatgccgacagaagtactggctacacctgggtactttcccacagtggtgcagccttatgtggaatcaaatcttttagttcctatgggtggtgtaggaggacaggttcaagtgtcccagccaggagggagtttagcacaagcccccactacatcctcccagcaagcagttttggagagtactcagggagtctctcaggttgctcctgcagagccagttgcagtagcacagacccaagctacccagccgaccactttggcttcctctgtagacagtgcacattcagatgttgcttcaggtatgagtgatggcaatgagaacgtcccatcttccagtggaaggcatgaaggaagaactacaaaacggcattaccgaaaatctgtaaggagtcgctctcgacatgaaaaaacttcacgcccaaaattaagaattttgaatgtttcaaataaaggagaccgagtagtagaatgtcaattagagactcataataggaaaatggttacattcaaatttgacctagatggtgacaaccccgaggagatagcaacaattatggtgaacaatgactttattctagcaatagagagagagtcgtttgtggatcaagtgcgagaaattattgaaaaagctgatgaaatgctcagtgaggatgtcagtgtggaaccagagggtgatcagggattggagagtctacaaggaaaggatgactatggcttttcaggttctcagaaattggaaggagagttcaaacaaccaattcctgcgtcttccatgccacagcaaataggcattcctaccagttctttaactcaagttgttcattctgcgggaaggcggtttatagtgagtcctgtgccagaaagccgattacgagaatcaaaagttttccccagtgaaataacagatacagttgctgcctctacagctcagagccctggaatgaacttgtctcactctgcatcatcccttagtctacaacaggccttttctgaacttagacgtgcccaaatgacagaaggacccaacacagcacctccaaactttagtcatacaggaccaacatttccagtagtacctcctttcttaagtagcattgctggagtcccaaccacagcagcagccacagcaccagtccctgcaacaagcagccctcctaatgacatttccacatcagtaattcagtctgaggttacagtgcccactgaagaggggattgctggagttgccaccagcacaggtgtggtaacttcaggtggtctccccataccacctgtgtctgaatcaccagtactttccagcgtagtttcaagtatcacaatacctgcagttgtctcaatatctactacatccccgtcacttcaagtccccacatccacatctgagatcgttgtttctagtacagcactgtatccttcagtaacagtttcagcaacttcagcctctgcagggggcagtactgctaccccaggtcctaagcctccagctgtagtatctcagcaggcagcaggcagcactactgtgggagccacattaacatcagtttctaccaccacttcattcccaagcacagcttcacagctgtgcattcagcttagcagcagtacttctactcctactttagctgaaaccgtggtagttagcgcacactcactagataagacatctcatagcagtacaactggattggctttctccctctctgcaccatcttcctcttcctctcctggagcaggagtgtctagttatatttctcagcctggtgggctgcatcctttggtcattccatcagtgatagcttctactcctattcttccccaagcagcaggacctacttctacacctttattaccccaagtacctagtatcccacccttggtacagcctgttgccaatgtgcctgctgtacagcagacactaattcatagtcagcctcaaccagctttgcttcccaaccagccccatactcattgtcctgaagtagattctgatacacaacccaaagctcctggaattgatgacataaagactctagaagaaaagctgcggtctctgttcagtgaacacagctcatctggagctcagcatgcctctgtctcactggagacctcactagtcatagagagcactgtcacaccaggcatcccaactactgctgttgcaccaagcaaactcctgacttctaccacaagtacttgcttaccaccaaccaatttaccactaggaacagttgctttgccagttacaccagtggtcacacctgggcaagtttctaccccagtcagcactactacatcaggagtgaaacctggaactgctccctccaagccacctctaactaaggctccggtgctgccagtgggtactgaacttccagcaggtactctacccagcgagcagctgccaccttttccaggaccttctctaacccagtcccagcaacctctagaggatcttgatgctcaattgagaagaacacttagtccagagatgatcacagtgacttctgcggttggtcctgtgtccatggcggctccaacagcaatcacagaagcaggaacacagcctcagaagggtgtttctcaagtcaaagaaggccctgtcctagcaactagttcaggagctggtgtttttaagatgggacgatttcaggtttctgttgcagcagacggtgcccagaaagagggtaaaaataagtcagaagatgcaaagtctgttcattttgaatccagcacctcagagtcctcagtgctatcaagtagtagtccagagagtaccttggtgaaaccagagccgaatggcataaccatccctggtatctcttcagatgtgccagagagtgcccacaaaactactgcctcagaggcaaagtcagacactgggcagcctaccaaggttggacgttttcaggtgacaactacagcaaacaaagtgggtcgtttctctgtatcaaaaactgaggacaagatcactgacacaaagaaagaaggaccagtggcatctcctccttttatggatttggaacaagctgttcttcctgctgtgataccaaagaaagagaagcctgaactgtcagagccttcacatctaaatgggccgtcttctgacccggaggccgcttttttaagtagggatgtggatgatggttccggtagtccacactcgccccatcagctgagctcaaagagccttcctagccagaatctaagtcaaagccttagtaattcatttaactcctcttacatgagtagcgacaatgagtcagatatcgaagatgaagacttaaagttagagctgcgacgactacgagataaacatctcaaagagattcaggacctgcagagtcgccagaagcatgaaattgaatctttgtataccaaactgggcaaggtgccccctgctgttattattcccccagctgctcccctttcagggagaagacgacgacccactaaaagcaaaggcagcaaatctagtcgaagcagttccttggggaataaaagcccccagctttcaggtaacctgtctggtcagagtgcagcttcagtcttgcacccccagcagaccctccaccctcctggcaacatcccagagtccgggcagaatcagctgttacagccccttaagccatctccctccagtgacaacctctattcagccttcaccagtgatggtgccatttcagtaccaagcctttctgctccaggtcaaggctgtgcgaagtttaactgtgcatctgaacaggtgacattcaaacctggtggcaggaggacccgatttctgagtacgccctgcttggctctttgtgtgtaa

SEQ ID NO: 158556 - DNA, 5787 bp, Homo sapiens
catttttctcaagacacttcttcagagaaaaatggttctctcagtattcactgtaagctgattgaatgctagatgtggttaatagtacacctggcaacttttacatatatgggtagaataaatagaatagccaacatggtatcaacaaaaagcttcggggtttagactgggaaaattagcatttcatgatatgactgttatgtggaagaatttttgcatttttccatttaagattggctaggaagaaattgtgttcctcctatttaaatcatctctaggtgaagataaccgacaataaagtagtattgtagagtcctgtctcttctgttggaaccagtctactacttcatttcaagaatgtggtctttatatgccctttagattattagaaagagattggctactattcttctttgctgtgtgcttcttttttttttttttgcatgtcttgctgttttgctaatttattgacccccaacctgctctaactcaccttcctcatttctgtcacagggcttcccacctcgactgccaccacagtacccaggagattcaaatattgctccctcttccaacgtggcttctgtttgcatccattctacagtcctatcccctcccatgccgacagaagtactggctacacctgggtactttcccacagtggtgcagccttatgtggaatcaaatcttttagttcctatgggtggtgtaggaggacaggttcaagtgtcccagccaggagggagtttagcacaagcccccactacatcctcccagcaagcagttttggagagtactcagggagtctctcaggttgctcctgcagagccagttgcagtagcacagccccaagctacccagccgaccactttggcttcctctgtagacagtgcacattcagatgttgcttcaggtatgagtgatggcaatgagaacgtcccatcttccagtggaaggcatgaaggaagaactacaaaacggcattaccgaaaatctgtaaggagtcgctctcgacatgaaaaaacttcacgcccaaaattaagaattttgaatgtttcaaataaaggagaccgagtagtagaatgtcaattagagactcataataggaaaatggttacattcaaatttgacctagatggtgacaaccccgaggagatagcaacaattatggtgaacaatgactttattctagcaatagagagagagtcgtttgtggatcaagtgcgagaaattattgaaaaagctgatgaaatgctcagtgaggatgtcagtgtggaaccagagggtgatcagggattggagagtctacaaggaaaggatgactatggcttttcaggttctcagaaattggaaggagagttcaaacaaccaattcctgcgtcttccatgccacagcaaataggcattcctaccagttctttaactcaagttgttcattctgcgggaaggcggtttatagtgagtcctgtgccagaaagccgattacgagaatcaaaagttttccccagtgaaataacagatacagttgctgcctctacagctcagagccctggaatgaacttgtctcactctgcatcatcccttagtctacaacaggccttttctgaacttagacgtgcccaaatgacagaaggacccaatacagcacctccaaactttagtcatacaggaccaacatttccagtagtacctcctttcttaagtagcattgctggagtcccaaccacagcagcagccacagcaccagtccctgcaacaagcagccctcctaatgacatttccacatcagtaattcagtctgaggttacagtgcccactgaagaggggattgctggagttgccaccagcacaggtgtggtaacttcaggtggtctccccataccacctgtgtctgaatcaccagtactttccagcgtagtttcaagtatcacaatacctgcagttgtctcaatatctactacatccccgtcacttcaagtccccacatccacatctgagatcgttgtttctagtacagcactgtatccttcagtaacagtttcagcaacttcagcctctgcagggggcagtactgctaccccaggtcctaagcctccagctgtagtatctcagcaggcagcaggcagcactactgtgggagccacattaacatcagtttctaccaccacttcattcccaagcacagcttcacagctgtccattcagcttagcagcagtacttctactcctactttagctgaaaccgtggtagttagcgcacactcactagataagacatctcatagcagtacaactggattggctttctccctctctgcaccatcttcctcttcctctcctggagcaggagtgtctagttatatttctcagcctggtgggctgcatcctttggtcattccatcagtgatagcttctactcctattcttccccaagcagcaggacctacttctacacctttattaccccaagtacctagtatcccacccttggtacagcctgttgccaatgtgcctgctgtacagcagacactaattcatagtcagcctcaaccagctttgcttcccaaccagccccatactcattgtcctgaagtagattctgatacacaacccaaagctcctggaattgatgacataaagactctagaagaaaagctgcggtctctgttcagtgaacacagctcatctggagctcagcatgcctctgtctcactggagacctcactagtcatagagagcactgtcacaccaggcatcccaactactgctgttgcaccaagcaaactcctgacttctaccacaagtacttgcttaccaccaaccaatttaccactaggaacagttgctttgccagttacaccagtggtcacacctgggcaagtttctaccccagtcagcactactacatcaggagtgaaacctggaactgctccctccaagccacctctaactaaggctccggtgctgccagtgggtactgaacttccagcaggtactctacccagcgagcagctgccaccttttccaggaccttctctaacccagtcccagcaacctctagaggatcttgatgctcaattgagaagaacacttagtccagagatgatcacagtgacttctgcggttggtcctgtgtccatggcggctccaacagcaatcacagaagcaggaacacagcctcagaagggtgtttctcaagtcaaagaaggccctgtcctagcaactagttcaggagctggtgtttttaagatgggacgatttcaggtttctgttgcagcagacggtgcccagaaagagggtaaaaataagtcagaagatgcaaagtctgttcattttgaatccagcacctcagagtcctcagtgctatcaagtagtagtccagagagtaccttggtgaaaccagagccgaatggcataaccatccctggtatctcttcagatgtgccagagagtgcccacaaaactactgcctcagaggcaaagtcagacactgggcagcctaccaaggttggacgttttcaggtgacaactacagcaaacaaagtgggtcgtttctctgtatcaaaaactgaggacaagatcactgacacaaagaaagaaggaccagtggcatctcctccttttatggatttggaacaagctgttcttcctgctgtgataccaaagaaagagaagcctgaactgtcagagccttcacatctaaatgggccgtcttctgacccggaggccgcttttttaagtagggatgtggatgatggttccggtagtccacactcgccccatcagctgagctcaaagagccttcctagccagaatctaagtcaaagccttagtaattcatttaactcctcttacatgagtagcgacaatgagtcagatatcgaagatgaagacttaaagttagagctgcgacgactacgagataaacatctcaaagagattcaggacctgcagagtcgccagaagcatgaaattgaatctttgtataccaaactgggcaaggtgccccctgctgttattattcccccagctgctcccctttcagggagaagacgacgacccactaaaagcaaaggcagcaaatctagtcgaagcagttccttggggaataaaagcccccagctttcaggtaacctgtctggtcagagtgcagcttcagtcttgcacccccagcagaccctccaccctcctggcaacatcccagagtccgggcagaatcagctgttacagccccttaagccatctccctccagtgacaacctctattcagccttcaccagtgatggtgccatttcagtaccaagcctttctgctccaggtcaaggtaataaagcaaccatcatcgtccaaaaacaataaaatggagatgttgccatacctgggacaaaagcctgttaaggcgggttgggagactagctgaccagaacacagcctgtgtgttgtacactgaagaatctgggtgaaaagggaagtggagtgataatgagaatcggtgggctcactgctcccattaggtgaaattactttttttcaaggaattacagtgaaaagttacatctgtgtggcctatatgacttgctcatttgggatttggaacttaggctttaatattaggctgagatttcctggatgaaattctaaggtgttttagcagtttctgaagctaatacattttcttagccattgtagaattttgttacttttaagtatgggagtggcatactaaaatgaataaccttacaattcagttttttatccataatctactttccaaatatagctctgtttattagtgattgctgaaaaaattcccacagaggaaagagcttttagtcatattagaacaagaattgaaaagacttgggcatctgggtgagaagaatgaaaaaaatataggtactggcttatgtgcctttgccacagtttcacagaaattagagatcagtctcttcacaggaagaatgcacttgattggtaaggagggcaaactagctagcattattcgaactaagaaaagcttccgcattttgcagatgggtagaattaagacctaatatttcatctcttacatatctgaccttccccccagaagcttgttcttctgtgtgccatcttagtgcatttcaccactccagcctcaagtttctaacatcttgtagttgtgttctgtctcttctcctctctctgttctaccctgtttttcccctctcacaggctgtgcgaagtttaactgtgcatctgaacaggtgacattcaaacctggtggcaggaggacccgatttctgagtacgccctgcttggctctttgtgtgtaacacctttactccttccttgtccttgtgtttctgctgcttggatctgatgtttcacgcagtccattttcatttgtctctttttgtatatcatctactcagtggcttggctgaattactgttaccctcagaagtttgggcccccacattaattatgataaaaaatgtcaaaataacaagttatctacaaatttcaatgtaactttctggtagaagtgcttcttcatggatctgtgacagagagtggatatggtatctaggcaatagattgctgggtcatttagaataatgaagactgaactccacagtcgtagtcagtgctgtctgtctgccctagcattagaaatgagagaaatcagccagacacggtggcgtacacctgtaatcccagcactttgggaggccgaggcgggaagattgcttgaggccaggagctcgagaccaaccctgggcaacatggtgataccccatctct

SEQ ID NO: 158557 - DNA, 236 bp, Homo sapiens; identical to SEQ ID NO: 66465

SEQ ID NO: 158558 - DNA, 638 bp, Homo sapiens
tgaggcaggagaattgcttgaaccggggaccccaggaggcggaggttgccagtgagctgagatcgcgcccactgcactcccagcccgggctacagagccgagactctgtcctcaaaaaataaataaataaataaatgaaaaagagaaaatattgagaggatttggtcatcattttactgctctcttcatgtgatggaaatcaattttccttctcaaatgggatcagtatcatttcctagtccatacatcccatccagtttttgttacttttttgttggcctacattaggcaaaatagctctgcttcattgaggcatgcagtcctcagactctcggtggaaaggctgtcatactattagtgaccatactaactttttataccaaaggatggttgctggataattttaatatctttaccaataaagtactttttggaaatacaaaatcaggctgcttgctttgctctattcctgtcaacaaaaaggatttagctatagatttagcttctccttttattttcccttttatttcataggagtcttctgtttattcctttcaggcgcctccttggcattataacaaaaaaagatatcctccggcatatggcccagacggcaaaccaagaccccgcttcaatat

SEQ ID NO: 158559 - DNA, 2983 bp, Homo sapiens; identical to SEQ ID NO: 158286

SEQ ID NO: 158560 - DNA, 433 bp, Homo sapiens
ccgactgagggtcttcctgtccctcatggagactggctggtttgataaccttctcctggacatagacaaagctgatgccattgtcaagatgctggatgcagccgtgattaagatggaaggaggcacggagaatgatctccgcatcctggagcaggaggaggaggaggagcaggcaggaaagcctggggagcccagcaagaaagaagaaggacgggctggagcaggcctaggggacggggagcgcaaaaccaacgacaaagactccgagaaggaagccaaaaagagtagcaagaagcggaaccggaagcacagtggtgacgacagctttgacgagggcagcgtgtcagagtctgagtcggagtcagagagcggccaggctgaggaggagaaggaggaggccgaagcgctcaaggagaaggagaagcccaaggaa

SEQ ID NO: 158561 - DNA, 3547 bp, Homo sapiens
atgaagctttgcttgcccattgctcagctcctgctgtgtggcccagttcctaacaggccatggctggcggctgagggccctggtattacagcatcaggagctagagtaggaccgagcccgattcccaccttccaggtgcccctgagccagcctccagaggatgagctggataggctgacgaagaagctggttcacgacatgaaccacccgcccagcggggagtactttggccagtgtggtggctgcggagaagatgtggttggggatggggctggggttgtggcccttgatcgcgtctttcacgtgggctgctttgtatgttctacatgccgggcccagcttcgcggccagcatttctacgccgtggagaggagggcatattgcgagggctgctacgtggccaccctggagaaatgtgccacgtgctcccagcccatcctggaccggatcctgcgggctatggggaaggcctaccaccctggctgcttcacctgcgtggtgtgtcaccgcggcctcgacggcatccccttcacagtggatgctacgagccagatccactgcattgaggactttcacaggaagtttgccccaagatgctcagtgtgcggtggggccataatgcctgagccaggtcaggaggagactgtgagaattgttgctctggatcgaagttttcacattggctgttacaagtgcgaggagtgtgggctgctgctctcctctgagggcgagtgtcagggctgctacccgctggatgggcacatcttgtgcaaggcctgcagcgcctggcgcatccaggagctctcagccaccgccccctcagaccgtgccatgggtgacagtgatgacgagtacgatcgaaggcgcagggacaagttcagaagagagcgcagcgactacgaccgttcccgcgagagagatgaaagacgtcgaggggacgattggaatgacagagagtgggaccgtggccgtgagcgccgtagtcggggtgaatatcgggactatgaccggaatcggcgagagcgcttctcgccacctcgccacgaactcagcccgccacagaagcgcatgaggagagactgggatgagcacagctctgacccataccacagtggctatgagatgccctatgctgggggggggtgggggcccaacttatggcccccctcagccctggggccaccctgacgtccacatcatgcagcaccatgtcctgcctatccaggccaggctgggcagcattgcagagattgacctgggtgtgccgccgcccgtgatgaagaccttcaaggagtttctcctctccctggatgactcggtggatgagacggaggccgtcaagcgctataatgactacaagctggatttccggaggcaacagatgcaggatttcttcctggcgcacaaagatgaggagtggtttcggtctaagtaccacccagatgaggtggggaagcgtcggcaggagacgccggggggccctgcaaaaccgactgagggtcttcctgtccctcatggagacttggcttggtttgataaccttctccttggacattagacaaagctgattgccattgtcaagatgctggatgcagccgtgattaagatggaaggaggcacggagaatgatcttcgcatcctggagcaggaggaggaggaggagcaggcaggaaagcctggggagcccagcaagaaagaagaaggacgggctggagcaggcctaggggacggggagcgcaaaaccaacgacaaggatgagaagaaggaagacggcaagcaggctgagaatgacagttctaatgatgacaaaacaaagaagtcggagggtgatggggacaaggaagagaagaaagaagactccgagaaggaagccaaaaagagtagcaagaagcggaaccggaagcacagtggtgacgacagctttgacgagggcagcgtgtcagagtctgagtcggagtcagagagcggccaggctgaggaggagaaggaggaggccgaagaagcgctcaaggagaaggagaagcccaaggaagaagaatgggagaagcccaaggacgccgcggggctggagtgcaagccgcggccgctgcataagacctgctccctcttcatgcgcaacatcgcgcccaacatctcccgggccgagatcatctccctttgtaaaaggtacccaggctttatgcgggtggcgctctcagagccccagccagagaggaggtttttccgtcgtggctgggtgaccttcgaccgcagtgttaacattaaagagatctgttggaacctgcagaacatccgtggagctcgcagtctgatcaatcgctggtgctcaagagggaagggtcttagagctgctgtttctctggcaagcgggctccgggagtgtgagctgagccctggtgtgaacagggacctgacccggcgcgttcgcaacatcaacggcatcacccagcacaagcagattgtgcgcaacgacatcaagctggcggccaagctgatccacacgctggatgacaggacacagctttgggcctcagaaccagggacgcctcccctgcccacgagcctgccctcgcaaaacccgatcttgaagaatatcaccgactacctgatcgaggaagtaagcgccgaggaggaggagctgctggggagcagcgggggcgctcctcctgaggagcctcctaaggaagggaacccggcagagatcaacgtggagcgggatgagaagttgattaaggtcttggacaagctcctcctttacctgcgcatcgtgcattccttggattattacaacacctgtgagtaccccaacgaggacgagatgcccaatcgctgtgggatcatccacgttcgggggcccatgccacccaaccgcatcagtcacggggaagtgctggagtggcagaagacttttgaggagaagctcacgccgttgctgagtgtgcgggagtcactctcagaggaagaggcccagaagatggggcgcaaagacccagagcaggaagtggagaagttcgtcacctccaacacgcaggaactgggcaaggataagtggctgtgtcctctcagtggcaagaaattcaagggtcctgagtttgtgcgcaaacatatcttcaacaagcatgcagagaaaattgaggaagtgaaaaaggaagtcgcgttttttaacaacttcctcactgatgctaagcgcccagctctgcctgagatcaagccagcccagccacctggccccgcccagataattcatgtccctgtccgtgttgtactccccccaggtttgaccccaggactcccctacccacaccagactccccagggcctgatgccctatggtcagccccggcccccgatcttgggctatggagtccccacaggaggccctccatacccccatgccccgtatggtgctggtcgagggaactatgatgccttccgaggccagggaggttatcctgggaaacctcgcaacaggatggttcgtggagacccaagggccattgtggaatatcgggacctggatgccccagacgatgtagatttcttttga

SEQ ID NO: 158562 - DNA, 486 bp, Homo sapiens
tgatactggacagaaaggcttgcctggccctcctggcccccctggctatggatcacagggaattaaaggggaacaaggaccacaaggcttcccaggcccaaagggcacaatgggccatggcctcccaggccagaagtgtaaagggagagcacggagaacggggcgatgtgggaaagaaaggtgataaaggagaaattggagagcctggatctccaggaaaacagggtttacaaggacccaaaggagacctaggacttacaaaagaagaaattatcaaacttattacagaaatatgtggttgtgggcccaaatgcaaagagactccactagagctggtgtttgtgatcgacagctcagaaagcgtggggccagagaactttcagatcattaaaaattttgtgaagactatggctgaccgggttgctctggaccttgccacggcccgcataggcataatcaactatagccataaggtggagaaggtgg

SEQ ID NO: 158563 - DNA, 1000 bp, Homo sapiens
atggctgtgatgctgcactctgccaagtggcctctccctgtgctccagcagggcctcaccatgcagcctcctctgccttccaagcacatcagcgagagaagcgaagaagattcccgccagcccctgtactctgtaattctcatcttctatgaagcagggtttgcaatcctagtctttgataaaacagactttcagccaaaaaaggtcaaaagagacaaagaagggcattacataatggtaaagggatcaatgcaacaagaagagctgactatcctaaatatatatgcacccaatacaggagcatccagcttcataaagcaagttcttggagacccacaaagagacttagactcccacacaataatagtgggagactttaacaccccactgtcaatattagacagattaatgagacagaaaattaacaaggatattcaggacttgaactcagctctggaccaagtggacctaatagatatctacagaactcttcaccccaaatcaacagaatatacattcttctcagcaccacatcacacttattctaaaattgaccacataattggaagtaaaacactcctcagcaaatgcaaaagaacagaaatcataacaaacagtctctcagaccacagtgcaattaaattagaactcaggattgagaaattcactcaaaaccacacaactacatggaaattgaacaacctgcccctgaatgactactgggtaaataatgaaattaaggcagaaataaataagttctttgaaacaaatgagaacagagacacaatgtaccagaatctctgggacacagctaaagcagtgtttagagggaaatttatagcactaaaatggccacaggagaaagtaggaaagatctaaaatcaacaccctaacattgcaattaaaagaactagagaagcaagagcaaacacattcgaaagctagcagaagacaagaaataactaagatcagagcagaactgaaggagatagattcatga

SEQ ID NO: 158564 - DNA, 1758 bp, Homo sapiens
atgaactcagctctggaccagctggacctaatagacatctacagaaccttccaccccaaatcagcagaatatgcattcttctcagcactacatcacccttattctaaaattgagcacataattggaagtaaaacactcctcagcaaatgcaaaagaatggaaatcataacaaacaatctctcagaccacagtgaaatcaaattagaactcaggattaagaaactcactcaaaaccgcacatctacatggaaactgaacaacctgctgctgaatgactactgggtaaataacgaaattaaggcagagataaataagttctttgaaaccaaggagaacaaagatacaagctgcgctccttcctccaggttagaagtccttggggccaaagggcatgcacatatgttcctctatgccacactctggatgcatgcaattccagaattctcagttgaaatggccacagcctggtcagagtctgcctccttggaccacagtcccatcctcagtttcctgccccaggaattcccagcagatcgagatggttccttggctctccatagcacttatgaaagtcttcgtttgtctgcttcttcctggactgtgaatcctttgaggggtataaatatgatgccttcatcattggcaccaagtagccaaggttgtgggcccaaatgcaaagagactccactagagctggtgtttgtgatcgacagctcagaaagcgtggggccagagaactttcagatcattaaaaattttgtgaagactatggctgaccgggttgctctggaccttgccacggcccgcataggcataatcaactatagccataaggtggagaaggtggctaatttgaagcagttctccagcaaggatgacttcaagttggctgtggacaacatgcagtatctgggggaaggcacatacacagccactgctctgcaagcagccaacgacatgtttgaagatgcaaggccaggtgtaaaaaaagtggccttggtcatcactgatggacagacagattctcgtgataaagagaaactgacagaggtggtgaagaatgccagtgacaccaatgtggagatatttgtgataggggtggtgaagaaaaatgatcccaactttgaaatattccacaaagaaatgaatctaattgctactgacccagagcatgtttaccagtttgatgatttctttaccctgcaagacaccctgaagcaaaaattgtttcaaaaaatttgtgaggattttgattcctatctcgttcaaatttttggttcatcgtcacctcaacctggatttgggatgtcaggggaagaactcagtgaatctactccagagcctcaaaaagaaatttctgagtcattgagtgtcaccagagaccaggatgaagatgataaggctccagagccaacgtgggctgatgatctgcctgccactacctcatctgaggccaccaccacccccaggccactgctcagcacccctgtggatggggcagaggatcctagatgtttggaagccttgaagcctggaaactgtggtgaatatgtggttcgatggtattatgacaaacaggtcaactcttgtgcccgattttggttcagtggctgtaatggctcaggaaatagattcaacagtgaaaaggaatgtcaagaaacctgcattcaaggatgagcaagtaaattggcctgtctctatcaaaagcatagaactccctaatttccacatattcacccaatacaaatacagcactat

SEQ ID NO: 158565 - DNA, 361 bp, Homo sapiens
ggcacgagggacttaaaatgttgcatactacccccatagctacagcttgcctggatgccgacttgtacttactgacagaagtgcactgcccaaaggaactgggtgcctgtatgccaactggtctgacagttgacagagctactgatgctggggacggtgctttagtgctctcgaaaaggcgcagtcaggccctgatcattaccttacgggctgaaggatgtgtgatgctgccccaaaccgatcctgagcctgagctcattgccacagataatggcaaggctgcggataccacggatgctggtgacagctttgtgggagctctggccttctacctggcttactatccaaatctgtccttgga

SEQ ID NO: 158566 - DNA, 304 bp, Homo sapiens
  misc_feature (1)...(304): n = a,t,c or g
tcccagagctacgggctgagttgtttgagtctcttcaagagcaacctggggccctgcctgtgccaggcccttcccgtagcgcccccagcagtcctgctcctcgccgtaccaaacaggtaagcagtgggtggaccgcactgagggacccggatcaggctgaaggctgctgcnnnnnnnnnnnnnnnnnnnnnnnnnnnnnnnnnnnnnnnnnnnnnnnnnnnnnnnnnnnnnaggagtttaaatgtgcttggcacataagcaaccctgtataaacattagttgctattatcactgtcattatcac

SEQ ID NO: 158567 - DNA, 326 bp, Homo sapiens
aaaatacttctcagtaccatggcgtgggatatacaggcttagggtgtgaaacggacatcgatgagtgcaggccactgccttgcctcaacaatggagtttgtaaagacctagttggggaattcatttgtgagtgcccatcaggttacacaggtcagcggtgtgaagaaaatataaatgagtgtagctccactccttgtttaaataaaggaatctgtgctgatggtgtggctggctatcgttgcacatgtgtgaaaggattggcacgtaatatgattcccatgtttctatggtgtcttacaaacttgtacaccaccgcatattattac

SEQ ID NO: 158568 - DNA, 265 bp, Homo sapiens
  misc_feature (1)...(265): n = a,t,c or g
atcagaagtcaactcaatgaaaaggtagcacagctgtatgcagatttggatggaggtttcttccttcccaccctgctcttcccnnnnnnnnnnnnnnnnnnnnnnnnnnnnnnnnnnnnnnnnnnnnnnnnnnnnnnnnnnnnnnnnnnnnnnnnnnnnnnnnnnnnnnnnnnnnnnnnnnnnnnnnnnnnnnnnnnnnnnnnnnnnnnnnnnnnnnnnnnnnnnnnnnnnnnnnnnnnnnnnnnnnnnnnnnnnnnnnnnnnnn

SEQ ID NO: 158569 - DNA, 372 bp, Homo sapiens
gtcagtatcagacaagggggggatttcacccgcagcgattgctaaggagtgtcaggtacagatagcgtaccatgatcagaaaaggcaggtcgtaccagtttcgacaagggggttcaacaataagcatctccgtgagtcactgtgtagtgatcctctgaaagagaccaactctgatgagcagcattccacttcggctttaactgaagtagaaatgaaccagcctcaacatgccacagagttaatggtgacttctgatcatattgtacctggtgatatggcccgggaaccagtagaagaaacaacaaaatcccccagtgatgtaaacatttctgctcaaccagctctttcaaattttataagccagctcgtgcc

SEQ ID NO: 158570 - DNA, 352 bp, Homo sapiens
ggcacgaggggaaacagcgatgagctcgatgagccgatcaagactgtgtttgccgatgtggcttttgtcaagaagcacaatctgatgagcctgaattcgatcaactggtcccgggtcctggtgcagatggcccatcacttctttgcttacttccagtgtacgccatccttggacacacatcccctacccctgctggtcgtatctctcttcttctctacatatctctttcatacctttttcgtcactcctctatttctaatatttttgtcttcctcttctcattttcacttatctatctatctctcttctatcattctttcttctcattcattttcttcgtacaccattcttc

SEQ ID NO: 158571 - DNA, 395 bp, Homo sapiens
  misc_feature (1)...(395): n = a,t,c or g
ggcacgaggcagcaaatgttgtaaacatcctgaagcaaaaagaatgccctgtgcagaagactatctatccgtggtcctgaannnnttatgtgtgttgcatgagaaaacgccagtaagtgacagagtcaccaaatgctgcacagaatccttggtgaacaggcgaccatgtttttcagctctggaagtcgatgaaacatacgttcccaaagagtttaatgctgaaacattcacctttcatgcagatatatgcacactttctgagaaggagagacaaatcaagaaacaaactgcacttgttgagctcgtgaaacacaagcccaaggcaacaaaagagcaactgaaagctgttatggatgatttcgcagcttttgtacagaagtgctgcaaggctgaca

SEQ ID NO: 158572 - DNA, 15974 bp, Homo sapiens
gcacaatgaagtgggtaacctttatttcccttctttttctctttagctcggcttattccaggggtgtgtttcgtcgagatgcacgtaagaaatccatttttctattgttcaacttttattctattttcccactaaaataaagttttagtaaactctgcatctttaaagacttattttggcatttatttctaaaatggcatcgtattttgtatttgtgaagtcttacaaggttatcttattaataaaattcaaacatcctaggtaaaaaaaaaaaaaggtcagaattgtttagtgactgtaattttcttttgcgcactaaggaaagtgcaaagtaacttagagtgactgaaacttcacagaatagggttgaagattgaattcataactatcccaaagacctatccattgcactatgctttatttaaaaaccacaaaccctgtgctgttgatctcataaatagaacttgtatttatatttattttcattttagtctgtcttcttggttgctgttgatagacactaaaagagtattagatattatctaagtttgaatataaggctataaatatttaataatttttaaaatagtattcttggtaattgaattattcttctgtttaaaggcagaagaaataattgaacatcatcctgagtttttctgtaggaatcagagcccaatattttgaaacaaatgcataatctaagtcaaatggaaagaaatataaaaagtaacattattacttcttgttttcttcagtatttaacaatccttttttttcttcccttgcccagacaagagtgaggttgctcatcggtttaaagatttgggagaagaaaatttcaaagccttgtaagttaaaatattgatgaatcaaatttaatgtttctaatagtgttgtttattattctaaagtgcttatatttccttgtcatcagggttcagattctaaaacagtgctgcctcgtagagttttctgcgttgaggaagatattctgtatctgggctatccactaaggtcgtcactggtcacatggctattgagtacttcaaatatgaccagtgcaactgagaaacaaaaacttaaattgtatttaattgtagttaatttgaatgtatatagtcacatgtggctaatggctactgtattggacagtacagctctggaacttgcttggtggaaaggactttaatataggtttcctttggtggcttacccactaaatcttctttacatagcaagcattcctgtgcttagttgggaatatttaatttttttttttttttaagacagggtctcgctctgtcgcccaggctggagtgcagtggcgcaatctcggctcactgcaaactccgctcccgggttcacgccattctcctgcctcagcctcccgagtagctgggactacaggcgcccgccatcacgcccggctaatcttttgtatttttagtagagatggggtttcaccgtgtgccaggatggtctcaatctcctgacatcgtgatctgcccacctcggcctcccaaagtgctgggattacaggagtgagtcaccgcgcccggcctatttaaatgttttttaatctagtaaaaaatgagaaaattgtttttttaaaagtctacctaatcctacaggctaattaaagacgtgtgtggggatcaggtgcggtggttcacacctgtaatcccagcactttggaaggctgatgcaggaggattgcttgagcccaggagtacaagaccagcctgggcaagtctctttaaaaaaaacaaaacaaacaaacaaaaaaattaggcatggtggcacatgcctgtagtcctagctacttaggaggctgacgtaggaggatcgtttggacctgagaggtcaaggctacagtgagccatgattgtgccactgcactccagcctgggtgacagagtgagactctgtctcaaaaaagaaaaaggaaatctgtggggtttgttttagttttaagtaattctaaggactttaaaaatgcctagtcttgacaattagatctatttggcatacaatttgcttgcttaatctatgtgtgtgcatagatctactgacacacgcatacatataaacattagggaactaccattctctttgcgtaggaagccacatatgcctatctaggcctcagatcatacctgatatgaataggctttctggataatggtgaagaagatgtataaaagatagaacctatacccatacatgatttgttctctagcgtagcaacctgttacatattaaagttttattatactacatttttctacatcctttgtttcagggtgttgattgcctttgctcagtatcttcagcagtgtccatttgaagatcatgtaaaaattagtgaatgaagtaactgaatttgcaaaaacatgtgttgctgatgagtcagctgaaaattgtgacaaatcacttgtaagtacattctaattgtggagattctttcttctgtttgaagtaatcccaagcatttcaaaggaattttttttaagttttctcaattattattaagtgtcctgatttgtaagaaacactaaaaagttgctcatagactgataagccattgtttcttttgtgatagagatgctttagctatgtccacagttttaaaatcatttctttattgagaccaaacacaacagtcatggtgtatttaaatggcaatttgtcatttataaacacctctttttaaaatttgaggtttggtttctttttgtagaggctaatagggatatgatagcatgtatttatttatttatttatcttattttattatagtaagaacccttaacatgagatctaccctgttatatttttaagtgtacaatccattattgttaactacgggtacactgttgtatagcttactcatcttgctgtattaaaactttgtgcccattgattagtaacccctcgtttcgtcctcccccagccactggcaaccagcattatactctttgattctatgagtttgactactttagctaccttatataagtggtattatgtactgtttatctttttatgactgacttatttcccttagcatagtgcattcaaagtccaaccatgttgttgcctattgcagaatttccttcttttcaaggctgaataatattccagtgcatgtgtgtaccacattttctttatccattaatttgttgattgatagacatttaggttggttttctacatcttgactatcatgaatagtgttgcaatgaacacaggagagctactatctcttagagatgatatcatggtttttatcatcagaaaacacccactgatttctatgctaattttgttacctgggtggaataatagtacagctatatattcctcattttagatatctttgtatttctacatacaataaaaaagcagagtacttagtcatgttgaagaactttaaacttttagtatttccagatcaatcttcaaaacaaggacaggtttatctttctctcaccactcaatctatatatacctcttgtgggcaaggccagtttttatcactggagcctttcccctttttattatgtacctctccctcacagcagagtcaggactttaactttacacaatactatggctctacatatgaaatcttaaaaatacataaaaattaataaattcbgtctagagtagtatattttccctggggttacgattactttcataataaaaattagagataaggaaaggactcatttattggaaagtgattttaggtaacatttctggaagaaaaatctctatatcttaatagtcacttaatctatgatggattgtgttactcctcagttttcaatggcatatattaaaacatggccctctaaaaagggggcaaatgaaatgagaaactctctgaatgtttttctcccctaggtgaattcacctgctgcttagaagcttattttctcttgatttctgttataatgattgctcttaccctttagttttaagtttcaaaataggagtcatataactttccttaaagctattgactgtctttttgtcctgttttattcaccatgagttatagtgtgacagttaattcttatgaaaattatatagagatggttaaatcatcagaaactgtaaaccaacgattgggaggggaagcggatttttaaatgatttcctgaccaagcttaaccagtatattaaatcctttgtactgttctttggctataaagaaaaaaggtactgtccagcaactgaaacctagctttcttccatttagcataccctttttggagacaaattatgcacagttgcaactcttcgtgaaacctatggtgaaatggctgactgctgtgcaaaacaagaacctgagagaaatgaatgcttcttgcaacacaaagatgacaacccaaacctcccccgattggtgagaccagaggttgatgtgatgtgcactgcttttcatgacaatggagagacatttttgaaaaagtaagtaatcagatgtttatagttcaaaattaaaaagcatggagtaactccataggccaacactctataaaaattaccataacaaaaatattttcaacattaagacttggaagttttgttatgatgattttttaaagaagtagtatttgataccacaaaattctacacagcaaaaaatatgatcaaagatattttgaagtttattgaaacaggatacaatctttctcaaaaatttaagatagacaaattctttaatgtattccgcagatatgtatatatggttgttataattgatttcgttttagtcagcaacattatattgccaaaatttaaccatttatgcacacacacacacacacacacacacttaacccttttttccacatacttaaagaatgacagagacaagaccatcatgtgcaaattgagcttaattggttaattagatatctttggaatttggaggttctggggagaatgtcgattacaattatttctgtaatattgtctgctatagaaaagtgactgtttttcttttttaaaatttagatacttatatgaaattgccagaagacatccttacttttatgccccggaactccttttctttgctaaaaggtataaagctgcttttacagaatgttgccaagctgctgataaagctgcctgcctgttgccaaaggtattatgcacacgaatagaaaaaaagagtttattatccaacctgattttgtccattttgtggctagatttagggaccctgagtgtctgatacaaactttcccacatggtcaaaaaagccttccttttatctgtcttgaaaatctttcatctttgaaggcctacactctcgtttcttcttttaagatttgccaatgctgatctgtcagaggtaatcactgtgcatgtgtttaaagatttcaccactttttctgctggtgatcactatagtgaaatactgaaacttgtttgtcaaattgcacagcaaggggacacagttcttgtttatcttttcatgataatttttagtagggagggaattcaaagtagagaattttactgcatctagatgcctgagttcatgcattcattccataaatatatattatggaatgctttattttcttttctgaggagtttactgatgttggtggaggagagactgaaatgaattatacacaaaatttaaaaattagcaaaattgcagcccctgggatattagcgtactctttctctgacttttctcccacttttaaggctctttttcctggcaatgtttccagttggtttctaactacatagggaattccgctgtgaccagaatgatcgaatgatctttccttttcttagagagcaaaatcattattcgctaaagggagtacttgggaatttaggcataaattatgccttcaaaatttaatttggcacagtctcatctgagcttatggaggggtgtttcatgtagaatttttcttctaattttcatcaaattattcctttttgtagctcgatgaacttcgggatgaagggaaggcttcgtctgccaaacagagactcaagtgtgccagtctccaaaaatttggagaaagagctttcaaagcatggtaaatacttttaaacatagttggcatctttataacgatgtaaatgataatgcttcagtgacaaattgtacatttttctgtattttgcaaagtgctgtcaaatacatttctttggttgtctaacaggtagcactctaatagaggtcaaaatcagaatatcaatgacaatttgacattatttttaatcttttcttttctaaatagttgaataatttagaggacgctgtcctttttgtcctaaaaaaagggacacatatttaagttctatttatttataaaatcttggactcttattctaatggttcattatttttatagagctgtaggcatggttctttatttaattttttaaagttatttttaatttttgtggatatagagtaggtatacatatttacggggtatatgagatattttgatctaagtatacaacatatataatccctttatttaattttatcttccccccaatgatctaaaactatttgcttgtccttttctgtcttatagttaaattcagtcaccaactaagttgaagttacttcttatttttgcatagctccagctctgatcttcatctcatgtttttgcctgagcctctgttttcatattacttagttggttctgggagcatactttaatagccgagtcaagaaaaatactagctgccccgtcacccacactcctcacctgctagtcaacagcaaatcaacacaacaggaaataaaatgaaaataatagacattatgtatgctctctagaaactgtcaattgaactgtatttgctcatcattcctaccatctacaccaccaaaatcaacccaatttatgaaaaaaaaaccgccccaccatacaattctacacagataaacaggctatgattggttttgggaaagcagtcacctttacctgatttaggcaactgtgaaatgactagagaatgccgaaaattagacgtttacatcttgtcatagactttgcagatagtgctggatctttctttttataagtaagatcaataaaaactccctcattctgtagaagttatgatttcttttctaagagacctttagaagtcagaaaaaatgtgtttcccttgcgaaaaaagataactggagtttgtgtagtacttcccagattataaaatgcttttgtatgtattatctaatttaatcctcaaaacttcttcaatttagcatgttgtcatgacactgcagaggctgaagctcagagacgctgagccctctgctaacaagtcctactgctaacaagtgataaagcccgagctggaagtcacatctggactccaaacctgatgcttctcagcctgttgccccttttagagttcctttttaatttctgcttttatgacttgctagatttctacctaccacacacactcttaaatggataattctgccctcaggataagtgattaccatttggttcacaactcgaactaatgaattttaaaaattatttctgtatgtccattttgaattttcttatgagaaatagtatttgcctagtgttttcatataaaatctcgcatgataataccattttgattggcgattttctttttagggcagtagctcgcctgagccagagatttcccaaagctgagtttgcagaagtttccaagttagtgacagatcttaccaaagtccacacggaatgctgccatggagatctgcttgaatgtgctgatgacagggtaaagagtcgtcgatatgctttttggtagcttgcatgctcaagttggtagaatggatgcgtttggtatcattggtgatagctgacagtgggttggattgtcttctgtgctttcgtctgtcctatcttcaatctttccctgcctatggtggtggtacctttctgtttttaacctgctataaattaccagataaacccattcactgatttgtaactcctttcagtcatgctctaactgtaaatgaaggcttaaactgaagtagaacagttacaaggttttacttggcagaacatcttgcaaggtagatgtctaagaagatttttttttctttttttaagacagagtttcgctcttgtttcccaggctggggtgcaatggtgtgatcttggctcagcgcaacctctgcctcctgggttcaagtgattttcatgcctcagcctcccaagtagctgggattacaggcatgcgccaccacacctggctaattttgtatttttagtagaggcggggtttcaccatattgtccagactggtctcgaactcctgacctcaggtgatccacccgccttggcctcccaaagtgctgggattacaggcatgagccaccttgcccagcctaagaagattttttgagggaggtaggtggacttggagaaggtcactacttgaagagatttttggaaatgatgtatttttcttctctatattccttccctaaattcactctgtttgttagatgtgcaaatatttggaatgatatctcttttctcaaaacttataatattttctttctccctttcttcaagattaaacttatgggcaaatactagaatcctaatctctcatggcactttctggaaaatttaaggcggttattttatatatgtaagcagggcctatgactatgatcttgattcatttttcaaaaatcttctatattttatttagttatttggtttcaaaaggcctgcacttaattttgggggattatttggaaaaccagcattgagttttaatgaaaaaaacttaaatgccctaacagtagaaatataaaattaataaataactgagctgagcacctgctactgattagtctattttacttccgtgggaatgtttttgtagtcctatctccatctccaggtttaggagcaaacagagtatgttcatagaaggaatatgtgtatggtcttagaatacaatgaacatgttctgccaacttaataaaggtctgaggagaaagtgtagcaatgtcccttcgtgttgaacaatttccaccaacttacttataggcgccccttgccccgtatatctgtgaaaatcaagattcgctctccagtaaactgaaggaatgctgtgaaaaacctctgttggaaaaatcccactgcattgccgaagtggaaaatgatgagatgcctgctgacttgccttcattagctgctgattttgttgaaagtaaggatgtttgcaaaaactatgctcaggcaaacgatgtcttcctgggcatgtacgtagataagaaattattcttttatagctttggcatgacctcacaacttaggaggatagcctaggcttttctgtggagttcctacaatttccctgctgcccacaatgtttcttcctccttccctttcccacgctttcccaatttttgacatcgttaattcgttgaatacattgtcataacataatacatgttcacggcaaagctcaacattccttactccttaggggtatttctgaaaatacgtctagaaacattttgtgtatatataaattatgtatacttcagtcattcattccaagtgtatttcttgaacatctataatatatgtgtgtgactatgtattgcctgtctatctaactaatctaatctaatctagtctatctatctactctatgcaatgatagcaaagaagtataaaaagaaatatagagtctgacacaggtgctttatatttggtgaaaagaccagaagttcagtatcctggcaatatggtaggcaactcaattacaaaataaatgtttacgtattgtcagaagttgtggtgataaactgcatttttgttgttggattatgataatgcactaaataatatttcctaaaattatgtaccctacaagatttcactcatacagagaagaaagagaatattttaagaacatatctctgcccatctatttatcagaatccttttgagatgtagtttaaatcaaacaacctgttaataaaaataacaagtatcattcatcaaagacttcatatgtgccaagcagtgtgtgttttgtgtagattatgtcatatagttctcataatccaccttccgagacagatactatttattttttgagacagagttttactcttgttgcccaggctggagtgcaatggtgccatctcggctcactataaccttcgcctcccaggttcaagcgattctcctgcctcagcctcctgggattacaggcatgcaccaccatgcctggctaattttgtatttttactagagatggggtttcaccatgttggtcagactggtctcaaactcctgacctctggtgatatgcctgcctcagcctcctaaagtgctgggattacaggcatgagccactgtgcccagccgacagatactattattatttccattctaccgagaaggagactaaggctctgatcatttaaataagttgcctaaggtgatgcagtgatataagtagcagagctaggaattgagccttggtaactttaactctggaccccaagtccttagctactaagctttactgcatggggtttagtcaaattaagacttttggaatatgcgttacttttgagattagctttgtgatattttttgtgctcatttgtccaacaaagtctattttattttcatcttaattcgctttttgtatgaatatccaagaaggcatcctgattactctgtcgtgctgctgctgagacttgccaagacatatgaaaccactctagagaagtgctgtgccggtgcagatcctcatgaatgctatgccaaagtggtaggtttattgttcgcaaaaaatgtagttctttgactgatgattccaataatgagaaagaaaaataatgcaagaatgtaaaatgatatacagtgcaatttagatcttttcttgagatcgtttcaattctggaatcttaaacatgaaagaaaaagtagccttagaatgattaacaaaatttagactagttagaatagaaagatctgaatagagcaatctctacacacttttgatctttttttctctttttcacaatcctgagaacaaaaaaaaattaaatttaaatgttaattagaagatatttaacttagatgtaaagtgagttaacctgattccaggattcatcacgtactagaattagtatcttatggtaaattatagaacctatccctttagaatattttcaaatctttttgaggatgtttaggaatagttttacaagaaattaagttaggagaggaaatctgttctggaggatttttagggttcccactagcatatgtaatggtttctgaactattcagaatcagagaaaactcatttttcctgctttcaagaagctactgtatgccaggcaccatgcacaaacaatgaccaacgtaaaatctctcattttggagagcctggaatctaactggaaaggtgaactaataataatactatgtacaatcatagccatcatttattaaacttttcttctatgcaaggcactgtttaatttccttagcttacctggtttacagagcagctctatgagatgagtgccatctttgcccctattttagggataaggattccgaaatgtggagatggtaagtcaaattgcacaactgaagcatgacttacatgacttggctcaaatactggtcattgaactccagagcctgaatattcttaaccacttacatgatgcaagctgaccaaataaatagttcgaatgtattgtgacagagcggcattgatattcatctattcatgtggctttgagtaggaagaagaaaggatatcattctgaccagagcggtgaaaaacaacctgcatctgatcctgaggcataatactattaacacaattcttttatgtttcagttcgatgaatttaaacctcttgtggaagagcctcagaaatttaatcaaacaaaattgtgagctttttgagcagcttggagagtacaaattccagaatgcgtaagtaatttttattgactgattttttttatcaatttgtaattatttaagacttaatatagagccacctagcatagaacttttcagaatgaaaatacattgcatatttctaatcactctttgtcaagaaagataggagaggagagataaaatagttgatggggtggagaggtctatatttgwatgtagtctaaaaattgttctcttaagattggaagtatgtaggctgggagggtaaataccaaatcttggtatatcagaactgagcatgtcccttgacggttaagaaatagttaatgggcaaatagagcatggcaatattttgtagagcagcaagtagtaggccttgaatagatgtcgctcaaaaagtaatatgtaagctgaacacaaaaatgtaacaaatgaatttagatacatatttgaatattaaattcaggttgtttgggagatgcacctagtctttgatggttaaacctttccctccatagaagagacagagacagaatggcttgctggactaatgtcccaattcaatagagtcttatctacgaaggttaaaaacaagaagagacatattatacagtagatatttcttgtgtggctcatacacatggtgctcttctgattatggattttagagataataacagtgaacaagacatagtttctttcctcgagtagattaaagtcctacattgacttttaatggtgactggcattcttaatacatgattattatatattaggtactatgtcacattaattataatactttactatttttaatttaacccttgaactatccctattgagtcagatatatttccttccattttctacttgtatctttcaagtttagcatatgctgatacatatgaagctctctccaggttttattgaaagaagaaattaatcaatttattactgtccctgaattaggcaactcactttcccaagattatgcccgtggtacaggtggaactcaaagccaagtttaactagttgttcaggagaatgttttctaccctccactaacccactactctgcagatggagataatatgatgaatggaacatagcaacatcttagttgattccggccaagtgttctctgttttatctactatgttagacagtttcttgccttgctgaaaacacatgacttctttttttcaggctattagttcgttacaccaagaaagtaccccaagtgtcaactccaactcttgtagaggtctcaagaaacctaggaaaagtcagcagcaaatgttgtaaacatcctgaagcaaaaagaatgccctgtgcagaagactatgtgagtctttaaaaacatataataaattaataatgaaaaaattttccctttagatattgctaatgctacctttcataagcagaaggaagtaatgtgtgtgtgtgcatgttttgtgcatgtgtgtgtgcatgcacgtgtgtgtatgtgtgatattggcagtcaaggccccgaggatgataattttttttttttttttgagacggagtctcgctttgttgtccaggctggagtgcagtggtgccatctcggctcactgcaacctccgcctcccaagttcaagccattctcctgcctcagcctcccaagtagctgggactacaggtgcatgccaccatgcctggctaattttttgtatttttagtagaaaattttcagcttcacctcttttgaatttctgctctcctgcctgttctttagctatccgtggtcctgaaccagttatgtgtgttgcatgagaaaacgccagtaagtgacagagtcaccaaatgctgcgacagaatccttggtgaacaggcgaccatgcttttcagctctggaagtcgatgaaacatacgttcccaaagagtttaatgctgaaacattcaccttccatgcagacatatgcacactttctgagaaggagagacaaatcaagaaacaaacgtgaggagtatttcattactgcatgtgtttgtagtcttgatagcaagaactgtcaattcaagctagcaactttttcctgaagtagtgattatatttcttagaggaaagtattggagtgttgcccttattatgctgataagagtacccagaataaaatgaataactttttaaagataaaatcctctgttataatattgctaaaattattcagagtaatattgtggattaaagccacaatagaataacatgttagaccatattcagtagaaaaagatgaccaattaactgataaatttgtgcacatggcaaattagttaatgggaaccataggagaatttatttctagatgtaaataattattttaagtttgccctatggtggccccacacatgagacaaacccccaagatgtgacttttgagaatgagacttggataaaaaacatgtagaaatgcaagccctgaagctcaactccctattgctatcacaggggttataattgcataaaatttagctatagaaagttgctgtcatctcttgtgggctgtactcctcgtctaggcttaagagtaatattgcaaaacctgtcatgcccacaccaatctctccctggcattgttgtctttgcagatgtcagtgaacgcgacccagcagctcccatgagtttgcatagccttattttctatagcctccccactattagctttgaagggagcaaagtttaagaaccaaatataaagtttctcatctttatagatgagacccattttaaataaagtccaagataattaaatttttaaggatcatttttagctctttaatagcaataaaactcaatatgacataatatggcacttccaaaatctgaataatatataattgcaatgacatacttcttttcagagatttactgaaaagaaatttgttgacactacataacgtgatgagtggtttatactgattgtttcagttggtcttcccaccaactccatgaaagtggattttattatcctcatcatgcagatgagaatattgagacttatagcggtatgcctggcccaagtactcagagttgcctggctccaagatttataatcttaaatgatgggactaccatccttactctctccatttttctatacgtgagtaatgttttttctgttttttttttttctttttccattcaaactcagtgcacttgttgagctcgtgaaacacaagcccaaggcaacaaaagagcaactgaaagttgttatggatgatttcgcagcttttgtagagaagtgctgcaaggctgacgataaggagacctgctttgccgaggaggtactacagttctcttcattttaatatgtccagtattcatttttgcatgtttggttaggctagggcttacggatttatatatcaaaggaggctttgtacatgtgggcccgggatcttattttacacacaattgtcttacaaaatgactaaaacagcactttgtttttatctcctgctctattgtgccatactgttgaatgtttataatgcatgttctgtttccaaatttgtgatgcttatgaatattaataggaatatttgtaaggcctgaaatattttgatcatgaaatcaaaatattaatttatttaaacatttacttgaaatgtggtggtttgtgatttagttgattttataggctagtgggagaatttacattcaaatgtctaaatcacttaaaatttccctttatggcctgacagtaacttttttttattcatttggggacaactatgtccgtgagcttccatccagagattatagtagtaaattgtaattaaaggctatgatgcacgtgaaatcactttgcaatcatcaatagcttcataaatgttaattttgtatcctaatagtaatgctaatattttcctaacatctgtcatgtctttgtgttcagggtcaaaaacttgttgctgcaagtcaagctgccttaggcttataac

SEQ ID NO: 158573 - DNA, 492 bp, Homo sapiens
tcctgctagagatgtgatttagtcttttcatgtttttgcccaacctgatctcaatctcctaagctcaagagatcttcctgctttggcatcccaaagtactggcattactggcatgagccaccaatgcccaggctaatattgattttttttattgcttttactccatttaattttcaagccgtgcttaaattagtattctaaatgtttaaaatacttagatccatttgaatcaaatgaatctaaagaagttcacggcacagggtcaaattgataaagggtgatggaacttgatacaggtttttcttttcacaaaaaatcttgcacggactacaaaaaaaggtagggcaaatccccaaaacagaggaaaatgtgtgtaaaagccacatgatgtgaccacaacacaaagaaaccaagaaattagtaaccaaaaattggataaaatgaatcaaaacacttgaattttaaaaagtcttatattgataaggaaatgcc

SEQ ID NO: 158574 - DNA, 338 bp, Homo sapiens
ggcacgaggagctgtgagaatatacacttacattctgaagccgttttatgcacggtccccaatgacctgctgaaattgaacagcgagctaaatatagagtggaagcaagcaatttcttcaaccgtccttggaaaagtaatagttcaaccagatcataatttcacaggattgattgctggtgttgtcttaataataacagcactgttattactacttgggtttattctgaggtataacattgaagactaattaattttctgagcttgacctactttgatactatcaagtcgacatttaatatatctgcaagtaattttgcttttcaattttcaaatcag

SEQ ID NO: 158575 - DNA, 336 bp, Homo sapiens
  misc_feature (1)...(336): n = a,t,c or g
aaagttggccacaccacctgctgcccaggagtcatcccgccggcggtccaggaagggtcatctgccagcccccgtgcagccgtatgaacacgggtatccagtctctggcgggtttgccatgccacccgtctccttataccatatcctcaccacctccttctcctcccatgctgttgatatctctcttgatatgtgctgtttcattcttctactaccatctcttctttnnnnnnnnnnnnnnnnnnnnnnnnnnnnnnnnnnnnataatttctttctctgtctttaactttttcnnnnnnnnnnnnnnnnnatctttgatattagnnnnnnnnnnag

SEQ ID NO: 158576 - DNA, 385 bp, Homo sapiens
ccacggctgccggctgtcaactggttgccagctgcgacattgccgtggcgagcgacaagtcctcttttgccactcctggggtgaacgtcgggctcttctgttctacccctggggttgccttggcaagagcagtgcctataaaggtggccttggagatgctctttactggtgagcccatttctgcccaagaagccctgctccacgggctgctcaacaaggtgctgctataagtatatcctatataagacacctagatgatcgctaggtatacgctacacaataatactttaaacgactcgggtattgtatccattctattaccaacaaaatttatactagtgaaaaattctaacgagtcataaatgagcctccaccactcagcaac

SEQ ID NO: 158577 - DNA, 374 bp, Homo sapiens
tctcagtctgcatgccatggccacactagttcagatggtctgaacaaagtggtcagatggcagaaatgataagaagtatggcaaaagttcctattgtctggaaccatggcagtatagtgtcacctcaacctcaaatgatatggctcattgtaggagctaaacataaggatttgtggaaactattaatagctcttaataagatcacaatttgggaatgaattaaaaaagcatctataaagacactctacaaacttgtctttggatattacatgaactaacagagcagatattcaaagcatcccaggcacacctgaccttactgacacaaactggactgcttgagtgaccaagatttcctattaccattctagtcc

SEQ ID NO: 158578 - DNA, 792 bp, Homo sapiens; identical to SEQ ID NO: 152399

SEQ ID NO: 158579 - DNA, 593 bp, Homo sapiens
cgacagtcaagatggcgggagcagctacccaggctttcctggagacttgtcccacggatcatgcggctggtggccgaatgcggccgctccagggcccgggcaggtgagctgtggctgccgcatgggacagtggccactcctgtgttcatgccagtgggcacgcaggccaccatgaagggcatcacgtttcgaatttttggacgctctgggttgccgcatctgcctggggcaatacctaccatctgggtctaaggccgggacccgagcttgatccagaaagccaacggtctcccacggctttcatgaatttggccttcattaatcttgcttaacgggacagcggcggttttccagatggtgtcgctggtgtctctgtccgaggtgacggaggagggcgtccgcttccgctccccctacgacggcaatgagaccctgctgagcccggagaaatccgtgcagatccagaatgcgctgggctcggacatcatcatgcagctggacgacgtggttagcagtactgtgactgggccacgtgtggaggaggccatgtacaggtcaatccgctggctggaccggtgcatttgcagccatca

SEQ ID NO: 158580 - DNA, 633 bp, Homo sapiens
  misc_feature (1)...(633): n = a,t,c or g
nntcctccccggnacnggccttgtggtcccccccttccccaaacattcttgaggtaggnnggcctcattgtaaattgtaggtggccnttggaccaacaagtctcctttcttgagcaggtcggccgtaagaagtagacaatcttccacttggcccttgtaggtgaagcaccacatcagctcccagtagcaacatgtggtggactgcttccagtnctgctggcctcacaagcactcctcgaaacnccggatggctgcatcaatgtgcctttaatgacttcaatcctccctgcaaagaacaggaagatggcacccccaggganccctgcccgcggggactcctgagagcagcctccatgaggccctggaccagtgcatgaccgccctggacctcttcctcaccaaccagttctcagaagcactcagctacctcaagcccagaaccaaggaaagcatgtaccactcactgacatatgccaccatcctggagatgcaggccatgatgacctttgaccctcaggacatcctgcttgccggcaacatgatgaaggaggcacagatgctgtgtcagaggcaccggaggaagtcttctgtaacagattccttcagcagcctggtgaaccnccccaggctggc

SEQ ID NO: 158581 - DNA, 6256 bp, Homo sapiens
ggtggagacaccgcctcagggctcggtgcacagtggacatttggggagcgttgtgggtgacccccacacaggcactgggaatgcaggggagagggggccaagggggaaaggggccagagtgttggctttggattcaggagggatggattccagtcctagcttgccacttattaggactcctgagagcagcctccatgaggccctggaccagtgcatgaccgccctggacctcttcctcaccaaccagttctcagaagcactcagctacctcaagcccagaaccaaggaaagcatgtaccactcactgacatatgccaccatcctggagatgcaggccatgatgacctttgaccctcaggacatcctgcttgccggcaacatgatgaaggaggcacagatgctgtgtcagaggcaccggaggaagtcttctgtaacagattccttcagcagcctggtgaaccgccccacgctgggccaattcactgaagaggaaatccacgctgaggtctgctatgcagagtgcctgctgcagcgagcagccctgaccttcctgcagggttcctcacacggaggggcagtcaggcccagagccttgcatgatccctctcacgcctgcagctgcccacctgggccaggccgtcagcatcttttcctcctgcaggacgagaacatggtgagcttcatcaaaggcggcatcaaagttcgaaacagctaccagacctacaaggagctggacagccttgttcagtcctcacaatactgcaagggtgagaaccacccgcactttgaaggaggagtgaagcttggtgtaggggccttcaacctgacactgtccatgcttcctactaggatcctgaggctgttggagtttgtggggttttcaggaaacaaggactatgggctgctgcagctggaggagggagcgtcagggcacagcttccgctctgtgctctgtgtcatgctcctgctgtgctaccacaccttcctcaccttcgtgctcggtactgggaacgtcaacatcgaggaggccgagaagctcttgaagccctacctgaaccggtaccctaagggtgccatcttcctgttctttgcagggaggattgaagtcattaaaggcaacattgatgcagtgagtgatgggggtccgggccggggctggggatccctcggggtctcccagaccagcaggaagtcaggcacatgtgacatactcagggacaggatagactgggggcgggggggggggccaagagagaaccaaccagagagcaggggcaggagaggcccttctggcagagcagcctgggaagacaagggaggaggaggcatttgtggtgcctgggattttgactgggagatataggactgcagcattgcagtggagggaggtggagggaggtgcttgagggaggcagaggttaggaaagcccatctgtttagggcatgacgattaggctggagtctggtacctcccctccattatagctctctcctgctctttcattttgttactaaaaaccagagtcctaggcgggggctgtatttgagcccaacgtcatgtaagacttaggaggtaaaaccaggactggaggccagatctcctggctcctggggccccacctgagcctagcacagggctggaccactatgccctggaggagtcccggtctgctgtggtgttgggaggttcggaggatgcagaggggttggggctgggtgggcacccgtcaggctgaccagaaggtgcctgcaggccatccggcgtttcgaggagtgctgtgaggcccagcagcactggaagcagttccaccacatgtgctactgggagctgatgtggtgcttcacctacaagggccagtggaagatgtcctacttctacgccgacctgctcagcaaggagaactgctggtccaaggtgggctgatgccacgtgttaggggcattgggtgaccagggctgactgtgtgcctccagaccacgggccaaatccctaactgaacacagatgtctcagctggaatctaaacataaccttaaattctaataggactcaggcttggaaggaactaaagaccacaagagaaacttctgaaccacaatgtgtcacaaagagatttctagtcacaaaggacagaaacatggctccctctgtccagtagaactgtttctgtggtagaaatgttctacttatgcactgcccaaatatggtagtcaccagccacatgtgcacactgagcacatgaaatgtgcctagtgcaactgggaaactgattgttttcagttttatttaattttaattaactaaatgttaaatttaaatagccatgtagggcttgtggccactatattggactatgcaggtccaaaacacaaaaggctcatataactgaacattcttggcacatccgacttcaggtagggctggatccaggaattcaaatgatgtcgtctggcttggtctttccatttgtggctgtgctctctcctatgacatctttgtttctgctgcatctttgcaggaaggttctctccatgtgacaggcaaggtggccacgggctgcttctactcatatcctccccttggtttcaaccagagtcccacagtttgagcctcactggtctgacttgtcacctgccaatgcctggaacagaggggtgggaagattcctcatgggctgagagtaggagaggggtggttccacagaagaaaatgatgcacccagaaatagtggagggattaacaagatgccatacaggcaaaacaaagccaaacagatgcccgcctaccaaagatgaaatttatcatggtaagtattgaaataagtgttagcttgtaccatcatagtaatgatagtgcagaaattggaaccaagagtcttacaaccacctagctcagcaaacgtctaatctgttatttgtaaatacacaggacatgtgtcttcatggcttcatcccctgcccatggcagacattgctaatcaatcctctgccatgagcctagctgtgaccttagataccttccctgcaaagctccaggcagccgttagaactgacccacattggcacctgttaggagacctgtcatctgcatctggtccctccccctcctctgcatggaggtctcttccgtagccctgcctggggaccaagctgaaggggaattctctgggtctggggcaggtggggctggggaagggagcaggcttctactgagctctcaacatgtctggcacctgtcatgtcctccacaccacacccagtgaggagaagttattatctccattgggcacatgagggccactgatgctaagcgaggactgtgactttcccacccacatggctgttggtgacagacaccggatttgaggacagtcctgtgtgactcagaggcctctgcttctctcttgctcctagagtcctcctgaggagtcggggcttgccctgagcccaccctgctgttgaaggtgcttcctcaggcccagctcccatggcccccacaccccctcctcatcacctcctactcccaaaaaggacaaagcctcagggaaccttttttctttttttagagacggggtcttgctatgttggtcaggctggtcttgaactcctgggcccaggcaatcttcccgcctctgcctcctaaagtgctgggattctgggccttagggaacctttttgaactgaaagtgacgctcgaagccttcctgtagagtgaggtgggtggctggggctaaccatatggggaaggagagacctggtgggggcacacagctgctatatagaggaacagaaggtgggccaggcctcccagctgtcaggaaatctggctcagtccccagaccgctgtgtggctttggggtggccagtccctctctctctgcaacactctcctcatgaggacttctgtgaaaaatgggggttgtaaccctctgagttctggggccccacccatttctaatctccagaacttggccaccacagactccaccaacttctagtcctggggcctgggcctctggccattgccataggcaccacctgctctgtgcaggcagcgcccccctctgccaggatcctccgaggtcagctgctgggtctgacccgcagaccctggctgagcgacggatgaacggagtatgcagacacaggcttgcttgtcagcagatgggggacccctgccagagtcagcagcggcccccataagcctgccacgcttgcatttatttagtacagatgtaatgacaaaggcctaaagcaaactccatttgtgggtaattaacattgtcgcccccccagaaagagcagtcctccgcatgatgattaaaggccaggttccgaggcctaagtaaaccaacttatctagatcaattcccttacttcttgttatctactctgagagaattcagctgccttcagccaaatcctttcccgaagcttttgcaaaacctccgagccttccaaggtttgcttctttctgtaatttttctcaccaccctgacctatctcctgcagtcagccctgtggaggcctttgtgtttcccccagtgctggcagcctagaggctgagatggccagaaacaaggtggtgacagtggcgtgctcagggcttgggaaacccaaggagctaaaggcatgcccaggcaaccaaagaggacaggaaggcttctgaggagagacctctgaggtgggtcttggagaggaaggacttagggaggcagagtggaggaagtgagaggacaccccaagccaagagggcggcaggaccaaaggctcagaagccagggcgctgcagaggggctgtgtgccacagggtgaagagtttgtgtggcagaagggcagggggcttgcatcaggggtgacagctgctcttttgtcccagcatagcccctgtacatccctggagagctggggcgtccacaactctaagtcacagcccccatcctaaccctggtggtgcagtgagggtgagctgtctgtgggcaggagggaagactcttggagatgagcctggtgaagggataatggcatcccgggccgaggagcagcacaggcagaggcctggggagagtttaaggagtgtaggggaggaaatggcagaagatgagccagaaaaagaaaggttagggcaggtcctggaggacatgagtggctgtttgggctttatccagcagtgggggagccttggcaggcttgtggcttagataggtgctttagaaagcccaccagcagttgctgggccaccccgctggctgggtcctgttctaaggcaggaaatacaagaatgagcaggaaaagaccccctcaaggctcacgtcctagtggggagacaagaaacacagatgggcaatataacacgatgtctggttccagtaagtgcagtgaagaacaagcgaggctggatgcagggagtgatgggaggggctttgtaaggggaggtcgggggaagcctgtctcagaggacaccagaatggagcgcaggagcagcacgtggcagtcacatggcaggccgttagggcagagggagctgggcagggcacagcagggcaggagtgtgtttgatgtgtcctgggaaccgccctgaggccgtcgtgtggctggagtgctgcaggtgtcaaggaaattgtaggagatgtctcctgagtgtgatggaatataaccagatttccagaaggaactgacatgatctgacttaaaaaggtcagtgtgcgaaatggcttgcaggggacaggagtgggagcagggagataggagacaatgtgtaccaggacagcagaaagacatcccgggtagcctggaacagggagacggtgtggagatggtggcagtccgataatgagagccgtagggcaaggccagcaggatcctagagtgagacgggaggtaaagtcaccgggacttggtgtctccacgtcaggggcaggggaaagggagaggacaagggtgacccgggaggttaaagatgggaccggggccagacgcagtggctcatgcctgtaatcctagcactttgggaggctgaggcgggcggatggcttgaggtcaggagtttgaaaccggcctggccaacatggtgaaaccccgtctctactaaaatatacaaaaattagcctggcgtggtggtgcatgcctgcagtcccagctattcaggaggctgaggcgacaagaatcgcttgaacctgggaggcggaggttgcagtgagccgagatcgcgccatagcactccagccttagcctgggcgacagagcgagaccacatc

SEQ ID NO: 158582 - DNA, 351 bp, Homo sapiens
caaaatgaagcctcaagaaagaataagaaaaagaaagaaaaatctacatcaaaatatgaagtcctgacagttcaagagcctccaaggattgaagatgccgaggaatttcccaacctggcaggtgcatctgaaagagaagacagcttagagacacgggacattgaatgtacttgggcttcactggaggatcttaaatttcctgaacttaaggtccatcttgcggaggagaacgggttacttcattcccgaggcttttggggtgctttaacacctttctcactttcataacttggcaaaaatggaccctttcttatccttttggggtatatagaacttcctcattaagttttt

SEQ ID NO: 158583 - DNA, 467 bp, Homo sapiens
cgaacaccaccgcagcaactgtggcccctttcagctctccggttttcactttgagcagcactcctcaaactattcagaggacagtgagcaaagaaagcctcttagtgtctcacccctctgtgcaaaccaaatctccaggagggctttccatccaaaatgagccactcccaccaggcccaacagaaccaacaccaccaccattcacattttccatccccagcggaaaccagtttcagccccgctgtgagtccccaattcctgtctctcctaccatccggattcagaacccagtggctttcctcagctctgttctgccttctattcctgccattccactcacaaatgccatgggtctgcctagaagtgcaccatccatgccatcccatgtgttagcgtatataaatatctagtctgctttacctagttaatgatgattacatgttttgaaactaacgactcattgttct

SEQ ID NO: 158584 - DNA, 390 bp, Homo sapiens
aacctgctccaagccatcattgactccttgtctggggaggacaagcgggagcatcgagggaaggaggaggccctggttctagacaccaagaaggacctgaagcagatcaccagccacctgctggacatgctagtcagcaagaaggtgtctggccagggcagggatcaggcgctgaacctgctcaataagaatgttcccaggaaggaccttgccattcatgacaactcacgtaccatctatgtggtggataatggtctgaggaagatcctgaaggttgtggggcaggttccagatctgccatcctgcctgcccctgactgacaacacccgcatgctggcctctatcctcatcaacaagctctatgatgacctgcgctgtgacccggagcgc

SEQ ID NO: 158585 - DNA, 391 bp, Homo sapiens
  misc_feature (1)...(391): n = a,t,c or g
cgggccaaatttctgagggagtggtcccccccatagcgcccccccaaaaggttggttcttttcccaccattccgagccagagatttgtctgccccctccaaggaacaaggaacttcctctcccccgccggcattctttgggccccccattgtctctttttaaacgccgccccccctattttgtccattttttgtcattccctttttatccttatctttcatnnnnnnnnnnnnnnnnnnnnnnnnnnnnnnnnnnnnnnnnnnnnnnnnnnnnnnnnnnnnnnnnnnnnnnnnnnnnnnnnnnnnnnnnnnnnnnnnnnnnnnnnnnnnnnnnnnnnnnnnnnnnnnnnnnnnnnnnnnnnnnnnnnnnnnnnnnnnnnnnnnnnnnncgt

SEQ ID NO: 158586 - DNA, 366 bp, Homo sapiens
  misc_feature (1)...(366): n = a,t,c or g
caatcagaggcacatgttgggtcaccatgctgaaatggaaatagccaggcttttgaaggcaaacaacactctgctgaagatgggctaccatttggagcttccgggtcccagaatggtggtcactaatctgctcaccaggaatcaggataaacaaaggcagaaacgacaggaagagcaaaaacagcagcaactcaaggaacagaagaagctgatagccatgttagagaatgggttggggctgccccctgggatgtgggagctgttgggaggacccaagccagattccagaatgcaggaattcttccagccaccgccacctcggcctcccaacccccaaaatgtcccctttagtcaacgcagtgaaan

SEQ ID NO: 158587 - DNA, 1878 bp, Homo sapiens
gaattgcttgaatcgggagcggaggttgcagtgagccgagatcgtgccactgaactccaacctgccaatagagcgagactccgtctcaaaaaaaaaaaaaaaaaagaaagaaatagcattgaagaaaataccgcacatcagaggaaagcttattttcctgcatggtgtcttttcaaagcatagcaatatttgaagcaggttttctagggattgtgtgaatgagggtgagctggctgaggcatcgctcaagactggggggtggtgtgtaagaagtcacgtggagccacaagaggcacctcctatagctcagctaagggcttccctttctgcgacccagcttttgggtgaagggtgatttctactaagacacatctgtgcttcagtcatagatgttaatagaggaagcagttttcctgctgcagattcctgaatagagttgctgaaagagtctacttctggactcaggggaagttgaaggccagtctgtgtagaaaggctgaggcaacggggaaagacctgacacgctaagttacatacagctctgacatagtactcccatgatggcttccagtggacacatgtgctgatagaattcctaaacctctggaatttccctgctggcgacttctatggccgttgactgtacagggtaacctgaatgccagatgctaatgggcgtgaatgagaacttagagcattgccagcatggaggaaactgtgaggcaccagatccctggtgcttctgcagggccattttctggaaaacccctgttaggaaggttggatttggcgtgacttgcttgagccaagagtcctgggggagagattttgaagttttaatttaacggtatatcccagaggcctaacagtgactcaactcgtctaagttctgccaagtcagatgttacacttagagtctctctgtgaaagggtttgggtctgagctgtgtaagtatgtcaaactgcccagtaagcccagcccctcacccatctgatagatattcctttaatgcaccaggacttcatgtttggataaatggattaatggttgaaatttgtttctctctcttttgtgttttccccagttaaatagatggtcactgtttcccacaatggttttatactttccagctttttgtaacttaactataattacttaattttaattttttttaaagcttgttgtggtctaatgagaagtatttttcagtgcataatgtttttctgagcttctgtaaatgccatcccaatgtggtttggttttgttgaacagaaaccaaaataaatttccaaaatgttaaagcaatggatttaatacatttatttatttatttgttttattttgtttttgagacggagtctcgctctattggcaggttggagttcagtggcacgatctcggctcactgcaacctccgcctcccggattcaagcaattctcctgcctcagcctatctagtagctgggactacaggtgcacgtcaccatgcccggctaatttttgtatttttattagagacggggtttcaccatgttgggccagaatggtctcgatctcttgacctcgtgatccccccgcctcggcctcccaaagcgctgggattacaggggggagccaccgcgcccggcctttcttcagtgcaatttttaaagagaaacttaaatcctgttgtattctttcaacacaagcaatgatacttctcagagtctgctcaaaagctcagctctgtggactccgtgacaaaatgtacgcgtccactgccgaccctcttgggtttctgaaaccaacctttcttcctgctctcctctttaagagcaaaccccaacatgtataaggtcacagcaagtggtagccaggaaaagctgtgggacccctca

SEQ ID NO: 158588 - DNA, 557 bp, Homo sapiens
gcggccgcgtcgcagctcttcaacatcatgatcaccccattagcctccggcggtggctgcggccccatcgggagcccctccttggggcctttcctgtccacggagaccgcgggcaccgccagcagctgcccccccggaggctctcgggcaggggccgggatcgacgaggggggcggcggaggtggcaggggctgccggaagccgtccaccgcagcctttctatagtgacttccagtcaaggttttgttgtattaagagctgacccatagccagctgcagtcactgtgcaaaaatttagagaaactaaattttgcaaactttactttgcccactttttattaatacatacatagtaaaaagaatatatttctccatgaacttaataatgcaaaagcatccaaagattttaatgccaattcacattatactgtgatgcttttatagggaaagttcttttgtaaaagaatgctctctcccagaaaaagcatttgggtatattattaggatactgaagaatttctccacatttagaaacattccaattttattcctttcag

SEQ ID NO: 158589 - DNA, 519 bp, Homo sapiens
gcggccgcgtcgcagctcttcaacatcatgatcaccccattagcctccggcggtggctgcggccccatcgggagcccctccttggggcctttcctgtccacggagaccgcgggcaccgccagcagctgcccccccggaggctctcgggcaggggccgggatcgacgaggggggcggcggaggtggcaggggctgccggaagccgtccaccgcagcctcccagttgttgtggttctggtcgtccatcatcgcctcgtagctgcccccctcctcctcttccatgctttccaccatccttgctgccccccggcacccgcccgcctcacaggcacctgccgcctgtctcaaccccgggccagcgggcacccgctgcctccccgagttacatcgccagcgcgaggaatgggcgcagcggagaaggctgcaagtgcgcgaggtctctcgctctccgcggggccgactagcttgaagacgcggctgacggcggtgggcgctccggggctcctcgtgcggaattcca

SEQ ID NO: 158590 - DNA, 318 bp, Homo sapiens
aactgccatctggacaaaagatggaaaggccattacacaaggaggtaaatataaactctctgaagacaagggagggttcttcttagaaattcataagactgatacttctgacagtggactttatacttgtacagtaaaaaattcagctggatctgtgtcctctagctgcaaattaacaataaaagctataaaagatactgaggcacagaaagtctctacacaaaagacttctgaaattacacctcagaagaaagctgttgtccaagaggaaatttcccaaaaagccctaaggtctgaagaaattaagatgtcagaggg

SEQ ID NO: 158591 - DNA, 349 bp, Homo sapiens
aggcggcggctggtggtggtttctggcttcgctgttccattcccttgtcttgaggtaccactactgggttttgcctgggtgcttgggactggcacagctccctcggggtggggagactgggataggatgccaagctggtactcttgccttccatcaatgtggggacagaaggagcaggttctcccgagagcaggttcatggggcttctggccagggtcagtcagaggtgaaaactgcccccctgtcccccaggccccccaacctctcccaccagcccagtttctacactcacgcctgttctgccagagggggaggccgcaccgtgtccctccaggttttgccagggttt

SEQ ID NO: 158592 - DNA, 368 bp, Homo sapiens
ccgtgacacgccgctcttgacaggccgaggatcataaggactgtacatggtgaatggaccaccacattttacagaaagcacagtgtttccaagagtaaatattatcagtgtcactaacaagggactactgcactccttcgacctcctgaaggcaggtagccttgaattctcacccaaaaatactgtcctggcaacgcggcagccttacactacttgtaaagatggcacagctgggatacccaacctacaactttatgatgtgaaaactgggacatgtttgaaatctttcatccagaaaaaaatgcataattggtgtccatcctggtcagaagatgaaactctttgtgcccgcaatgttaacaatgaag

SEQ ID NO: 158593 - DNA, 376 bp, Homo sapiens
tcgccgtccaagccggtcttgacagtccgaggatcacaatgactgtccatggcgaatggacccccacattgtacagaatgcacagcgtttccaagggaatctgggaagaattgcaaagtctgtatctttaacaccgacgggaccttggttgcctggcgcaccggacaaaaagcagatattatcagtgtctctagcaagggactactgcactccttctacctcctgaaggcagtttgccttgaattctcgcccaaaaatactgccctgtgaacggggttgccttacagtacttctaaagatgctacagctgggatacccaacctacaactttatgatgtgaaaactgggacatgtttgaaatctttcctccagaaag

SEQ ID NO: 158594 - DNA, 534 bp, Homo sapiens
cacgcatgaggagacgtgtaggggccgggttcggccctggtgaactctcacccgagcggtttctctttccgggacaacatggcgccgtccacgccgctcttgacagtccgaggatcagaaggactgtacatggtgaatggaccaccacattttacagaaagcacagtgtttccaaggtatgatttattttgttaagtaatgttatagggaacatacagtacaatctaaaatggttttgttggtggtgtattttgaacaagaaaggaaaagaacagatgaactcatttttattgtataatatttaccgaagatgaaaagaatacatattctctatcaaggaaaatgatcttcagatctgaaaatagtaacttaagcctatttataaggtagggggaacaatactaagaaaaagtgtagacactagtgtaattgaatacaagcctttattttacaagagttgtatcttaaggaatgagaaaaacttgcaaatttgatagccaaatcatggccagtaatcttagtgaaatcataatg

SEQ ID NO: 158595 - DNA, 994 bp, Homo sapiens
  misc_feature (1)...(994): n = a,t,c or g
gcataaancccatataccggcaccaaacctcagtngaactggaattccaaactaccatccataaatggggccattttttggtaattgcactaccagcactttctcccatttgttgcaatgtagtgtagagtttgttctcccatagtaggaagctcctgtcttgtcaacatctgtgctagctattaccaacacagcagtagcttttttattccacagcattgtaactttatctgccttaaagaaacttttattagctaaagctgcatgaggtccagcaaagttggggtactgatataatctaacaaatgaaggtgcacctttacttcctggaacatagacagccaccttgtatggttggggtccaggtgataatacaaaatcattaattttttgcaaatgcaatttcattttgcaattgtgctaaaattgctgctttcaaagaagtgaacttcattgctaacattcgcgggctacaaagagtttcatcttctgacccaggatggacaccaattttgcatttttttctggatgaaagatttcaaacatgtccccagttttcacatcataaagttgtaggttgggtatcccagctgtgccatctttagaagtactgtaaggctgccacgttgcccaggacagtatttttgggtgagaattccaaggcaaactgccttcaggaggtcgaaggagtgcagtagtcccttgttagtgacactgataatatttactttttctccattgcccaggtcaaaacagggtcccatcccttactaaagatacagactttgcaattcttcccagattcccttggaaacactgtgctttctgtaaaatgtggtggtccattcaccatgtacagtccttctgatcctcggactgtcaagagcggcgtggacggcgccatgttgtcccggaaagagaaaccgctcgggtgagagttcaccagggccgaacccggcccctacacgtctcctcatgcgtggagacagcgaat

SEQ ID NO: 158596 - DNA, 424 bp, Homo sapiens
aaccatgtctttttatttatttgttttggagatggggtctcgctttgttgcccaggctggtctcgaactcctgggctcaaacaatcctcctgtcttggcctcccggggtgttgggattacaggtatgagccagcatgcccgttctataagcaggtcttctcaaatgtaacctcctcaagggcagacgtatctgtaaccccctagcaagctgcaccagctctgacacgtacttggtgctcagcgatgcatcacactgatttcctgccactggactgtgataccagactcagggctcccagccatcacatacagctccctcagccacgacaccccaatacagggatttaaaatctgccttcataatttacttgtggccgggcgtggtggctcacacctgtaatcctagcactttgggaggccgagg

SEQ ID NO: 158597 - DNA, 377 bp, Homo sapiens
  misc_feature (1)...(377): n = a,t,c or g
atctatatgcagagcaatgaaattggaaccttatttcacactgtattcaaaaatcaacttaaaatgggttatagatttaaacattatatccaaaactgtcaaactacaagaaaacaacataagggaaaacaatcttgacatcagtcttggcaaagatatttatttgacctatttgactgcaaaagcacagtcaatgaaagcaaaaatatataaatggtattacaccaaactaaaaatcttctgcacaacaaaaaacagagttaacagaatgaagagacaacctacaaattgggagaagatatttataagccatatgtatgataagaggnnnnnnnnnnnnnnnnnnnnnnnnnnnnnnnnnnnnnntcacaagagag

SEQ ID NO: 158598 - DNA, 281 bp, Homo sapiens
gcagcttggatcttaaaagcaagagcgctaacagaaatggtatacatagatgaaattgatgtagatcaggaaggaattgcagaaatgatgctggatgaaaatgctatagctcaagttccacgccaatcacacaagctggaagacccattacaggtttcctcaggcccagcacgcagagtggaaggccaggcactatggaacaggctatcagaacacccagaaccgcctacacagcccgccctatcaccagctcctccggaagatttgtcaggctgggaacg

SEQ ID NO: 158599 - DNA, 769 bp, Homo sapiens
caggcagcttggatcttaaaagcaagagcgctaacagaaatggtatacatagatgaaattgatgtagatcaggaaggaattgcagaaatgatgctggatgaaaatgctatagctcaagttccacgccctggaacgtctttgaaactccctggaactaatcagacaggagggcctagccaggccgttaggccaatcatcacattctgaaaaacccattacagggttcctcaggcccagcacgcagagtggaaggccaggcactatggaacaggctatcagaacacccagaaccgcctacacagcccgtcctatcaccagctcctccggaagattcgtcaggctgggaacggcttccatgcttacaagtcctgatggaccattcataaattaatctaggctgaatttaacaaagtattcccagaaacctaagatggcaaaggctttgcctgagtatatctttcatcatgaaaatgatgttaagactgctttggagctggctgccctctccacagaacattctcagtacaaggactggtggtggaaagtacagattgaaaaacgttactacaggttgggaatgtatcgtgaagcagaaaaacagattaaatcatccctgaagcagcaggaaatggtagatacatttctgtacttggcaaaagtttatgtctcattggatcaacctgtgactgctttaaatcttttcaaacaaggcttacataagtttccaggagaagtaaccctgctctgtggaattgcaagaatctatgag

SEQ ID NO: 158600 - DNA, 3178 bp, Homo sapiens
gctgggtttagtaggagacctggggcaaggccccctgtggacgaccatctgccagcttctctcgttccgtcgattgggaggagcggtggcgacctcggccttcagtgtttccgacggagtgaatggcggcggcggctgggatgctgctgctgggcttgctgcaggcgggtgggtcggtgctgggccaggcgatggagaaggtgacaggcggcaacctcttgtccatgctgctgatcgcctgcgccttcaccctcagcctggtctacctgatccgtctggccgccggccacctggtccagctgcccgcaggggtgaaaagtcctccatacattttctccccaattccattccttgggcatgccatagcatttgggaaaagtccaattgaatttctagaaaatgcatatgagaagtatggacctgtatttagttttaccatggtaggcaagacatttacttaccttctggggagtgatgctgctgcactgctttttaatagtaaaaatgaagacctgaatgcagaagatgtctacagtcgcctgacaacacctgtgtttgggaagggagttgcatacgatgtgcctaatccagttttcttggagcagaagaaaatgttaaaaagtggccttaacatagcccactttaaacagcatgtttctataattgaaaaagaaacaaaggaatactttgagagttggggagaaagtggagaaaaaaatgtgtttgaagctctttctgagctcataattttaacagctagccattgtttgcatggaaaggaaatcagaagtcaactcaatgaaaaggtagcacagctgtatgcagatttggatggaggtttcagccatgcagcctggctcttaccaggttggctgcctttgcctagtttcagacgcagggacagagctcatcgggaaatcaaggatattttctataaggcaatccagaaacgcagacagtctcaagaaaaaattgatgacattctccaaactttactagatgctacatacaaggatgggcgtcctttgactgatgatgaagtagcagggatgcttattggattactcttggcagggcagcatacatcctcaactactagtgcttggatgggcttctttttggccagagacaaaacacttcaaaaaaaatgttatttagaacagaaaacagtctgtggagagaatctgcctcctttaacttatgaccagctcaaggatctaaatttacttgatcgctgtataaaagaaacattaagacttagacctcctataatgatcatgatgagaatggccagaactcctcagactgtggcagggtataccattcctccaggacatcaggtgtgtgtttctcccactgtcaatcaaagacttaaagactcatgggtagaacgcctggactttaatcctgatcgctacttacaggataacccagcatcaggggaaaagtttgcctatgtgccatttggagctgggcgtcatcgttgtattggggaaaattttgcctatgttcaaattaagacaatttggtccactatgcttcgtttatatgaatttgatctcattgatggatactttcccactgtgaattatacaactatgattcacacccctgagaacccagttatccgttacaaacgaagatcaaaatgaaaaaggttgcaaggaacgaatatatgtgattatcactgtaagccacaaaggcattcgaagagaatgaagtgtacaaaacaactcttgtagtttactgtttttttaagtgtgtaattctaaaagccagtttatgatttaggattttgttaactgaatggttctatcaaatataatagcatttgacacattttctaatagttatgatacttatacatgtgctttcaggaagttccttggtgaaacaattgttgaggggggatctaggtaattggcagattctaaataatataatttccagatagtaattttaagagtactcatcgctcttgccaaataagttcagggtattcaaatcttggactagtcctgcaaggtataaagaataaaaatcccagtgagatacttggaaaccacagtttattattatttatctgggcaattattgtgtgtgtgaggatggaagggtagggaataatcgaacatctaaagccttgaataagagaatactaattgttttggtatgatgatactcagaaatggaggatattataggaaaaagaaatcctttggaattttaactaaaatcactgcatatgggaaattaagagatccaggaccatatttgataagagttcctaaaaataatgtaattattaatgctaaagactgctcatgtatcttgatctaattactaaataaattacatatttatttacctgataaatatgtatctagttctacaaggtcacatttatgtggaagtccaaagtcaagtccttaggggataattttgttttgggctcagttgttccctgcttccttttttttttttttttttttttgagatggagtctcgctctgttgcccaggctggagtgcagtggtgcgatctcagctcactgcatcctctgcctcccgggttcaagcaatgctcctgcctcagcctcccgagtagctgggactacaggtgcctaccaccaatgcctggctaattttggttttgtatttttagtagagacaggggtttcactatgttggctaggctggtcttgaactcctgacctcaggtgatccacctgcctcggcttcccaaagtgttgggattatgggcatgagccaccgcacctggccttccctgcttcctctctagaatccaattagggatgtttgttactactcatattgattaaaacagttaacaaacttttttctttttaaaatgtgagatcagtgaactctggttttaagataatctgaaacaaggtccttgggagtaataaaattggtcacattctgtaaagcacattctgtttaggaatcaacttatctcaaattgtaactcggggcctaactatatgagatggctgaaaaaataccacatcgtctgttttcactaggtgatgccaaaatattttgctttatgtatattacagttctttttaaaacactggaagactcatgttaaactctaattgtgaaggcagaatctctgctaatttttcagattaaaattctctttgaaaaaa

SEQ ID NO: 158601 - DNA, 1795 bp, Homo sapiens
  misc_feature (1)...(1795): n = a,t,c or g
tttttttttttttttttaaccgataactttttttattgcaagcagatctaattaaataacaaagtccaagaaacacctgcctttaaggcactctccctaacaaactgagttatattccttgtaaaatataatagagaaataaaaatctatggggaaagggtcactctaaagatactttttatttaaatattttatgatgatacatatacaaatataatcttccaaaaaacaaatgtaaaactaagtgcaaatccactttttcaggaacaaagaaaatcatttagaaaatgtgattatgctaaaagaggcaggttaggtttcccaaggctgctcaaggtggaagcttaagaccaacttttggtttgagtacacaaatgaaatttaccattttcatatacttagtgatatgcctgttgccatacctgggcaaaataaaactgatagtaagtcctataataataaaagaaacaacaattacctaagtaaacaattcctagatgatggaagagtaaccctcccatttaagcctacagaccttagatgtctaaaaaaatatgtgtcctgatctgtacacagttagtgggagcacacctatataaaatccctttgcatgacaccattcaacaatattttttaaaatcctacaaaaattttaaagtttcacttccctagcaaaatatcttcagtcaagaaattagtcctttgaaaaattnatgaaaattgttgtgggaaatatttatacaaattattactgataatgcacatatattttgaaacattgtttcctagaagcaataaaatataacctatttaggagataacccaaatgatttgtaaaaaaattaacttgtagaaaagggaaggatgttgtgtaaaatcaagtcaattatttgaggtatgttataatattgagtacttatgtactaagtcacacccagccagtcaataactgagaaatcagaataaaataataatttcaaagaattacataaatacagggccttttgagatttttggcaattgtaaacaaaaacgaatggtttttacaattcagtgtaattctacgaatatttatttggcacccatgttaggcactgaggctacacagcagtgaaataggcctagttgttcctcaactagagaacatagttggttaatgtagctgcactgaattgtagctgtttagaagataatataccctgaggctttttaaagtatactattactataagaagtaaaattattttatacttataaattttgttttggattattcaactgaatttggagtgttcagaattttcatggcggttgagacaaggaagaggtataatgctatttttttttccttttctttttttttttgagacggaatctcactctgttgcccagactggagtgcaatggtgcgatctcggctcactgcaacctccacctcccaggtttaagtgattctcctgccttagcctcctcagtatcttggattacagacgtgcgccaccatctctggctaatttttgtatttttagtagagacggggtttcgccatgttggccaggctagtctcaaactcccgacctcaggagatctacccaccttggcctcccaaagtgctgggattacaggcgtgagccactatgcctggctaatttttgtatttttagtagagacagagtttcaccatgttggccaggctggtctcgaactcctggccccaagtgatccacctgcctaggccttccaaagtgctgggattacaggcgtgagccactgcacccggctgacctgtgcccct

SEQ ID NO: 158602 - DNA, 374 bp, Homo sapiens
cttggtatgtggtgcccccagaacatggtcagcgcctggatcgcctggccagggagctcttcccaggcagttcccggtgttgtggggccttcctgcggcacaaggtggccctcatctcgcctacagttctcaaggaaaatgggattcccttcaatcgcataactcaggaggctggagagttcatggagacctttccctatggctaccatgctggcttcaaccatggtttcaactgcgcagaggccatcaattttgccactccgcgatggattgattatggcaaaatggcctcccagtgtatctgtgggaaggcaagggtgaccttttccatggatgccttcgtgcgcatcctgcaacctgaacgctatgacctg

SEQ ID NO: 158603 - DNA, 390 bp, Homo sapiens
aatagcacaggtatggggcgccggcagagtaggtggtcaagcgagagcccccttgagtctttgcaactttcgggcggcccttagtaccccatcatcctccagtgcatttcctttctgtccactttaagccctttctcctgaatcccttcattcttcaattatgagcttgcagagtatgacagttgcctgtactaacgcaggggtgagctgctgactaggctggctggattcccatcctactttctccttcctcttctagagtcctggccattgactatccgcgatgaggcacaacctcttaccctgcaagctcagagacccctggtctctgagacggtgctagatgccttctggggctcaaaaccggtcggggcccttttcgtcctttcg

SEQ ID NO: 158604 - DNA, 1135 bp, Homo sapiens
gtaaatacaggagtcttttaattccttgtaaggaaaatttcctggataattccatgtattttaataatcacagagatagtcctatccttattcattatcaaaaatactgtggtaacaatttatagatgcacacaatctcatctattttgacataaaaaaggcagaaaggcaaaatacaaattctgagacagagagtaaaacaatacgacatccttaggtttatttattttattgtttgtttcactgtttgaatgtttatcttgcgagagtctacagaattgagagaaaatatctgcaggctaattttacataacatgaggcaaagattaagcactaaatataaaaaataaaacttttagcttgcttattaaactaggaagaattttcctggaaaccacagcagttaaattggtctacaatgccattaataaatgggagaacacggatctcgcctatggaaatattttaaacattgtgggacggctacccaaaaaggctcattgggtatataagagttttcaaggtcacagtcctctaagcagactaaatacaagttagtttttaaaccctgaaattcaggaagtgccaaaatcctgtaaaaaataaaaatattccccattgttcctcagcaatctatggattaaccctttacaaatcccttaaaagtcttttccagtaacatgaacccatgatctccttgacaagttcccttgccttaagtggcaagtaacttttgaagctggacttctcaatctgtagagagaagcaagctgcattcacagcattgctcccttttgaaaattatcttctgaagagaagaaggtccagcaaagatcttcagtgcaatactccctgcatatgtgcaagtctgcatgagaggtccccccacaggtgcagctgccagccaacgaatcagaaacagatgaaagaggagagaagaaaacagaggtcaaacacttcagtttacagatgctattccagataaaatgccaagggcttggccgggcgcggtgactcacgcctgcaatcccagcaccttgggaggccggggcaggcggatgacgaggtcaggagatcgagaccatcgtggccaacatggtgaaaccccgtctctactaaaaatccaaaaaaaaaa

SEQ ID NO: 158605 - DNA, 350 bp, Homo sapiens
gataggtgcaataagtataggctgacacataggaacatttgacctgtttttttgttgattttaaatcattgaataattggtaagcttttaaatctgttaatttgaacaactatatggctgtatttatctccttatattacaaaaactattataattatctttcccacatatcaaactccactggtttttatcccatttttgtttcatacttcataatgacgataattcatgacttgaattgtatattcccactttctgaggactactctggatcatgctttgtctgcggttccggctctggatcatgacctgatattagattctatatggtatttggtacatgattcgag

SEQ ID NO: 158606 - DNA, 383 bp, Homo sapiens; identical to SEQ ID NO: 135031
  misc_feature (1)...(383): n = a,t,c or g

SEQ ID NO: 158607 - DNA, 885 bp, Homo sapiens
cacagttacagtattccagcagactcaaatacaagaacctactgctaatgccaccactaccactgccaccactgatgaattaaaaacagtgacaaaagaccgtatggaagacattaaaatattgattgcatctccatctcctacccacatacataaagaaactactagtgccacatcatcaccatatagagatactcaaagtcggacagcctcaccaaacagagcaggaaaaggagtcatagaacagacagaaaaatctcatccaagaagccctaacgtgttatctgtcgctttgagtcaaagaactacagttcctgaggaagaactaaatccaaagatactagctttgcagaatgctcagagaaagcgaaaaatggaacatgatggttcactttttcaagcagtaggaattggaacattattacagcagccagacgatcatgcagctactacatcactttcttggaaacgtgtaaaagggatgcaatctagtgaacagaatggaatggagcaaaagacaattatgttaataccctctgatttagcatgtagactgctgggggcatcaatggatgaaagtggattaccacagctgaccagtcatgattgtgaagttaatgctcctatacaaggcagcagaaacctactgcagggtgaagaattactcagagctttggatcaagttaactgagctttttcttaatttcattcctttttttggacactggtggctcactacctaaagcagtctatttatattttctacatctaattttagaagcctggctacaatactgcacaaactttggttaagttcaatttttgatcccctttctacttaatttacattaatgctcttttttagtatgttctttaatgctggat

SEQ ID NO: 158608 - DNA, 202 bp, Homo sapiens
ttcttctcgccgtctccgggcaacctgtggtgacaagctgaggcgattcgatgaaaattttggggcacctgacaagcggcttaaagcagaacctgctgccccacctgctgccccttctaccccagctctaccacctgcagtccctaaacaactccctgcacctccagcttcacctccatcatcagccggcgactcggtcatt

SEQ ID NO: 158609 - DNA, 65 bp, Homo sapiens
cagcatgatgaagaggtttgtcttgatgaaatgagggatgccctaaaggagaaagtcacttagca

SEQ ID NO: 158610 - DNA, 333 bp, Homo sapiens
  misc_feature (1)...(333): n = a,t,c or g
cacnnnnnnnnnnnnnnnnnnnnnnnnnnnnnnnnnnnnnnnnnnnnnnnnnnnnnnnnnnnnnnnnnnnnnnnnnnnnnnnnnnnnnnnnnnnnnnnnnnnnnnnnnnnnnnaaatcactagtaaaaaacacaccaaccaggaaagaaaaatgaaaaaaccccttgtgccaaagggtttcacaattgaattttcccaattgtgcaaaaaactcagggtgccagtctttatgaaacctttccaaaaatacggggaaaggggtctcttcctaaacggattttacgaacccggtttaaccttgatcccaaagtttggcaaaaacccaggggggaa

SEQ ID NO: 158611 - DNA, 518 bp, Homo sapiens
cctcaggtcatgtttactggtgaaaatattccttgttcatcctcatgtttatagcaatggtcatatctgcctcaggtcatgtttactggtgaaaatattccttgttcatcctcatgtttatagcaatggtcatatctgtttatccattctaacagaagactggtccccagcgctctcagtccaatcagtttgtcttagcattattagcatgctttccagctgcaaggaaaagagacgaccaccggataattctttttatgtgcgaacatgtaacaagaatccaaagaaaacaaaatggtggtatcatgggaaatttgaacacagagacatacacaaagggaagaagatgtgaagatacaggaagaatgtgaagatggtcatctataaaccaaagagaggcttgggacagaccctaccctctcagtcttcacaggacaacaaccctgcccgcaccttgatcttggacttctagcttccagagctgtgagaaaataaatgtctatcctcttaagccaaaa

SEQ ID NO: 158612 - DNA, 639 bp, Homo sapiens; identical to SEQ ID NO: 153863

SEQ ID NO: 158613 - DNA, 568 bp, Homo sapiens
tggagacagggcctcactctgtcacccaggccagagtgcagtggtgcaatcatggctcactgtaacctcgggctcctggcctcaagccatactcccacctcaccctccagagtagctgggattacaggcgtgcgacctcacccagccttttttttaatgttggcttttcttctgttagatcagctccagaagcagcttatcctgtgtcatttaatctcatcagaatttaactaggattgcaatgaatgtacagtttactttgtggggcagctgacatccttcacccacgatgtggcatgtctgccaactcaccctcttttagcatcttcctcaggcggtccttacacacttctcttccagcttttgtgattctttcatatggaggtggagggttgtggctcatgctccgatgggttattgtggagtagagaaacccactggatgtggcacggactgaactcctcggctggtcctcagggttcctcaggggattttcttggatttacatgcagacgatcgtatcatcaacaaactactaaaccctgtctccaatattcatcctcgtgcc

SEQ ID NO: 158614 - DNA, 367 bp, Homo sapiens
ggcacgagaggaaggctcagcctgccggggagggccgaacccacatgacaaagagtgactccctgccctccttccgggtctccaccctgcctctggagtcacaccaccccgacccaaacaccatgggcggggccagccaccgggacagggctctctcggtgactgccaccgtacgggaaaccaatgggaatgaccctgccccaacccagcctccacatgctagtaatcacgaactggcctataacgtgtctcttccatctcatctcaccctgctcatatctcatcacttattacacctaataatcatatactcttcttgcgacataatatatcactataatacccatgggcaacatgacgcacaccg

SEQ ID NO: 158615 - DNA, 383 bp, Homo sapiens
ggcacgaggtctaactcgggagactatgaaatattgtactgggacattccaaatggctgcaaactaatcaggaatcgatcggattgtaaggacattgattggacgacatatacctgtgtgctaggatttcaagtatttggtgtctggccacaaggatctgatgggacagatatcaatgcactggtgcgatcccacaatatataggtgatagctgtttatcgtagagcatattcactgctatacagtaaactctctcgtcttatataacctatgctacaccttacgacgaacagatccgctatatactaattatctatatatagttctctttaatttcataaacacttcgtctatccacacgtgcatccaagttagataatccc

SEQ ID NO: 158616 - DNA, 333 bp, Homo sapiens
ggcacgagtgaagcgtttaggcatgtttaacatccagcactgtaagaagctgtccagctgggtgctgctgatgaaatacctgggcaatgccaccgccatcttcttcctgcctgatgaggggaaactacagcacctggaaaatgaactcacccacgatatcatcaccaagttcctggcagaccttctgtcttcattttcccaaactgtccattactggaacctatgatctgaagagcgtcctgggtcaactgggcatcactaaggtcttcagcaatggggctgacctctccggggtcacagaggaggcacccctgaagctctccaaggccgacg

SEQ ID NO: 158617 - DNA, 853 bp, Homo sapiens
gagtatcggcgattcttagtagacagacacctccagctgaccaccggcaatggcctgttcctcagcgagggcctgtatctagtggataagtttttggaggatgttgggaggttgtaccactcagaagccttgactgtcaacttcggggacaccgaagaggccaagaaacagatcaacgattacgtggagaagggtactcaagggaaaattgtggatttggtcaaggagcttgacagagacacagtttttgctctggtgaattacatcttctttaaaggcaaatgggagagaccctttgaagtcaaggacaccgaggaagaggacttccacgtggaccaggtgaccaccgtgaaggtgcctatgatgaagcgtttaggcatgtttaacatccagcactgtaagaagctgtccagctgggtgctgctgatgaaatacctgggcaatgccaccgccatcttcttcctgcctgatgaggggaaactacagcacctggaaaatgaactcacccacgatatcatcaccaagttcctggaaaatgaagacagaaggtctgccagcttacatttacccaaactgtccattactggaacctatgatctgaagagcgtcctgggtcaactgggcatgcactaaggtacttcggcagagggagccaacacgagaaaaggcgaacggaggcaaccaaggaatgtagaaaaacacagaacaacagaggaacagagagagtggcaacagcgacataaacacacaaccaaaaaagaaagcgagcacaacaaggaaacacaagagagaaagaaaacggaaaacaacggcaagaaggaccctttgtcttcttaatgattgaacaaaatac

SEQ ID NO: 158618 - DNA, 464 bp, Homo sapiens
  misc_feature (1)...(464): n = a,t,c or g
cacaaattcgcaattgctgtttgagggcatgggagaaaattcaggatctgggaactacttatcagtcttttaattctattagacaaggctcaaaggaaccatatcctgatttcattgctcgccttcaagacgcagcacagaaggctctcactgatnnnnnnnnnnnnnnnnnnnnnnnnnnnnnnnnnnnnnnnnnnnnnnnnnnnnnnnnnnnnnnnnnnnnnnnnnnnnnnnnnnnnnnnnnnnnnnnnnnnnnnnnnnnnnnnnnnnnnnnnnnnnnnnnnnnnnnnnnnnnnnnnnnnnnnnnnnnnnnnnnnnnnnnnnnnnnnnnnnnnnnnnnnnnnnnnnnnnnnnnnnnnnnnnnnnnnnnnnnnnnnnnnnnnnnnnnnnnnnnnnnnnnnnnnnnnnnnnnnnnnnnnnnnnnnnnnnnnnnnnnnnnnnnnnnnacggnaatctattctaat

SEQ ID NO: 158619 - DNA, 390 bp, Homo sapiens
agctgacgtggtctgcctgttattggagagatatattaagaatccagttgtggattgcagctgatattcttttgcgaatgcttgaagaagcacttctttatagtgaataccagaacatcagcaacactggactgtcatcccaaggattattgatattagcggagttgattcctgccattaagaggacgttggctcgccttctcgtgatcattgtgagcctggactatggcattgagaaacctcatttaggaacagtcatgcaccgcgtgatcggactgaggctgctatacttaatctttgcagatgctgaaggcgggattagagacattgagggttctaaccattcagctggaggtctctgatgacgctattgtatcagatattgactcc

SEQ ID NO: 158620 - DNA, 333 bp, Homo sapiens
agctgacgtggtctgcctgttattggaaagatatattaagaatccagttctggattgcagctgatattcgtttgggaatgcttgaaaaagcagttctttatagtgaacaccagaacatccgcaacactggactgtcatcccaaggcttattgatatttgcggagtcgattcctgccattaagaggacgttggctcgccttctcgtgatcattgcgagcctggactatggcattgagaaacctcatttaggaacaggcatgcaccgtgtgatcggactgatgcttctatacttaatctttgcaaatgctgaaagcgtgattagagtcattgggg

SEQ ID NO: 158621 - DNA, 361 bp, Homo sapiens; identical to SEQ ID NO: 158294

SEQ ID NO: 158622 - DNA, 1143 bp, Homo sapiens
gttcgttgccgtccggtccggaattcccgggtcgacccacgcgtccggatggctgcggtgtttctggtaacgctttatgaatactcgccgcttttctacatcgcggtggtctttacctgcttcatcgtgaccaccggcctggtattgggatggtttggttgggatgttccagtaattctgagaaattcagaagagacccagttcagcacaagagttttcaaaaagcaaatgagacaagtcaagaatccttttggcttagagatcactaatccatcttcagcttcaattacaactggcataaccttgacaacagattgccttgaagatagcctccttacatgctactgggggtgcagtgttcaaaaattatatgaagctctgcagaagcatgtttattgcttcagaataagcactccccaagcattagaagatgctctgtatagtgaatatctctatcaggaacagtatttgtatcctttcgtctgatatacccattagcactgaaaattagacttcttatggataaagtgttgctaacttattgatcattcttggtatactagaagcatgtttattgcttcagaataagcactccccatgcattagaacatgctctgtataccgaatatctgtatcaggaacaggatttgcatgctttcgtctgatatacccattagcactgataattagacttcttatggataaagtgccgctaacttattgatcattcttgggatactagaagcatgtttattgcttcagaataagcactcctcaagcattagaagatgctctgtggagtgaatatctctatcaggaacagcattttattaaaaaggatagcaaagaagaaatatattgtcagttaccaagagatactaacattgatgactttggtacagtacccagatctcgctatccattggtagcgctattgaccttatctgatgaggatgaccgggaaatttatgatattatttccatggtgtcagtgattcatattcctgataggacttataaactatcctgcagaatattgtatcaatatttactcttggctcaaggtcaatttcatgatcttaagcaacttttcatgtctgcaaataataatttcactccctccaacaattcctcttcagaaga

SEQ ID NO: 158623 - DNA, 768 bp, Homo sapiens
cgacatcaaggagaagctgtgctacgtcgccctggacttcgagcaggagatggccaccgccgcatcctcctcttctctggagaagagctacgagctgcccgatggccaggtcatcaccattggcaatgagcggttccggtgtccggaggcgctgttccagccttccttcctgggtatggaatcttgcggcatccacgagaccaccttcaactccatcatgaagtgtgacgtggacatccgcaaagacctgtacgccaacacggtgctgtcgggcggcaccaccatgtacccgggcattgccgacaggatgcagaaggagatcaccgccctggcgcccagcaccatgaagatcaagatcatcgcacccccagagcgcaagtactcggtgtggatcggtggctccatcctggcctcactgtccaccttccagcagatgtggattagcaagcaggagtacgacgagtcgggcccctccatcgtccaccgcaaatgcttctaaacggactcagcagatgcgtagcatttgctgcatgggttaattgagaatagaaatttgcccctggcaaatgcacacacctcatgctagcctcacgaaactggaataagccttcgaaaagaaattgtccttgaagcttgtatctgatatcagcactggattgtagaacttgttgctgattttgaccttgtattgaagttaactgttccccttggtatttgtttaataccctgtacatatctttgagttcaacctttagtacgtgtggcttg

SEQ ID NO: 158624 - DNA, 658 bp, Homo sapiens
  misc_feature (1)...(658): n = a,t,c or g
agctgtgctacgtcgccctggacttcgagcaagagatggccacggctgcttccagctcctccctggagaagagctaccagctgcctgacggccaggtcatcaccattggcaatgagcggttccgctgccctgaggcactcttccagccttccttcctgggcatggagtcctgtggcatccacgaaactaccttcaactccatcatgaagtgtgacgtggacatccgcaaagacctgtacgccaacacagtgctgtctggcggcaccaccatgtaccctggcattgccgacaggatgcagaaggagatcactgccctggcacccagcacaatgaagatcaagatcattgctcctcctgagcgcaagtactccgtgtggatcggcggctccatcctggcctcgctgtccaccttccagcagatgtggatcagcaagcaggagtatgacgagtccggcccctccatcgtccaccgcaaatgcttctaggcggactatgacttagttgcgttacaccctttcttgacaaaacctaacttgcgcagaaaacaagatgagattggcatggctttatttgtcttttttggtttgttatgggnnnnnnnnnnnngggggctggccccaggatttaaaaacggcaccggtgaaggtcactgcagccc

SEQ ID NO: 158625 - DNA, 1580 bp, Homo sapiens
accgcagcggacagcgccaagtgaagcctcgcttccctcccgcggcgaccagggcccgagccgagagtagcagttgtagctacccgcccagaaactagacacaatgtgcgacgaagacgagaccaccgccctcgtgtgcgacaatggctccggcctggtgaaagccggcttcgccggggatgacgcccctagggccgtgttcccgtccatcgtgggccgcccccgacaccagggcgtcatggtcggtatgggtcagaaagattcctacgtgggcgacgaggctcagagcaagagaggtatcctgaccctgaagtaccctatcgagcacggcatcatcaccaactgggatgacatggagaagatctggcaccacaccttctacaacgagcttcgcgtggctcccgaggagcaccccaccctgctcaccgaggcccccctcaatcccaaggccaaccgcgagaagatgacccagatcatgtttgagaccttcaacgtgcccgccatgtacgtggccatccaggccgtgctgtccctctacgcctccggaaggaccaccggcatcgtgctggactccggcgacggcgtcacccacaacgtgcccatttatgagggctacgcgctgccgcacgccatcatgcgcctggacctggcgggccgcgatctcaccgactacctgatgaagatcctcactgagcgtggctactccttcgtgaccacagctgagcgcgagatcgtgcgcgacatcaaggagaagctgtgctacgtggccctggacttcgagaacgagatggcgacgggccgccatccatccatcctcccatggaaaagagctacgagctgccagacggggcaggtcatcaccatcggcaacgagcgcttccgctgcccacatacactgcttccagccttctttcatcggtatgggagtcggcgggcatttcacgagaccaccttacaacagcatcatgaagtgtgacatcgacattcaggaaggaccttgtatgccaaccaacgtcatgttcggggggcacccacgattgtacccctgggaattcgctgacccgcatgcaagaaagagattcaccggcgctggcaccccaggcacccatggaagatcaaggattcattcgcccccgccggagcgcaaaatactcgggtgtggatcgggcggctcccatcctggccttcgctgtcccaccttccaagcaagatgtggatcaccgaagcagggagtacggacgaggccgggccctttccatcgtccaaccgcaaatgcttctagacacactccacctccaagcacgcgacttctcaaggacgacgaatcttctcaattgggggggcggctgagctccagccacccccgcagtcactttctttgttaacaacttcccgttgctgccatccgtaaacttgacacagtgtttataaccgtgtacatacattaactttattacctccattttgttatttttcggaaacaaagccctgtgggaagaaaatggaaactttgaagaagcattaaagtcattctggttaagctgcgtaaaaaaaaaaaaaaaaaaaagatgcggcgcaag

SEQ ID NO: 158626 - DNA, 287 bp, Homo sapiens
cggccgcgtcgacgggaactgggctgtgaatgaggggctctccatttttgtcattctggtttggctggggttgaacgtcttcctctttgtctggtattaccgggtttatgatattccacctaagttcttttacacaagaaaacttcttggggtaagtataaattccatcccatgcaatattggctggttcacatttctcatcagacattcttgttcatcttcctgttagcattttaaataaatattctgaccaacccaaacagtaccattagcctcactccctccat

SEQ ID NO: 158627 - DNA, 369 bp, Homo sapiens
ggcacgagctcggagcctgtcttccttctctcgtccaactctagcctccggccagctgagcctcgcttctctctagtggatgccacctccctgcacattgaatcgctgagcctgggagatgagggaatctacacctgccaggagatcctgaatgtgactcagtggttccaagtgtggctgcaggtggccagcggcccctatcagattgaggtccacatcgtggccaccggcacactccccaacggcaccctctatgcagccaggggctcccaggtggacttcagctgcaacagcagctccaggccaccacccgtggttgaatggtggttccaggccctgaattccagcagcgagtcctttggccacaac

SEQ ID NO: 158628 - DNA, 416 bp, Homo sapiens
aatcaaacacattatgctttgcaggcatcattgatttctcttgatttttatgaaaagcactttgatatctactatccactctccaaactggatttaattgctattcctgactttgcacctggagccatggaaaattggggcctcattacatatagggagacgtcactgctttttgaccccaagacctcttctgcttccgataaactgtgggtcaccagagtcatagcccatgaactggcgcaccagtggtttggcaacctggtcacaatggaatggtggaatgatatttggcttaatgagggttttgcaaaatacatggaacttatcgctgttaatgctacatatccagagctgcaatttgatgactattttttgaatgtgtgttttgaagtaattacaaaagattcattgaatcg

SEQ ID NO: 158629 - DNA, 396 bp, Homo sapiens
tctgaatactggggaacagaaagatatgacagagttttttactgatctaattaccaaaatcgaagaaatgtctcccgaactgaaaaataccgtcaaaagtttatttggaggtgtaattacaaacaatgttgtatccttggattgtgaacatgttagtcaaactgctgaagagttttatactgtgaggtgccaagtggctgatatgaagaacatttatgaatctcttgatgaagttactataaaagacactttggaaggtgataacatgtatacttgctctcattgtgggaagaaagtacgagctgaaaaaagggcatgttttaagaaattgcctcgcattttgagtttcaatactatgagatacacatttaatatggtcacgatgatgaaagagag

SEQ ID NO: 158630 - DNA, 555 bp, Homo sapiens
atggaatcaacctacatgcccatcaacagtggactagataaagaaaatgtggagagtgaatgcaaagcatataatcctagacctttctgtaaaacatacaccatggataagcagcctctgaatactggggaacagaaagatatgacagagttttttactgatctaattaccaaaatcgaagaaatgtctcccgaactgagcttacgatgtgaagaacttcatcttcatgcagaaaatctgtctaggcgggtctgggagctactgatgcttcttcctacatgtcctaatatgttgatggcattccagaatatctcagatgagcagggaagttacagtgatctttatccagattcagatgattcaagtgaagatcaagtggaaaatagtaaaaattcctggagttgcaagatcagtagtaatttcacttcgtcttcttccaaaactatttggtacttttcagcagtttgggagcagttacgatacacactggataacaatgttttaaagaagtcagtgatcattcaaaaagactcagagagctatgaatatgactga

SEQ ID NO: 158631 - DNA, 1048 bp, Homo sapiens; identical to SEQ ID NO: 119754

SEQ ID NO: 158632 - DNA, 407 bp, Homo sapiens
gcattcttcatggccaggaaggccatgggaggacattggactttcagctggctcctgtgcaacttccagattaccatacaggacatcaacgtgatcggaacagactacctgaccgtgctcaatgctatgcaccgctgtgtttgcctactgcgtccagtctggaaccataaccaccacaccgtgagccctgtcccgactgggatgattggtccctgggtgatggctctgctcctcacattgccagttatcattcgtgtgactacagtacctggtaaaacggtgacagtagcctgcacttttaacttttcgccatggaccaacgaccctattgagaggataaatgtggccgatgccatgttgacggcgagaggcatcatccggttcatcattgacttcagcgcacccac

SEQ ID NO: 158633 - DNA, 1930 bp, Homo sapiens
cccagacctagaactacccagagcaagaccacagctggtgaacagtccaggagcagacaagatggagacaaattcctctctccccacgaacatctctggagggacacctgctgtatctgctggctatctcttcctggatatcatcacttatctggtatttgcagtcacctttgtcctcggggtcctgggcaacgggcttgtgatctgggtggctggattccggatgacacacacagtcaccaccatcagttacctgaacctggccgtggctgacttctgtttcacctccactttgccattcttcatggtcaggaaggccatgggaggacattggcctttcggctggttcctgtgcaaattcgtctttaccatagtggacatcaacttgttcggaagtgtcttcctgatcgccctcattgctctggaccgctgtgtttgcgtcctgcatccagtctggacccagaaccaccgcaccgtgagcctggccaagaaggtgatcattgggccctgggtgatggctctgctcctcacattgccagttatcattcgtgtgactacagtacctggtaaaacggggacagtagcctgcacttttaacttttcgccctggaccaacgaccctaaagagaggataaatgtggccgttgccatgttgacggtgagaggcatcatccggttcatcattggcttcagcgcacccatgtccatcggttgctgtcagttatgggcttattgccaccaagatccacaagcaaggcttgattaaagtccaagtccggccctaaggggccctctcctttgtcgcaagaagccttttttctctgctggtcccccatatcaaggtggtggccccttaatagcccacaagtcaagaatcccgtgaagttaattgcaaaggcatgtaccaaaggaaattgggtattgcaagtggatgtgaacaaagtgcccctggccttcttcaacagctggccttcaaccccatggtcctagtctttcatgggcccaggacttccgggagaggctgatccacgcccttcccgccaagtctgggagagggcccttgaccgaggacttcaaccccaaaccagtgccacagcttaccaattctactttaccttcttgcagaggtggcgttacaggcaaagtgaggagggagctggggggacacttttcgagctcccagctcccagcttccgtctcaccttgagtttaggctgagccaccagggattttcctggcttaatttttagggattacccactcatcagaaaaaaaaaaaaaaagcctttgtgtcccctgatttggggagaataaacagatatgagtttattattgacttcttttttgattttggacctcagcctcgggtggtcagggtgggaaatgataggaagaagctgtcatctgcatcctagtttgcctgaaatgaacccaaataatacccattattattagtcctgaattatgagtagtgaatgatacccatcattctggcatcatgatgagtagtgtccacttccattctgaaaagtgccctgctgtgaaaaataaattatatagtcatcctaggtaaatgaaggaggagggagaagtgtgaaagagtatggcttaaatcagacaagatatacaagaagatactttatatagggcaggagcggtggctcatgcctgtaatcccagcactttgggaggccgaggcaggcggatcaccagaggtcaggaattcgagaacagcctggccaacatggtgaaaccctgtctctactaaaaatacaaaaattagctgggcgtagtggcaggctcccgtaatcccagctactcaggagaccgaggcaggagaatcgcttggacctggaaggcggaggttgtagtgagccaagaaaacgccactacactccagcctgggtgacagagagagactccggctcag

SEQ ID NO: 158634 - DNA, 386 bp, Homo sapiens
aaatgggatgctaggaaataggtttaaatcaggttttatttttaaagtgtatttacaggagacagcgggggaaacctggtcagttgagcaggtctgcagttggttggtggagaaaaatttaggagagctagttcatagatttcaagaggaagaagtaagtggggccgctcttcttgcacttaatgatcggatggttcagcaactggtaaagaaaattgggcaccaggctgttctgatggatttaattaaaaaatacaagcagaacactcaaggactgaagtccccagaaaaccccaaaaaggcagccctggtcatgcaaacagaagcagctcgagattacagggatgaagagtcctccagtccagccaggcatggggagcagatgt

SEQ ID NO: 158635 - DNA, 392 bp, Homo sapiens
tatccagggtgggctggacgcagatctccgggccacctgccttgaagagatgaccaagcgagacgtgcctgggttcgccatcgggggcctgagcgggggtgagagcaagtcgcagttctggcggatggtggcgctgagcacctctcggctgccgaaggacaagccccgatatctgatgggggttgggtatgttgtggatagggaagccagagccctacctgtgggaagtggattcctggggaccccctaccctgcttggggaggtggcatttgggggaaacggacacaggtctgatctgaggagactaggaagacatggctgtcccttgggggccattctgagggaatatggcccagtctggggcagtgtgagggttgggaggggccctggg

SEQ ID NO: 158636 - DNA, 711 bp, Homo sapiens
gtgttcaccactcttctactttttgaaaaagtttgtgaagaatttgtattaatttttcattaaaagttttgtagaattcatttaagaagctatttcagcctgggctcttctttgtgggtatcttttcaaaaactcatttaacctatttacttgatataggtttattcaagttttctacttctgagttggttttggtagtttgtgtcttcctaggaatttgtccacttcattgataatttattgacataaaattattcataatatgccttcataatcttttttatttatacaagttcagttgaaatgttccctccttcatttctgattttagtaatttgattatccttttttcctggtcagtctagcagaaggtgtgtcagttttactgatctttttatagaatcaacttttggttgcattgatttttctctacttttcttcactctatttcatttattctcatctaatcttttatatttccttctttctcctggctctaggtttagtttgctcttctttttccagggtcttaaggtgtaaagtgaggttagtgctatggtctttcttttctttttttttttttttttgagatggagtctcgctctgctgcccaggctggagtgcagtggtgcaatcttggctcactgcaagctctgcctcccaggttcacgccattctcctgcctcagcctcccgagtagctgggactaca

SEQ ID NO: 158637 - DNA, 1732 bp, Homo sapiens
gaagaagagcattcagcaactagttcctgaatataatgaaaaacagacacctgaaagtcttcctcagaatagcaatccagattggcatcctactaatttgacccttagtgatgagacttgtcagagatccaagaatctgaaagttggtgataaaagtccatctgtatcaccatcaatgcctgaaaatcagtcagcaaccaaagaactgggacagatgaacttaacagaacgagaaaaaatggacactggagttgtacttctctcagggaatgatactctccatgacctgtgccaatcacagctaccagaaaacaaagagagcaaagaagactatgtcttttatctaactgttctaagtagtttaactgaacgtttggattttgcagcagaacaagacttggagctgacatcagaggaagagcaagaaagacttaaaggatgcgaaaataagcagccacaagacaaagctatttttaaaacatgtagcccaacagagaagacacccaagaaacaaaacaagcaaattaatcttccacttttgcatctgcagaaaacgtctcaagaaccagaaatggctaaggattgtgatagagaggatatacctatatatccagtacttcctcatgtgcaaaaatctgaggaaatgcggattgaacaaggcaaattagagtggaaaaaccaattaaaactcgtcataaatgagttaaagcagaggtttggtgaaatttatgaaaaatacaaaattccggcttgtcctgaggaagagccactacttgataactctacaagaggaacagatgtgaaggatattccctttaatttgacaaataacatacctggttgtgaggaagaagatgcatctgaaatatctgtctcagtgattctgctagcctaccaagaatccaagaaagacacattttgtttgtgtgaacacttactgaaacttaagaataatcactgtgaccaacttacagtaaaacttaaacaaatggaaaatatggtcagtgtactacaaaatgagctatctgaaacaaaaaagacaaaattacagttagaacttcaaaaaattgaatgggagaaagagctgtacgatttgagacttgccttaaaacaagaaaatgaggagaaaagaaatgccgatatgttgtataataaagatagtgaacagttaagaataaaagaagaggagtgtgggaaagtggttgaaacaaagcaacaacttaaatggaatctgagaagacttgttaaggaattgaggacagtaagaaataacttggatctggttgtgcaggagagaaacgatgcccagaagcaactttctgaagaacaggatgccagaatattacaagatcagattctgacgagtaaacaaaaggaactagaaatggctcagaagaaaaggaatcctgagtttcattctgctgccaaaaatcttcaagctgagagtgaaaagcagattctttcactacaagagaagaacaaggagctgatggatgaatataatcatttaaaagaaagaatggatcaatgtgagaaagagaaagcaggaagaaaagtagttatgagagaattccagcaagaatggaccgatctcctaaaacaacaacctacgtcagaggctacctcacgttgtcacattaatttagatgagacacaggattcaaagaagaaattgggtcaaatcagaagtgaagtatgtatgaaacataacatgtcaacagttaatctatag

SEQ ID NO: 158638 - DNA, 387 bp, Homo sapiens
cggacgcgtgggcggacgcgtgggattctgtgccacatgcagataagttatgcgcaggtggagacaatgcgccagtccattgaagagctgcactactacgaactggagctatacgtcttacagtttcaccacttgcaggttgtctgggaaaatcacctttgcatttttttttattacttaaaatagctcctatatgtttgatgtctagatcacaaattttaagaaattataggagctgagtttgggacatctaacagctgagagtgagtgatactgagccatctgcataactgctggtgatagatacatattaagaatcttcagccatctgcgagtgtaagaggaaacatatacttacgcatttttaatttgccaattacatcctcc

SEQ ID NO: 158639 - DNA, 390 bp, Homo sapiens
gccgagcagctttagtcttagggggtccaaagtttgcctcaaagacccctcggccggtgactgaaccattggttctgctttcggggatgcagctggccaagctgatccgacagagaaaggtgaaatgtatagatgatgttcaggcttatatcaacagaatcaaggacgtgaacccaatgatcaatggaattgacaagcacaggtttgaggaagcgatgaatgaggctcatgctgtacatcaaaagcttgcagagaagcatgtcgatgtaatctcattgaaaaatacatggacttttcttgtggttgctttgaatgcctaggtttctttttctggtatactgaatagtccattctatttaaataatatacagtggtgtattacctatttag

SEQ ID NO: 158640 - DNA, 392 bp, Homo sapiens
ttcaaccttaatagtaacccatgcgctacataaagtcaaagtgggaaaaagcccaccggtgaggggctggctctctggaaaagtcagcctgccttgtcatttttcaacgatgcctactttgccacccagttacaacaccagtgaatttctccgcatcaaatggtctaagatcgaagtggacataactggcatacattagtcattatacccctgttcttaaaccctaatttgatatattcacacttaatctctctacactatacacctttttataattaccactcccttttcatcttacatttgctatttttttctctctctaactttcttactctataccatcataccattctttaatcttctcttctactcctctattatcccctcacttg

SEQ ID NO: 158641 - DNA, 363 bp, Homo sapiens
  misc_feature (1)...(363): n = a,t,c or g
ctgggatttacaggcatgaaaccatgcaggcccacccagaaggagggtttctaggtgaagatgtgtggaattgctgtgccctagattcccaggcccacctatgcccacncagggtgattctctggatgatacatggtggaaccagcagcagccattgaaggagtctctatcctggtttcagagcctatctccagggattggctttgttgatggctcttcctgtggagcagtcagggaggagctggctgctctgacagtccattgtctgatcttcaggttcccgtgtggcctggggttagggaagggcatggatgatggaagcctggagcggatcctagttggggagctgcttacatcccagcg

SEQ ID NO: 158642 - DNA, 852 bp, Homo sapiens
atgccagagagctggcttgctgcttttcctccatatggggatataaagaaagttgtcggtctgcagctcaaagaaggtctgcaccagaatctgaccatgcaagatagtattcagatctttgatttccagcttccaggactgttacggccaagttcggtactatggactctgaaaccctatcatacagcaggtttggccagtgatagggattcatacaaggggatcttggcttgcatgccctgcatgttcggctctaggagatccccattacgtgatattaagtctcatcaagctgaccttgaattggaagttaagaattccctggataccatccatagactggagagcgaattgaaaaagcagagtaagatccaaagccagatgaaagttgagaaagctcacttggaggaagaaattgcagagctcaagaagagccaggcccaggacaaagctaaacttcttgagatgcaagagtccatcaaggacctgagtgccatccgagcagatcttgctaataaattggctgaggaagagagagccaagaaagcagtgcttaaggacctttctgacctcactgcacaggcaaaatccagggatgaagaaacagctacaatcatcacacagttaaagctggaacgagatgtgcaccagagggagctgaaagatctcacatcatcattgcagagtgtgaaaacaaaacacgaacagaatatccaggagcttatgaagcactttaagaaagaaaagagtgaggctgagaatcatatcaggactctgaaggtacctctgctaaattatcctgatgatactgaaggaatttttctggtggctcatgaagttaataaagcgtaa

SEQ ID NO: 158643 - DNA, 996 bp, Homo sapiens
atgtgggtatggactgcagagggtcctactataccacaatttctgcacagtgtgggtaggacagttcaagctgctaatcctggtgaatgggtgctcgaaatgcctggatatttgtctgcgtgtggagcagagagggtcttcatatactacaatatatgtccaggaaggatggggctgcactggctgctgaaccaggaaaaacatataagcattgaagaggagcacttaaggaggatggaagaggccagattgcagctcaaggatcaacttctttgcttggagactgaacaggaatccattcttggtgtgataggaaaggaaattgatgcagcttgtaaaacattctccaaggactcagtggagaaattaaaaaacattttcatgttggccatcgacactgtgtctactagagtagttgtcctttgtagcagtatagattatgctctaagagtatatggaggatctaacttcacagattatggactggagagcgaattgaaaaagcagagtaagatccaaagccagatgaaagttgagaaagctcacttggaggaagaaattgcagagctcaagaagagccaggcccaggacaaagctaaacttcttgagatgcaagagtccatcaaggacctgagtgccatccgagcagatcttgctaataaattggctgaggaagagagagccaagaaagcagtgcttaaggacctttctgacctcactgcacaggcaaaatccagggatgaagaaacagctacaatcatcacacagttaaagctggaacgagatgtgcaccagagggagctgaaagatctcacatcatcattgcagagtgtgaaaacaaaacacgaacagaatatccaggagcttatgaagcactttaagaaagaaaagagtgaggctgagaatcatatcaggactctgaaggtacctctgctaaattatcctgatgatactgaaggaatttttctggtggctcatgaagttaataaagcgtaa

SEQ ID NO: 158644 - DNA, 1043 bp, Homo sapiens
acagaggtcaatttactattaaagtataaaatgtacattagtttcgatctacattttaattattttaggctggcagagaaagaactgtttcatattttaccatcgtacatataaaataaaatattcaatacttatcttgttttcaagattaaaaaaagaagctcccgcaaaggaacaagaacctgtgtctaaggaaattgcaagacctaacatggctgaaagagaaacagaaacatcaaattctgaaagtaaacaagataaagctgcttcttcaaaagaaaaaaatggatgtaatgcaaattcatttgaaggctcatcaacaacaaaaagtgaagaaagcataacagtttcagataaggaaaatgaaacctgtcttgcagaccaggaaactggctcaaaaaacatcgtcagttgtgattcaaatattggtgcagataaagtggaaaagaaaaaacaaatacaacacgtttgtcaggaaatggagttgaagatgtgccaaagttcagaaaacataatcttatctgatcagattaaagatcacaactccagtgaagccagattttcttcaaagaatattaaggatttgcgattagcatcagataatgtaagcattgatccgtttttttagaaaaagcacatgaacctgaatctgttagttctgatgttagcgagcaaggcagtattcatttggaacctctgactccatccgaggtacttgagtatgaagccacagagattcttcagaaaggtagtggtgatccttcagccaagactgatgaagtagtgtctgatcaaacagatgacattcctgggaggaaataaccctagcacaacagaggcaacagtagacctgggaagatgaaaaagaaagaagttgaaattagtcattttaagtttcagtgtacccaacgataagggcatttgggaacagtgctatccaggtgagctcagtggtgctgttgtaggttcagaaatggaaatatgtaagggaggtcacacatacactttacctgtatgttcaacctatgttatcatacaaaccg

SEQ ID NO: 158645 - DNA, 293 bp, Homo sapiens
gacaacagtcagcgctttcgagaaacctgttttgcatttgccttgacaccacaacaagtgcagcaaatcagtagttccatggatatttctgggaccaaatgtgacttcacagtacaggtccagttaaggttttgtttatcagaaaccaaagcgacccagccgaccaattaatatcacctcacttgtccgactgtccacaacagtaccaaacacgtttgttgtttcttggactgcagaattggagaaactattccatggcagtatatcttgtaaaacagtgtctcaacagtctt

SEQ ID NO: 158646 - DNA, 630 bp, Homo sapiens
cccacgcgtccgcggacttgtgggcagacattagtcagcgctttcgagaaacctgttttgcatttgccttgacaccacaacaagtgcagcaaatcagtagttccatggatatttctgggaccaaatgtgacttcacagtacaggtccagttaaggttttgtttatcagaaaccagttgtccacaagaagatcacttcccacccaatctttgtgtgaaagtgaatacaaaaccttgcagccttccaggttaccttccacctacaaaaaatggcgtggaaccaaagcgacccagccgaccaattaatatcacctcacttgtccgactgtccacaacagtaccaaacacgattgttgtttcttggactgcagaaattggaagaaactattccatggcagtatatcttgtaaaacagttgtcctcaacagttcttcttcagaggttacgagcaaagggaataaggaatccggatcattctagagctttaattaaagagaagttgactgcggatccagacagtgaaatagctacaaccagcctaagggtttctctactatgtccacttggtaaaatgcggctgacaattccgtgtcgggcccttacatgttctcatctacaatgttttgacggaa

SEQ ID NO: 158647 - DNA, 1106 bp, Homo sapiens
aacacgattgttgtttcttggactgcagaaattggaagaaactattccatggcagtatatcttgtaaaacagttgtcctcaacagttcttcttcagaggttacgagcaaagggaataaggaatccggatcattctagagctttaagtacgtatgataaacttatttcacttattcagctattttgttaaaggttagagtagtattttctcaactcaagaaattttagaatttgtttattcactggagcctgttgtgtagttcttagagtagttctgatatctttgtcatgagctatattttataatctatattttactaatcttaaaattaactttgtgaagtcagtgcacaaacatgggagaatattattctacaacttcataaaatcaatgtttaaggaattctgggaaatgggaagggcatcttggcataaatttcaagaaagttattttagattggtggtttatccaggaaaaatgtacagaattatatcatggcctcaccccctgcatttacaaagtgaagagagccagtggggtggtagaaataataattctgccattaatcaattatatgactgtggacaagtaacgctgctcctgagtttcatcttcctcatctgtaacaagaagtttatgccgtctgatttctaatgcttctgcgaagtctgggttcatacgtgtgaattactggatggtttgttttggatacgttgaatttgagattcaaggtcttcaaatggggctgtgctgacctctgtttttaagggttaaggtcagagggtttggcctttccaaagaggtgaactaagttcttcgtttattcttttatttgtgagagccgggggctgcgtggatttaggagtgagggctggggacttagaaacaaaacttttataggcaggtgttagatagctatcctttaaggacttttgatgtgaactgattaatgaagcccattatcagatttgtacttaggaacactctggtggaaagaactaagataatagcagctttccttttgtagcatagctattacccctttctgtaacttatttctgtggcagagtaaaagatcccactacccctgaataccaatataccct

SEQ ID NO: 158648 - DNA, 2298 bp, Homo sapiens
gtgtttgaagtggtggaacgtgtagaagagttaagaaggaagtggccagtagcgtgggggaagttagatgatggcagtattggtgtggtgactccatatgctgatcaagtgtttagaatacgtgctgaacttcgaaaaaagagattatctgatgttaatgtagaaagggtgctaaatgttcaaggaaagcaattcagagttttgtttcttagcacagtacgtacaagacatacttgtaaacataaacagacaccaattaaaaagaaagagcaacttctggaagattccacagaggacttagattatggttttttatctaactacaagcttctcaatactgccatcacaagagcacaatccctggttgctgtggtgggtgatcccattgctctgtgctctattggaagatgcaggaaattttgggaacggtttattgccctgtgtcatgaaaacagtagcctacatggaatcacttttgaacagatcaaagcccagttagaggctttagaactaaagaagacatatgtgttgaatccgctggcacctgaatttatcccccgggctctaagactgcagcattcaggaagtaccaacaaacagcagcaatcaccacccaaggggaaaagtcttcatcatacccagaatgatcacttccagaatgatggaattgttcagcccaatccttctgtacttattggcaatcctattagagcatatactcctccaccccctcttggacctcacccaaatttgggaaaatctccaagccctgttcaaagaatagatcctcacactgggacaagtattctttatgtacctgctgtctatggagggaatgtagttatgtcggtgcctttacctgtaccatggacaggataccagggtaggtttgcagttgatcctcgaattattacacatcaggcagcaatggcctataacatgaacctattacagacacatggacgaggatctcctattccttatggccttggacatcacccacctgtcaccataggccagccacaaaatcagcatcaggagaaggatcaacatgagcaaaatcgaaatggtaaaagtgatacaaataattccggacctgaaattaataagattcgaacaccagagaaaaagccaacagaaccaaaacagctaccaagaccaccctttccaattccacagcagcacaccttgttaaatcagcagcagaataatttgcctgaacaaccaaatcagataccacctcagccaaatcaggcgggacccaacaatgctttttttaatagtgcagttgctcatcggccacagtctcctcctgcagaagctgtaattccggagcagcagccccctcccatgctgcaagaaggccacagtcctctgagagccattgcacaacccggccccattcttccttcacatctgaatagcttcattgatgagaacccctcgggattacctataggggaggctttagatcgtatacatgggagtgtcgctctggaaacattaaggcagcagcaggcacggttccagcagtggagcgagcatcatgcctttctcagtcagggcagcgctccatacccacaccatcaccatcctcacctccagcatcttcctcagccgcccctgggattacatcagccgccagtgagggcagactggaagctcaccagcagtgccgaagatgaagtggagaccacatactcaaggctggagatagatgaagaagctggagaagaaaagttggaagctagcagaggttggttcatgaggtttaaggaaagaagccatccccataacataaaagtgcaaggtgaaacagcaagtgctaatatagaagctgcagcaagttacccagaagatctagctaagatcattgatgaagatggctacaccaaactacagattttctgtgtagacaaaacagcctcttattggaagaagatgctgtctaggactttctcagcgccacccaagactgtcaaaccccctgaggatcaactgaagtcggagaacctcgaggtgtccagttccttcaactacagtgtgctgcagcatcttggccagtttccaccccttatgcctaacaagcagatcgcggagtcggccaatagcagtagcccccagagctctgcggggggcaagcccgccatgtcctatgccagcgctctgcgggcccctccaaagcccaggccccctcctgagcaggccaagaagagtagcgaccctctgtctctcttccaggaactgagcctagggagctcatctggcagcaatggcttttactcatattttaaataa

SEQ ID NO: 158649 - DNA, 6274 bp, Homo sapiens
gaaagtaatgacaggatttggatgaagtaatggatcactaatgaactacagtgctggtgagatgtgtaagaaattataaagagctctgatgggctatttgggtgatacccagtgcagtgaactgcaggatttttgtccctgagtcatggaagacagaagagctgaaaagtcatgtgaacaagcatgtgaatcacttaagaggcaggactatgaaatggccctcaagcactgcacagaggcccttctttctcttggccagtactccatggcagacttcacagggccttgtccattggaaatagaacgcatcacaatcgagagtcttctctacagaattgcctcatttttgcaactgaaaaattatgtgcaagctgatgaagattgtagacatgtgctgggagaaggactggccaagggagaagatgcctttcgggcagtgctttgctgcatgcagctgaaagggaagctccaacctgtatccaccattcttgccaagtcactcacaggagagtccctgaatgggatggtaacaaaggatttgacaagactaaaaacacttctctcagaaacagagacagcaactagtaacgccctctctggatatcacgtggaagacttagatgaggggtcttgtaatggttggcatttccgcccaccacctaggggaatcacaagcagcgaggaatatactttgtgtaaaagatttttagaacaaggaatctgtaggtatggtgcccagtgtacttcagcacattcccaggaagaactagcagaatggcagaaaagatatgcttcacggctgataaaattgaaacagcaaaatgagaataaacagctctcaggcagttacatggaaaccttgatagaaaagtggatgaattcattgtctcctgagaaagtgcttagtgaatgtatagaaggagtaaaggtagagcacaatcctgacctgtcagttactgtcagcaccaaaaaatcccaccagacatggacctttgctctcacttgtaagcctgcaagaatgctgtatcgtgtagcattgctttatgatgctcatcgtcctcattttagtatcattgcaatatctgccggagatagtactacccaggtatcacaagaagtcccagaaaactgtcaagaatggataggaggaaagatggcccaaaatggattagatcattacgtgtataaagtcgggatagcatttaacacagaaatatttggaacttttcgccaaaccatagttttcgactttggattggaaccagtactcatgcaaagagtaatgattgatgcagcttctacagaagatctcgaatacctgatgcatgcaaaacagcagctagtaaccacagctaaacgttgggattcttcctctaagactattatagattttgaacctaatgaaactactgatttggagaagagccttcttatcagataccaaattcccctctctgctgaccagctatttactcagtccgttttagacaaatcattgaccaagagcaactatcagtcacggttacatgaccttctttatattgaggagatagcccagtataaagaaatcagcaagttcaaccttaaagtgcaattgcagattctggcaagcttcatgctcactggtgtttctggaggtgcaaagtatgctcagaatggacaactttttggtcgctttaagcttactgaaacactttctgaagatactttggctggacgactggtgatgaccaaagtcaatgctgtttatttattaccagtccctaaacagaagttagtacagacccagggaaccaaagagaaggtttatgaagctactattgaagaaaaaacaaaggaatatatatttttaaggctatctagggaatgctgtgaagaacttaatcttcggcctgactgtgacacacaggttgaacttcagtttcaattaaatcgattacccctctgtgaaatgcactatgcactagacaggatcaaggacaatggggttttgtttccagacatcagtatgactcccaccataccatggagtcctaacagacaatgggatgaacagttggatcctcgactaaatgcaaaacagaaagaggctgttctggccattaccactccacttgcaatccagctgccgcctgtgcttatcatcggaccctatgggacaggcaaaacgttcactctagctcaggctgtcaaacatattctgcagcaacaggagactaggattctcatttgcacccattctaatagtgctgctgatctctacataaaggattatttacatccatatgtagaagcaggcaatccccaggcaagacctctcagggtatatttcagaaatcgctgggtaaagactgtccacccagttgtgcatcagtactgtttgatctcaagcgcacattccacctttcagatgccccagaaagaagatattcttaaacatcgagtggtggttgttaccttgaatacttcccagtacctctgtcagttggaccttgaacctgggttttttacacacattctattagatgaagctgcccaggccatggagtgtgaaaccattatgcctctagcattagcaactcaaaacactcggattgtcttggctggtgatcacatgcagctcagtccttttgtttacagcgagtttgccagggagagaaaccttcacgtttcattacttgaccgactctatgagcattaccctgctgagttcccatgtaggattctcctgtgtgagaactaccgctcccatgaagctatcatcaattatacctctgagcttttctatgagggcaaactgatggccagtgggaagcagccagcacacaaagatttctacccactaactttctttacagcacgaggagaagatgtacaagaaaaaaatagcacagctttttataataatgcagaggtgtttgaagtggtggaacgtgtagaagagttaagaaggaagtggccagtagcgtgggggaagttagatgatggcagtattggtgtggtgactccatatgctgatcaagtgtttagaatacgtgctgaacttcgaaaaaagagattatctgatgttaatgtagaaagggtgctaaatgttcaaggaaagcaattcagagttttgtttcttagcacagtacgtacaagacatacttgtaaacataaacagacaccaattaaaaagaaagagcaacttctggaagattccacagaggacttagattatggttttttatctaactacaagcttctcaatactgccatcacaagagcacaatccctggttgctgtggtgggtgatcccattgctctgtgctctattggaagatgcaggaaattttgggaacggtttattgccctgtgtcatgaaaacagtagcctacatggaatcacttttgaacagatcaaagcccagttagaggctttagaactaaagaagacatatgtgttgaatccgctggcacctgaatttatcccccgggctctaagactgcagcattcaggaagtaccaacaaacagcagcaatcaccacccaaggggaaaagtcttcatcatacccagaatgatcacttccagaatgatggaattgttcagcccaatccttctgtacttattggcaatcctattagagcatatactcctccaccccctcttggacctcacccaaatttgggaaaatctccaagccctgttcaaagaatagatcctcacactgggacaagtattctttatgtacctgctgtctatggagggaatgtagttatgtcggtgcctttacctgtaccatggacaggataccagggtaggtttgcagttgatcctcgaattattacacatcaggcagcaatggcctataacatgaacctattacagacacatggacgaggatctcctattccttatggccttggacatcacccacctgtcaccataggccagccacaaaatcagcatcaggagaaggatcaacatgagcaaaatcgaaatggtaaaagtgatacaaataattccggacctgaaattaataagattcgaacaccagagaaaaagccaacagaaccaaaacaggttgatttggaatcaaatccacagaacagaagtcctgaatcacgtcctagtgttgtttatcccagtaccaaatttcctcgcaaagataatctcaacccaagacacataaatcttccccttcctgctccccacgcacagtatgcaatccctaatcgccactttcatccccttccccagctaccaagaccaccctttccaattccacagcagcacaccttgttaaatcagcagcagaataatttgcctgaacaaccaaatcagataccacctcagccaaatcaggtagtccagcagcaaagtcagttgaatcagcagcctcagcagccacctcctcagctttctcctgcatatcaggcgggacccaacaatgctttttttaatagtgcagttgctcatcggccacagtctcctcctgcagaagctgtaattccggagcagcagccccctcccatgctgcaagaaggccacagtcctctgagagccattgcacaacccggccccattcttccttcacatctgaatagcttcattgatgagaacccctcgggattacctataggggaggctttagatcgtatacatgggagtgtcgctctggaaacattaaggcagcagcaggcacggttccagcagtggagcgagcatcatgcctttctcagtcagggcagcgttccatacccacaccatcaccatcctcacctccagcatcttcctcagccgcccctgggattacatcagccgccagtgagggcagactggaagctcaccagcagtgccgaagatgaagtggagaccacatactcaaggtttcaagacttaatcagagaactgtctcatcgtgatcaaagtgaaacacgggaactagctgaaatgccaccacctcaatcaagacttttgcaatatagacaagtacagagtagaagcccaccagcagtcccatctcccccatccagtacagaccacagtagccacttttctaactttaatgataacagcagagacattgaagtagccagcaacccagcatttccacagcgcctcccaccccagatattcaactcacctttctcgttgccatctgaacaccttgcccctcctcccttgaaatacctggcacctgatggagcatggacttttgctaacttgcaacagaatcacctaatggggccaggttttccctatggcctacctccattgcctcacaggccaccgcagaacccttttgtacaaatacagaatcatcaacatgctattggtcaagagccatttcacccattgtcatctcgaacagtatcttcttcttcgctccctagcttagaagagtatgagcccagaggacctggtcggcccttgtaccaaagaagaatctcatctagctcagttcaaccttgttctgaagaagtaagcactcctcaagacagtctggctcagtgtaaagagcttcaggaccacagtaaccaatcttctttcaacttttcatccccggagtcctgggtaaacaccacctcatctactccttatcagaacattccgtgcaatggatccagcaggacagctcagcccagagagttgatagcgccacccaagactgtcaaaccccctgaggatcaactgaagtcggagaacctcgaggtgtccagttccttcaactacagtgtgctgcagcatcttggccagtttccaccccttatgcctaacaagcagatcgcggagtcggccaatagcagtagcccccagagctctgcggggggcaagcccgccatgtcctatgccagcgctctgcgggcccctccaaagcccaggccccctcctgagcaggccaagaagagtagcgaccctctgtctctcttccaggaactgagcctagggagctcatctggcagcaatggcttttactcatattttaaataatcacttttttttccctcaagggagaatgttttaatttctgtttgtatcagtagaattaaggtagttggacttcatctatagatgcacagttccctttgttttaatattaaatatgttctcacttaattgctttgctgctagacttgcaactaatttttttaaagtatattccattattttgcatttttgatgtgtcaaaactttgacagcttttatgtagaataaaaaaatttttaaatttgtgtattgttacatatgtttgcatcaagctagcagccaagaggttaattgtgcaactat

SEQ ID NO: 158650 - DNA, 753 bp, Homo sapiens
ataaatatgttaataatttcatcctgaagaactttcctgctttattgagtactggggagtttctaaaactcccttttgaacgacttgcatttgtgctttccagtaatagtcttaagcactgtaccgaacttgaactctttaaggcagcctgtcgctggctaaggttggaagaccctcggatggattatgctgcaaagttaatgaagaatattcgatttccactgatgacaccacaggatctcatcaattacgtgcagacagtagatttcatgagaacagacaatacctgcgtgaatttgcttttggaagctagcaattaccaaatgatgccatatatgcagccagtgatgcagtcagatagaactgccattcgatctgactccactcacttggttacattaggaggagttttgaggcagcagctggttgtcagtaaagaattacggatgtatgatgaaagggcacaagaatggagatctttagccccaatggatgctccccgttaccagcatggtattgctgtcattggaaactttctttatgtagttggtggtcagagtaattatgatacaaaaggaaaacctgctgttgatacagttttcagatttgatcctcggtataataaatggatgcaggttgcctcattaaatgaaaagcgcacattctttcacttgagtgcctgcaaagctcatttgtatgcagttggtcggcacagtgcagctggtgaactggccacagtagaatgttacaacc

SEQ ID NO: 158651 - DNA, 372 bp, Homo sapiens
cttaggtgctaatgttcctagaaactatgttgttgattttaactgttaaaggctaacatatttttctgacttcctggaatttttacatcaacagggagctccatttaaataacaacctgttacgagttctaccttttgagctgggaaaactgtttcaattgcagactttaggcctgaaaggtatgacttccatatttgtacttcttatggtttgtgaatatgtctttgaatctaaggaagccaagaagctttctgctaggggattcttttaaagactcattttcccccagacttcatcagcttcttagctatatcgcaatggttttatcttctctgttcagctgtagactatctactaatctttgtttcttt

SEQ ID NO: 158652 - DNA, 410 bp, Homo sapiens
cccacgcgtccgggcaagtacatcgtgacaggtggggaggacgacttggtgacagtctggtcctttgtagactgccgagtaatagccagaggccacgggcacaagtcctgggtcagtgttgtagcgtttgacccttataccactagtgtagaagaaggtgaccctatggagtttagtggcagcgatgaggacttccaagaccttcttcattttggctgagattgagcaaatagtacacagttcaggctctccaaacggaattttacgtacagtcgccccgttagtgtcactgatctgttttgtgttctttggctattaatcacttatttttatttgtgtttttttttatcattttcatttttcgtcttcgcttcttgtcagagttctttttttctcttttgttcttttct

SEQ ID NO: 158653 - DNA, 426 bp, Homo sapiens
gagatttctttcaaggcaaatgacactttgattgggtggtgtgtgaggaaggggaacggttacgtttctgaaacaatcccggggtctgtaatacttccacaagattctgtttgaatatctccctcttctcccctcatccaactcttactactggttggtaactggtgttttgtcattgatgggttcctttcttctgtgaccttaggcaaggtcagcctgtatatcccatcacgggtggattcaggcaaccctacccatcctcactgtcagtcgacacttccatgtccaggtaggtggtggtggaaactggggctctcgaggacaatttgcttttctcgtgcttgcatcctgggcgccatatgcttgcttttttgttgctaggatgtgggatactttaatcatgtgtttgctgttctgtgttccttg

SEQ ID NO: 158654 - DNA, 551 bp, Homo sapiens
ttactctaagcgcggctctcagaagggtgcaagaagaatcagtgatttttttttttttcgaagcactgtgtttagatcaagatgtctggtaaagcaaatgcttccaagaaaaacgctcaacagttaaaaagaaatccaaagagaaaaaaggataatgaggaagttgtgttgtcagagaataaggttagaaacacagtgaaaaaaaataaaaatcatctgaaagatctgtcttctgaaggacaaacaaagcacactaacctaaaacacggaaagacagcagccagcaagagaaaaacctggcaacctctgtcaaagagtaccagagaccatttgcaaactatgatggaatcagtaataatgacaattttgagtaacagtattaaagaaaaagaagaaatacaataccatctcaacttcctgaagaaaagattgctacaacagtgtgaaactctgaaagtccctcccaaaaagatggaagatttaactaatgtatcaagtctactgaatatggaaagggcacgagacaaagctaatgaagaaggtctggcatt

SEQ ID NO: 158655 - DNA, 389 bp, Homo sapiens
ccagtgatggcagtgcttcaaaaggcaaacattatttcagtgaacctgtacacattttaaagagggcttttgcaagaactgtctcaggggtaagccatgttttaaaaaatctcagcttttctcttcagtcctcagatacattttgatgtttatagtttacctgctcttgtaagtttatcttagcctagatttataaactcagatttggttttgtattcacatttatattctagaccacagataaagtatactttaaatcatacaaaaatggaggtgctggcctatgattttaacatgaccagatgaattggccttgctgtttttgaaacaaataacgatttgcttttctagtaaatcatatatgaatgcatatgctgaatgaattagag

SEQ ID NO: 158656 - DNA, 546 bp, Homo sapiens; identical to SEQ ID NO: 142654
  misc_feature (1)...(546): n = a,t,c or g

SEQ ID NO: 158657 - DNA, 408 bp, Homo sapiens
gcacgagacacatcgtgcgggaagtcgacaggccgggatccaaggtgaacaagaaggaggtggtggaggctgtgaccattgtagagaacacacccatggtggttgtgggcattgtgggctacgtggaacccctcgaggctccggaccttcaagactgtctttgctgagcacatcagtgatgaatgcaagaggcgtttctataagaattggaataaatctaagaagattgaccttaagttcattgacaccacctccaagttatgccatggccgattacagaccatggaggagaagaaagcattcatgggaccactgaagaaagaccgaattgcaaaggaagaaggagcttaataccaggaacagattttgcagttggtggggtctcaataaaagttatattccacagaa

SEQ ID NO: 158658 - DNA, 1365 bp, Homo sapiens
gtgaaccacgcgcccgcccacgcgtccgatggcgtgatgtctcacagaaagttctccgctcccagacattgtttccctcggcttcctgcctcggaagcgcagcagccaggcatcgtgggaaggtgaagagcttccctatggatgacccatccaaggccggtccacctcacagccttccctgggatacaaggctgggcatgactcacatcgtgcgggaaggtcgacagggccgggatccaaggtgaacaagaaggacggtggtggaaggctgtgaccattgtatgagacaccacccactggtgtctgctgggcattgtgggctacgttggaaacccctccgaaggcctccgggacctttcaagacttgtcttttgcttgagcacatcagttattgaatgccaagaaggcgttttctataaagaatttgggcattaaaatcttaagaaggaaggcctttaccaaagtactgcaaagaaattggcaaggatgaagattggcaagaagccagcttggaagaaggactttcagcagcattgaaagaagttacttgcccaagttcatccgtgttcaattgcccaaacccagattgcgcctgcttcctcttgcgccagaaagaaggcccacctgatggagatccaggttgaacggaggcactgtggcccgagaaagctgggactgggcccgcgagaagcttgaagcagcaggtacctgtgaaccaagtgtttgggcaagatgagatgattcgacgtcatccggggtgaccaagggcaaaaggcttcaaaggggttaccaggtcgtgtgccaaccaattagcttccctttaaggcccaacctaggctctgtccagggttgcctgttttggggcatggcatcctgctcgtgcacactggcatgtggcacgcgctgggcagaaaggctaccagccttacacccttcttgttcattcagatttataagattggccagggctaccttatcaaggaccctggaggggtcatctgcacgacaatcccctcctgggcctgtgctgatccgatgctcgttttccagggtggctttgtccactatggtgaagtgacctgtgaacagtgctgaggaaagcctggctcctcgtaatcctaaatcccttcccctcttggcccatagtccttgctggtgcagacgaagcggcgggctctggagaagattgaccttaagttcattgacaccacctccaagtttggccatggccgcttccagaccatggaggagaagaaagcattcatgggaccactgaagaaagaccgaattgcaaaggaagaaggagcttaatgccaggaacagattttgcagttggtggggtctcaataaaattattttccactg

SEQ ID NO: 158659 - DNA, 375 bp, Homo sapiens
cagaacattgctcatataatagggcccccaaacaggtgtgagcacgcagcctggatcatcaacgacctcttccagagctgcaggagaggtccaccaggtcctccagggggtccaggcatgccccagggggcccgagccagagaaagaggccaaggcacttgggatacccctggcgggcaaatgtccttctccatccccgctcacaagagtgggttggtcatcggcctaggtggcgataatgtgaaagccataacccaacaaacgggagctttggtagagatttcccggcagctgccacccaccggggaccccaactacaagttgttaatcatccggggttcaccccaacagattgaccacaccaagcctcgtgcc

SEQ ID NO: 158660 - DNA, 399 bp, Homo sapiens
ctagatgtgaaattaattgaaggtcttgtggtaaaggctggaaccacagtcagattccctgctattataagaggtgtgcctgttcctactgcaaagtggacaaccgatgggagtgagattaaaaccgatgagcactacacagttgaaacagacaacttctcatcagtacttaccattaagaactgcttaaggagagacactggggaatatcaaatcacagtttccaatgcagccggtagcaaaacagtagccgtacatcttactgttcttgatgttcctgggccaccaacaggtcctattaatattctggatgttactcctgaacacatgactatctcatggcagccacctaaggatgatggaggaagccctgtgataaattatattgttgagatacag

SEQ ID NO: 158661 - DNA, 3178 bp, Homo sapiens; identical to SEQ ID NO: 158600

SEQ ID NO: 158662 - DNA, 1812 bp, Homo sapiens
  misc_feature (1)...(1812): n = a,t,c or g
tttttttttttttttttaaccgataactttttttattgcaagcagatctaattaaataacaaagtccaagaaacacctgcctttaaggcactctccctaacaaactgagttatattccttgtaaaatataatagagaaataaaaatctatggggaaagggtcactctaaagatactttttatttaaatattttttggaagattatatttgtatatgtatcatcataaaatataatcttccaaaaaacaaatgtaaaactaagtgcaaatccactttttcaggaacaaagaaaatcatttagaaaatgtgattatgctaaaagaggcaggttaggtttcccaaggctgctcaaggtggaagcttaagaccaacttttggtttgagtacacaagtgatatttaccattttcatatacttagtgatatgcctgttgccatacctgggcaaaataaaactgatagtaagtcctataataataaaagaaacaacaattacctaagtaaacaattcctagatgatggaagagtaaccctcccatttaagcctacagaccttagatgtctaaaaaaatatgtgtcctgatctgtacacagttagtgggagcacacctatataaaatccctttgcatgacaccattcaacaatattttttaaaatcctacaaaaattttaaagtttcacttccctagcaaaatatcttcagtcaagaaattagtcctttgaaaaattnatgaaaattgttgtgggaaatatttatacaaattattactgataatgcacatatattttgaaacattgtttcctagaagcaataaaatataacctatttaggagataacccaaatgatttgtaaaaaaattaacttgtagaaaagggaaggatgttgtgtaaaatcaagtcaattatttgaggtatgttataatattgagtacttatgtactaagtcacacccagccagtcaataactgagaaatcagaataaaataataatttcaaagaattacataaatacagggccttttgagatttttggcaattgtaaacaaaaacgaatggtttttacaattcagtgtaattctacgaatatttatttggcacccatgttaggcactgaggctacacagcagtgaaataggcctagttgttcctcaactagagaacatagttggttaatgtagctgcactgaattgtagctgtttagaagataatataccctgaggctttttaaagtatactattactataagaagtaaaattattttatacttataaattttgttttggattattcaactgaatttggagtgttcagaattttcatggcggttgagacaaggaagaggtataatgctatttttttttccttttctttttttttttgagacggaatctcactctgttgcccagactggagtgcaatggtgcgatctcggctcactgcaacctccacctcccaggtttaagtgattctcctgccttagcctcctcagtatcttggattacagacgtgcgccaccatctctggctaatttttgtatttttagtagagacggggtttcgccatgttggccaggctagtctcaaactcccgacctcaggagatctacccaccttggcctcccaaagtgctgggattacaggcgtgagccactatgcctggctaatttttgtatttttagtagagacagagtttcaccatgttggccaggctggtctcgaactcctggccccaagtgatccacctgcctaggccttccaaagtgctgggattacaggcgtgagccactgcacccggctgacctgtgcccct

SEQ ID NO: 158663 - DNA, 346 bp, Homo sapiens
cagatgcattagcttttgtaataaaagtctttgcagctgaagaagtagatggttgctcagtgacaactggatctacaaccactcggttgcttctggttcgaaccacagaactagattctgttttaccgtttatctgagcagcattgtgtcttggcggtattgatcgtgtaggtgtagagaatgcagaggtagagctttctgattttagctggggttttaagatcctttttttcctttcagggactagtatagctttagttaaaagattaaaaatcctccacatcataggaacttgcatgtcaaattatcattcttgatgcagcactactggaaacagagctgcttc

SEQ ID NO: 158664 - DNA, 1916 bp, Homo sapiens
cctggaagccctattgtgaaatctgctaaattcgtgactgatcttcttctacattttataaaggatcagacttgttataacataattccactttataattcaatgaagaagaaagttttgtctgattctgaggatgaagagaaagatgctgatgtgccaggaacttctactcgaaaaaggaaggaccatcagcctagaagaagattacgtaatagagcccagtcttacgatattcaagcatggaagaaacagtgtgaagaattgttaaatctcatatttcaatgtgaagattcagagcctttccgtcagccggtagatctccttgaatatccagactacagagacatcattgacactccaatggattttgctaccgttagagaaactttagaggctgggaattatgagtcaccaatggagttatgtaaagatgtcagacttattttcagtaattccaaagcatatacaccaagcaaaagatcaaggatttacagcatgagtttgcgcttgtctgcattctttgaagaacacattagttcagttttatcagattataaatctgctcttcgtttttataaaagaaataccataaccaaaaggaggaagaaaagaaacagaagcagctctgtttccagtagtgctgcatcaagccctgaaaggaaaaaaaggatcttaaaaccccagctaaaatcagaaagctctacctctgcattctctacacctacacgatcaataccgccaagacacaatgctgctcagataaacggtaaaacagaatctagttctgtggttcgaaccagaagcaaccgagtggttgtagatccagttgtcactgagcaaccatctacttcttcagctgcaaagacttttattacaaaagctaatgcatctgcaataccagggaaaacaatactagagaattctgtgaaacattccaaagctttgaatactctttccagtcctggtcaatccagttttagtcatggcactaggaataattctgcaaaagaaaacatggaaaaggaaaagccagtcaaacgtaaaatgaagtcatctgtactcccaaaggcgtccactctttcaaagtcatcagctgtcattgagcaaggaggttgtaaggaacaacggttcttgtaccagggaccctttcaagtaaatggccatggaggacagccatcaaaacttgtgaagaggggacctgggaaggaaacctaaagtagaagttaataccaatagtggtgaaattatacacaagaaaaggggtagaaagcccaaaaagcttacagtatgccaaagccagaagatttaggagccaaattattgttgcatcccatcagagatgaagtacttccttcttcaacatgcaattttctttctgaaactaataatgtaaaggaagatttgttacagaaaaagaatcgttgaggtagtaagcccaaaaggaagatgaagacacaaaaattagatgcagatctcctagtccctgcaagtgtcaaagtgttaaggagaagtaaccgaaaaaagatagatgatcctatagatgaggaagaagagtttgaagaacctcaaaggctctgaacccccacatgagaactagaaatcaaggtcgaaggacagctttctataatgaggatgactctgaagaggagcaaaggcagctgttgttcgaagacacctctttaacttttggaacttctagtagaggacgagtccgaaagttgactgaaaaagcaaaagctaatttaattggttggtaacttgtaccaaaatattttacttcaaaatctataaagcaggtacagttaaggaataagtagaactaaggcttctgcttccttgctgctgtggtggagtagggaatgttatgatttgatttgcaaaaaaaaaaaaaaaaaaaaaaaaaaaagtcgtatcga

SEQ ID NO: 158665 - DNA, 397 bp, Homo sapiens
cccacgcgtccggtcttttatagcctgtaccagagattaaagttgtgccacatctgccacccataaccatggaggaagtacccccactgagtggtactgatgcagatcttctggtcccatatgatatctatgtgctaagcccatgttgtaaccttaaatgtctgatacaagcttgtttatgatatccagactccatttatttgacgtcatttgccttgcacttgtaggtcttattccgatgtatctcatctattgctaagggtattcaaactagtaatgttataatattcaaataccagtctcctatattctggctttattatgaggtacaggtttgagagttactgtaagagcagttttaaaatagctagtatcactatcttattataatccaatc

SEQ ID NO: 158666 - DNA, 491 bp, Homo sapiens
  misc_feature (1)...(491): n = a,t,c or g
nnnnnnnnnnnnnnnntggaaccctttggatgataacgatgtggagggcgaccaagcgtgggggactacgacgacgccacacgtacgatcaccggatgccgaaacgctcgttgtttaccggccatgacctggacgatgacaacgagacgcatgaatgagctgcatatactctctaagtggacacttgacccatgtctgaagtatgaaaacagtagacagcggctgacgaacgttaaccgtgactactatttgtagccacccatgctggggaaggacaagaaggagaaggaaaaggcgctgaagcgcaagatcaccaaggaggagaaggagctgcgcctgaagctgaggccgctgtaccagttcatgtcatgcaaggagtttgatgacctttttgaaaacatgcacaaagaaaaaatgctccgggccaagatccgagaactgcagcggtaccggcgaaacgggatcaccaagatggaagagtcggcagagtn

SEQ ID NO: 158667 - DNA, 413 bp, Homo sapiens
cccacgcgtccgatttctgcatcattaagtattcattattttttctagactataacttgctttgtctactgtgtaaatatgccatgatttatttgtagttaattttttacagttaataacactaggatgaactgttagcctattagccaatctttgactatctctggcttgaaacagcatatcacttatatttgtttggagtagatagagcaaaaagtaaagaaatgattattattaaataggacatatcccatttatcagcagatggttacagtagttcagactcttttacttctgacccagaacagatcgggagcaatgtaactcgtcaaaggtcagtatttctgtcaatgaaaagcatgttaaactatcttgctgcgttttaatgtttaaaactatttagaaccaagccg

SEQ ID NO: 158668 - DNA, 403 bp, Homo sapiens
tttcgtgctacggcttcaacgtgcggggccaagtgatgcgatggcgggcaactgcggagcatcaacggggagctgtacgcgccgctgcagcatgaaccacgtgaatgttgagggggcgacacacaagcaggtggtggacctgattcgagcacgcgagaaggaattgatcttgacagtgttatctgtacctcctcatgaggcagataacctatatcccagtgacgactcgttgggacaatcattttatgattacacagaaaagcaagcagtgcccatatcggtccccagatacaaacatgtggagcagaatggtgagaagtttgtggtatataatgtttacatggcagggaggcagctgtgttctaagcggtaccggcagtttgctatcctacaccagaacctg

SEQ ID NO: 158669 - DNA, 706 bp, Homo sapiens
ggcggcggcggcggtgggtctgttctccactgcgccgggaacggcggcgggggaggcggcggcccgcgggtcgtgcgcatcgtcaagtccgagtccggctacggcttcaacgtgcggggccaagtgagcgagggcgggcaactgcggagcatcaacggggagctgtacgcgccgctgcagcatgtgagcgccgtgctgcccgggggggcggacgatcgggccggggtgcgcaagggggaccgcatcctggaggtgaaccacgtgaatgttgagggggcgacacacaagcaggtggtggacctgattcgagcaggcgagaaggaattgatcttgacagtgttatctgtacctcctcatgaggcagataacctagatcccagtgacgactcgttgggacaatcattttatgattacacagaaaagcaagcagtgcccatatcggtccccagatacaaacatgtggagcagaatggtgagaagtttgtggtatataatgtttacatggcagggaggcagctgtgttctaagcggtaccgggagtttgctatcctacaccagaacctgaagagagagtttgccaactttacatttcctcgactcccagggaagtggccattttcattatcagaacaacaattagatgcccgacgtcggggattggaagaatatctagaaaaagtgtgttcaatacgagtaattggtgaga

SEQ ID NO: 158670 - DNA, 496 bp, Homo sapiens
tgcataataggtggttttctggacacgcatcttagccccaatctgtatgagtgattcacaaacacgggttttgaacctgtgaggccatgaggttatcagaaggaatctatataccataatcttcagcctgaataaatatctttcaaatatttgtatatatttcaattggatgtagattctggtgtgactaataaattaacttaaaagcattactgaaatcatagcagctttttgttatgtattctttaavbbbbaaatactaataatatggctatcaagtgtgttggaagggaatctaataatttgggggtttttgttttgagacagggtctctctctgttgccctggagtgcagtggcacaatctcggctcactacaacctctgcctccttggttcaaacgattctccctcctcagcctcccaagtagctgggacsacaggcgcatgccaccacacccggccaatccttgtatccttagtagacatggtgtccta

SEQ ID NO: 158671 - DNA, 495 bp, Homo sapiens
ggtcgtgaccttgattgggatgaagagatggcaaaagcccagtcacatgactgtgttcctgttctttcagaacacccactgtatattctttacacatctggcacaacggggttacctaagggtgtgattaggcccactgggggatacgctgtcatgctacactggtcaatgtcttccatatacggacttcaacccggagaggtgtggtgggcagcttctgacttaagctgggttgttggacattcctatatctgctatggacctcttcttcatgggaacacaacagttttatatgaggggaagcctgtgggaacaccagatgctggcgcttatttccgtgtgcttgcagagcatggagtagctgccttgtttacagcaccaactgcaattagagcaatccgtcaacaggaccctggggcagctttggggaagcagtactctctgacaaggttcaaaacattatttgtggctgggagaacgatgtgatgtagagaa

SEQ ID NO: 158672 - DNA, 742 bp, Homo sapiens
ccaaatggcacatgctgtgatgattagagatattggcagcaactctccagtctccaagctggctggtgtcttggtcaagcatggcatcaagaaaggtgacactgtggttatctacatgcctatgatcccacaggcgatgtataccatgttggcatgtgcaaggataggtgccatccacagtctcatatttggaggatttgcttccaaagaactaagtagtcgcattgatcatgtaaagcccaaggtggttgttacagcatcatttggcattgaacctggaaggagggtagagtacgtaccacttgtagaagaagcgctaaaaataggacaacacaaaccagacaaaattctcatttataatcgtccaaatatggaggcggttcctttggctcccggtcgtgaccttgattgggatgaagagatggcaaaagcccagtcacatgactgtgttcctgttctttcagaacacccactgtatattctttacacatctggcacaacggggttacctaagggtgtgattaggcccactgggggatacgctgtcatgctacactggtcaatgtcttccatatacggacttcaacccggagagtctcagacagatccttcaggtggtattccagaagaagtcattattgtcataggagatgacagctctatgcttgccctagtagagcttccagtgagacaaattgtggagatggaagacagtgataccgacaatcctgatcctgtgtag

SEQ ID NO: 158673 - DNA, 421 bp, Homo sapiens
attttagagtcaatttttcactgctggaaatagagatgctattgatttaggtttattcattggtgtccacttgattctaaactcttttctcaattaaaatagttttcaattcattcctttagaaatctgtgtcttctcactccacgttcagtgctttttcttttatatcttgctgcattaagaactattcaacttcacaagagtacactttcttattttaagaaaagtaattatggtttttctcctaggtggcaaatattaagaaggagactcatattgtgtggtacaaagatgagagggagatatcagtggatgaaaagcatgactttaaggatggtatatgtaccctgcttataacagaggtaggcgattataaatgtaaaatgtaatatattagctctctaccctctatcttacccca

SEQ ID NO: 158674 - DNA, 426 bp, Homo sapiens
  misc_feature (1)...(426): n = a,t,c or g
cccacgcgtncgcccacgcgtncggtcaagaaaaactagtgcctccatccgtggagctagatgtgaaattaattgaaggtcttgtggtaaaggctggaaccacagtcagattccctgctattataagaggtgtgcctgttcctactgcaaagtggacaaccgatgggagtgagattaaaaccgatgagcactacacagttgaaacagacaacttctcatcagtacttaccattaagaactgcttaaggagagacactggggaatatcaaatcacagtttccaatgcagccggtagcaaaacagtagccgnacatcttactgttcttgatgttcctgggccaccaacaggtcctattaatattctggatgttactcctgaacacatgactatctcatggcagccacctaaggatgatggaggaagcn

SEQ ID NO: 158675 - DNA, 420 bp, Homo sapiens
  misc_feature (1)...(420): n = a,t,c or g
actcccagtagatgttgttgctgcaggtctgcacccacacttgtaggagtaagaactagggggtttaatattcccaaacaggtgagcagaagtggcctatatcgctccccgtcgatgccagataacttgaacaggccaagcctcaagcaggtggaaaaattcaaggtcggctcaataccagataaagttaaaaaaaagtatttttctggccaaggaaagctcaggaaggtaagaactttttaagatgaaaatcgtgttcatcttctatctcacgtctttgcttttctggtatgaggattgttttattatgccttgtttgtgttaatcctctttactttgactttctcctctgtgttctctccatcggtctgtcttttctacatctgcatccacgnnnnnnnnnnnnnnnnnnnnaaaata

SEQ ID NO: 158676 - DNA, 1476 bp, Homo sapiens
atgaggaaattaggcatgcacacacacacaatgaaagtggctaatgtgaaagttaaccaaagtaatctgtccttgggagcggttgtctggggcttcacagaatggctttcctgcttgaatggcttggctaactcacctgcacagttagatgacacttcccagcttcccttgcacagaggaacagccacaggattgagctctggactatggaaagtgggtggaagtgattcgaccatgcaaacctaccatgatgtcctccaacttcaatcttccctgtgctggctgactgtagagagcccagcaaaggagttggccgtcccgcagggtggcagaactacagggtggagggagtccaagtgggggagaccactcactaaacactgcattgagctactgtgtgaaaaagttgatcagatccctgttatattcacaaagtacctgaatgaggaaaggccacataactttccctacacagctcccctctcccagagcctgtggggaagccctgcccagaaccttcaattccacaaaataacgttaaacaaaagtggaaaagaaaccatcaccctgaagtccatagaggttgatataggatatgggggctctccttattccaacatggtcacagtgaatgcagccgtaatagcaatggcaaaaacagcagcagctcacattttatctcactactcttccttaaacccacatagcgtatatcccaaagtgttagattgggaacttatctcatcagagaagcctcaggtttccctacttctgcagcgtcggcaccaagggctgatcaaatgtttctttctccttacaccggcggaccgggaaacgccgccgcagcctcgcctccatccttcctcctacaggttgcaaataaagtacagcagctctgacattaggcagtttctgtccaaggagcaagcggtgacagcggaggcggggacgggggtggacaaactgcggatcaactctccgagaagacggccacctgccggaacctgccttcctccattccgcccaggagcctcgcagcggggcgctggcctgcggaaaggccacgggggagcacagggctccgcgccgccctcctgggagggtccggagtccagcgcaccccgagccctgcccgagcagcggggtctgagagatcagtgtcccagatgctcacatgaaaaggagcgaagccgggaggaggcggggggccacggggaaagccgggttaagggaatgacaacaggtcgtgggagcaacaagtgccgggctgcccggaggtgtcacaggatccgcgactgtcagcgatcccgccgccgccaacgcgcccaaaatagccggcggctgcagggcggggcttacatcaccaaagcctttagagaaacagtcaccttcacagctgtacattctgcaccaatgactacatactttagggaaggaccaaggttacagagggagactggtgccttcgctgcatga

SEQ ID NO: 158677 - DNA, 584 bp, Homo sapiens
acgcgcggatcctgtgacacctccgggcagcccggcacttgttgctcccacgacctgttgtcattcccttaacccggctttccccgtggccccccgcctcctcccggcttcgctccttttcatgtgagcatctgggacactgatctctcagaccccgctgctcgggctggagaatagatggttttgtgaaaaattaaacaccgccctgaagaggagccccgctgggcagcggcaggagcgcagagtgctggcccaggtgctgcagaggtggcgcctccccggcccgggacggtagccccgggcgccaacggcatgacagactcggcgacagctaacggggacgacagggaccccgagatcgagctctttgtgaaggctggaatcgatggagaaagcatcggcaactgtcctttctctcagcgcctcttcatgatcctctggctgaaaggagtcgtgttcaatgtcaccactgtggatctgaaaagaaagccagctgacctgcacaacctagcccccggcacgcacccgcccttcctgaccttcaacggtgacgtgaagacagacgtcaataagatcgaggagtt

SEQ ID NO: 158678 - DNA, 500 bp, Homo sapiens
  misc_feature (1)...(500): n = a,t,c or g
tgcgggtagnnnnccctgaagccactcgaactgatcnncaatnngnaccggcanccnangcgtnncgnccacgccgtccgcccacgccgtccgcccacgcgtnccgtgatcatcatngtacaattttgtatgttaggccttttcaatgttctgaatcttctaatgcttcttgaactaatgatgaagttttaaaggattaaatgattctgtataaatctagtttaaagtatgtttttccttattgtaaccaacttttccttacagctgtgaacttcacagaagttaatgaagaaaacaaaaacgatctcttccaggaagtgttttcttctattgaaactttggcatttacctttggaaatatgtaagtagagaactgtcatttaaagcaactagtcctatgtgtcttagtgagagtatgttgcattatccagtaacatacatgggaaatgaagtattaaatggtattaaatatcacaacttcggaaaaactaccttctgtg

SEQ ID NO: 158679 - DNA, 1125 bp, Homo sapiens
atgcacaaagactgggtggtctttgatgtgtctggagaacacaaagaagccctgctgcatgagctgcagctgtgtgacagcacactcaagccggctgcccatggacagacgcgacttgttgacttgtcgctgagtgaacacaaagcccagggaacaggtgctcatgtctatgaggagagacaccaagtgtccgtctctcgaacagatgatgtgggctgcgtggtgccgtccgagtgcctgcgggcctgcggggccgaggtcggctgctccaacatcgcctaccccaagctggtcatggaactgatgcccatcggtctgcgggggctgatgatcgcagtgatgctggcggcgctcatgtcgtcgctgacctccatcttcaacagcagcagcaccctcttcactatggacatctggaggcggctgcgtccccgctccggcgagcgggagctcctgctggtgggacgcactgggataccctcaacacccccagcccctcaaagccgtctcagcttcctcctgcccgaaacaccaccattggagcggtatctcctaggcctcgtggtcatggatctctggctggtcatagtggcactcatcggcgtgagtgtggcctggatccccgtcctgcaggactccaacagcgggcaactcttcatctacatgcagtcagtgaccagctccctggccccaccagtgactgcagtctttgtcctgggcgtcttctggcgacgtgccaacgagcagggggccttctggggcctgatagcagggctggtggtgggggccacgaggctggtcctggaattcctgaacccagccccaccgtgcggagagccagacacgcggccagccgtcctggggagcatccactacctgcacttcgctgtcgccctctttgcactcagtggtgctgttgtggtggctggaagcctgctgaccccacccccacagagtgtccagattgagaaccttacctggtggaccctggctcaggatgtgcccttgggaactaaagcaggtgatggccaaacaccccagaaacacgccttctgggcccgtgtctgtggcttcaatgccatcctcctcatgtgtgtcaacatattcttttatgcctacttcgcctga

SEQ ID NO: 158680 - DNA, 1200 bp, Homo sapiens
atgcacaaagactgggtggtctttgatgtgtctggagaacacaaagaagccctgctgcatgagctgcagctgtgtgacagcacactcaagccggctgcccatggacagacgcgacttgttgacttgtcgctgagtgaacacaaagcccagggaacaggtgctcatgtctatgaggagagacaccaagtgtccgtctctcgaacagatgatgtgggctgcgtggtgccgtccgagtgcctgcagggcctgcggggccgaggtcggctgctccaacatcgcctaccccaagctggtcatggaactgatgcccatcgattctcaggtgctggagatttccctggtccccctctttctaatcccctcttcctggaagctttcgatccctcaggtctgcgggggctgatgatcgcagtgatgctggcggcgctcatgtcgtcgctgacctccatcttcaacagcagcagcaccctcttcactatggacatctggaggcggctgcgtccccgctccggcgagcgggagctcctgctggtgggacgcactgggataccctcaacacccccagcccctcaaagccgtctcagcttcctcctgcccgaaacaccaccattggagcggtatctcctaggcctcgtggtcatggatctctggctggtcatagtggcactcatcggcgtgagtgtggcctggatccccgtcctgcaggactccaacagcgggcaactcttcatctacatgcagtcagtgaccagctccctggccccaccagtgactgcagtctttgtcctgggcgtcttctggcgacgtgccaacgagcagggggccttctggggcctgatagcagggctggtggtgggggccacgaggctggtcctggaattcctgaacccagccccaccgtgcggagagccagacacgcggccagccgtcctggggagcatccactacctgcactttggtgtcgccctctttgcactcagtggtgctgttgtggtggctggaagcctgctgaccccacccccacagagtgtccagattgagaaccttacctggtggaccctggctcaggatgtgcccttgggaactaaagcaggtgatggccaaacaccccagaaacacgccttctgggcccgtgtctgtggcttcaatgccatcctcctcatgtgtgtcaacatattcttttatgcctacttcgcctga

SEQ ID NO: 158681 - DNA, 627 bp, Homo sapiens
atgggctgtgggatagaatttgtgactaagtcctcaaaagcaattgcaacaaaaacaaaaattgacaattgggacctgattaaagagcttttgcacagcaaaagaaactatcaatacagtaaacagacaatctacaaagaactttgtggatgtagtgaaagatctcaaggtgaagttgagatcctcaacttagagcctttagatgaaggagcttctatgcacccttgtgatgacacatactgtggcccttttccagaatctgagccggaagtgaaggctgtagctaacttccttcgaaaacacagaaagcacattagggcttatctctcctttcatgcatatgctcagatgttactgtatccctattcttacaaatatgcaacaattcccaattttagatgtgtggaatctgcagcttataaagctgtgaatgcacttcagtcagtatacggggtacgatacagatatggaccagcctccacaacgttgtgttcttcagctggatctggaaaccaaattgacaccaggcaggttaaacaagagaaaagtatacaaattttattaattctatgtgtacaggatcttcataacagagtgaagtccaaagaagtggccaaagcaagatga

SEQ ID NO: 158682 - DNA, 627 bp, Homo sapiens
cccaaacaaagatggcgcgggaagcgtctgtgagggcagactgatccgagcacccaaaccctcggcggacagcggagccagtggtagccgcacggccctaaaaccatggaggagggcggcagcactggcagtgctggcagtgacagcagcaccagcgggagtggcggggcgcagcaaagggagctggagcgcatggctgaggtcttggtcaccggggaacagctacggctcaggctgcacgaagaaaaggttattaaagatagacgtcatcatctcaagacctacccaaactgttttgtcgcaaaagaactgattgactggctgattgaacacaaagaggcttctgacagagagacggcaattaaactcatgcagaaattagcagaccggggcattattcaccatgtgtgtgatgagcataaggaattcaaggatgtcaaactcttctaccgctttagaaaggatgacggcaccttcccattggataatgaagtgaaggcctttatgagaggacagaggctatatgaaaagctgatgagccctgaaaacacactcctgcagcccagggaggaggaaggggtcaagtatgagcgcaccttcatggcatctgaattcctggactggctg

SEQ ID NO: 158683 - DNA, 437 bp, Homo sapiens
tgtccatctatgcatccccagacaaacggaatcaaacacattatgctttgcaggcatcactgaagctacttgatttttatgaaaagtactttgatatctactatccactctccaaactggatttaattgctattcctgactttgcacctggagccatggaaaattggggcctcattacatatagggagacgtcactgctttttgaccccaagacctcttctgcttccgataaactgtgggtcaccagagtcatagcccatgaactggcgcaccagtggtttggcaacctggtcacaatggaatggtggaatgatatttggcttaaggagggttttgcaaaatacatggaacttatcgctgttaatgctacatatccagagctgcaatttgatgactattttttgaatgtgtgttttgaagtaattacaaaagattca

SEQ ID NO: 158684 - DNA, 401 bp, Homo sapiens
tctccgcgtacaggaggcggcggcggctttcagtctccggcccccgccggcgagcgcacgatgcactgcctgggcgccgagtacctggtttctgcagaaggagcccctaggcaaagggagtggcgaccccagatttataggaaatgcacagatacggcatggttattcctgttctttctcttttggactggtttggtgtttatcatgggctactcggtggtggctggagccgcgggaagactcctctttggctatgacagctttggcaacatgtgtggcaagaagaactcccccgtggaaggggcccctctttcagggcaggacatgaccctaaaaaaacacgtgttctttatgaattcctgcaacctggaagtcaaaggtacgcagctcaaccgcatggc

SEQ ID NO: 158685 - DNA, 415 bp, Homo sapiens
  misc_feature (1)...(415): n = a,t,c or g
nnnnnnnnnnnnnnnnnnnnnnnnnnnnnnnnnnnnnnnnnnnnnnnnnnnnnnnnnnnnnnnnnnnnnnnnnnnnnnnnnnnnnnnnnnnnnnnnnnnnnnnnnnnnnnnnnnnnnnnnnnnnnnnnnnnnnnnnnnnnnnnnnnnnnnnnnnnnnnnnnnnnnnnnnnnnnnnnnnnnnnnnnnnnnnnnnnnnnnnnnnnnnnnnnnnnnnnnntcaaatatgctttcttagtactccacatttatgcatccatctgggaagaaaggagactttttacaacagagaatacccctattaaatatgggtcacagatttttaccctagtccagcctatccacctaccacagaaagtagctgtagttcattgctggggccaccagaaaggtcaagatgaaattggtcagaagaacn

SEQ ID NO: 158686 - DNA, 934 bp, Homo sapiens
  misc_feature (1)...(934): n = a,t,c or g
gcatgaattgatgcttgacaaggcaccagtgctaaaggttatagtgaattctctgaagaatatgataaatacattcgtgccaagtggaaaagttatgcaggtggtggatgaaaaattgcctggcctacttggcaactttcctggcccttttgaagaggaaatgaagggtattgccgctgttactgatatacctttaggtaaagttcacttagaagctttaaaaaaaaaagtaattaaattcttttacaagtttccattgaggtgtgatatacatacagcacaggtgctgtatgtcttagatatacagcacaggtgctgtatgtccttagatatacatacagcacaggtgcacaggtcttagatatacagctcaagtgaagcttcagaaaatgcatgcatgcatgtagccattgactcagatcaaagatacggaagagcccagcactccacgatggctccatcatgcccctttgcagaaaatactgcctcctccagtaaacactattctgatgtcactatagattagttttgcctcttcgtgaactttgtataaatagaactgaacaatatgaactgtcctgtgtgatttcttgtatttcattatgggtggtgtgctattgtatcaacagggtatttgggtggttttcagatttggtgatattaacaataaaggaattataaatattgtagtacnnnnnnnnnnnnnngggggggccgttttaaagaatccttgagggggccaaagttaacccgggcatgcaacgtaaaagttttttccttatagggagcggaataaaaacctacttgggaatctttggaaaagaacccttatttttggggggggacatattgggccaacctccctacaaaaatttaaggctttagggaaaataaaaaattttaaagggaaaaaggggtaaaactacctgcatag

SEQ ID NO: 158687 - DNA, 2400 bp, Homo sapiens
  misc_feature (1)...(2400): n = a,t,c or g
cggacgcgtgggcggacgcgtggggaactagtgctggagtccggggagtggcgttggctgctagagcgatgccgacccggaggagctgtcgccttaatcctcctggctgctgtcgtcagcttgtgccgttctcgcagcacgcgccgccgtggacagaggactgcagaaaatcaacctatcctccttcaagaccaacgtacagaggtgcagttccatgggacaccatacagtgcttgacttaccaccctacaaaagatgtgatgaattgatgcttgacatggcaccagtgcctnaaaggttatagtgaattctctgaagaatatgataaatacattcgtgccaaagtggaaaaattatgcaggtggtggatgaaaaaattgcctgggctacttggcaactttcctgggccttttgaagaggaaatgaaaggtattgccgctgtttactcgatatacctttaggagagattatttcattcaatattttttatgaattatttaccatttgtacttcaatagtagcagaagacaaaaaaggtcatctaatacatgggagaaacatgggtttttggagtattttcttgtgtggaacataaataatgatacctgggtcataactgagcaactaaaacctttaacagtgaatttggatttccaaagaaacaacaaaactgtcttcaaggcttcaagctttgctggctatgtgggcatgttaacaaggattcaaaccaggactgttcagtcttacactgaatgaacgtttcagtataaatggtggttatctgggtattctagaatggattctgggaaagaaagatgccatgtggatagggttcctcactagaacagttctggaaaatagcacaagttatgaagaagccaagaatttattgaccaagaccaagatattggccccagcctactttatcctgggaggcaaccagtctggggaaggttgtgtgattacacgagacagaaaggaatcattggatgtatatgaactcgatgctaagcagggtagatggtatgtggtacaaacaaattatgaccgttggaaacatcccttcttccttgatgatcgcagaacgcctgcaaagatgtgtctgaaccgcaccagccaagagaatatctcatttgaaaccatgtatgatgtcctgtcaacaaaacctgtcctcaacaagctgaccgtatacacaaccttgatagatgttaccaaaggtcaattcgaaacttacctgcgggactgccctgacccttgtataggttggtgagcacacgtctggcctacagaatgcggcctctgagacatgaagacaccatctccatgtgaccgaacactgcagctgtctgaccttccaaagactaagactcgcggcaggttctctttgagtcaatagcttgtcttcgtccatctgttgacaaatgacagatctttttttttttccccctatcagttgatttttcttatttacagataacttctttaggggaagtaaaacagtcatctagaattcactgagttttgtttcactttgacatttggggatctggtgggcagtcgaaccatggtgaactccacctccgtggaataaatggagattcagcgtgggtgttgaatccagcacgtctgtgtgagtaacgggacagtaaacactccacattcttcagtttttcacttctacctacatatttgtatgtttttctgtataacagccttttccttctggttctaactgctgttaaaattaatatatcattatctttgctgttattgacagcgatattattttattacatatcattagagggatgagacagacattcacctgtatatttcttttaatgggcacaaaattggtgcctttgcctctaaatagcactttttcggggtcaagaagtaatcagtatgcaaagcaatcttttatacaataattgaagtgttccctttttcataattactctacttcccagtaaccctaaggaagttgctaacttaaaaaactgcatcccacgttctgttaatttagtaaataaacaagtcaaagacttgtggaaaataggaagtgaacccatattttaaattctcataagtagcattgatgtaataaacaggtttttagtttgttcttcagattgatagggagttttaaagaaattttagtagttactaaaattatgttactgtatttttcagaaatcaaactgcttatgaaaagtactaatagaacttgttaacctttctaaccttcacgattaactgtgaaatgtacgtcatttgtgcaagaccgtttgtccacttcattttgtataatcacagttgtgttcctgacactcaataaacagtcactggaaagagtgccagtcagcagtcatgcacgctgataaaaaaaaaaaaaaaaaa

SEQ ID NO: 158688 - DNA, 3432 bp, Homo sapiens
tcactgcagctccttgagcagctggagcacgttggtcgtgtaggggttctgctgcccgctggccccgtgcagctgcacagggtggaggctggggtggggaggtgtgaactgcacggggcagtaaagctcgttcaggaggaaccaggtggagtctgggtccaccttcatcaagtggaggaagacgctcctggcagcctcttgtaatttcacgggctgtttgacactgaggtaaatcaagcaggcatcagccactttattcaggtcaccctcacctaggtccagtctctcacagagggggcccaggccctgtaagacagccagctgcaacttgaaggccagcgtgtgcgagtaaactggtccagccctggcactgatgggggcctgggtgactagggagccagccagctttggcaggacatctttgcagaaccggctgcgaagaaagtcaccacacttgcttcccagggtacgtaaaaccttgaaggctctaagcactgccaggggggcgtcccgtgtgagtcggtgaacgagcgagggccaggcctgatgagccaagggaagcagctggtttttgtgggactgaagaacaaccacacacagatccagcacatccaagactgaaaagagactgcctgcatcagtgtcacaggcagcggtcagtacgacggccagcgcaggcttccctcccgcgtgggcggccagcgcaggcttccctcccacatggacgcccaaccttagtcctgctactctgggaatgcagagaagcagctgcgcactgaccttcaggcggatttgcagatttttatctgacaacaagtggatgcagcgttccatcacgtccatggctatttggatctgcaatggcagtggtggctccacatctggacgggtgtcattctcatccactttgggagggactgactgttcctcttcttcattatcaaaatccgagacatttccatctgccacatccttctctttgaggtagttcagcaaaaactgttcgatgtcttcagctgtggtggtgctcttctcaagagctgctggtctttggttcaaatgacttccctcttctcctaaactttgctcttggaggtgcccaagattacctgtgtctgggaaccactgggctaatgctgccatcagagcatgcagaacgctgacaaaggaagcagctctcttatcgtaaaattggtccagggtggccaagacatcttgaaccacatctgccaccaaaggaagcaggttagcatctgagttccgcagcatgacttccaggacctttggggtatgaggatgcagagccagatgacgcagatttaaagagatcccattcactaaatagtctgaattttgattgatcaggtgctgcagggagtcgtagccacaagcacggcaaacgtccatcatggtgctggtagccacctgactaatgagtagggtttggtctccagccttctccagtactggataaagggctgacatcaagagcaaacagaagtcttttcctagtgcatatgcaaactggccaattccttccaactgaatgcatatttgccagatgttactgttcatggagcaaatagtgggacttggctttgagaaggctagaaaagatgtaacttggcaggtgtgttcaccagacgtgatggcttggaggcctgggtgctccatcatcagctcctctcccatttcctcagtttcaagacaggtaaccaaataccaattttcttgacttgtgtattcttcaagtatagatgtcacaatctctctcagttcttctgggtttgttttaatatgtttttcgtgaagatcctcaacctccagcccagcagcccctgtaaccagttcattaaggatcatggcagcttgcttccggtaaaccacagattgatggtaaagttccataaagtgatccacaagcaaataaagattcccataataaccaagtagctgacaaacctgcctcaagagcatgaagattctctcatcagtgaagaagcggaaatatctcctctggatgcggttccaaggctgtgtggctgaggtctttggagaagcattcagatcatcagagttccaacgccgttcctcaacaatcttgatgtcagccacgtctagctctagaacttggatgagtgctttggaaagccgctggagatgggccacagagttgaggacaaagtttatttttgggcccaagagtttcagataaccaagtaacaaggaaagagtagagaatttgccctggtcatcttgggagttcattaggcgaggaagagatgtggcaagggaatgcaggctttctgacaagatgtcagcgagggctttgttgcccaccactactttttgatctgcaaaatgtctcagaactttattgcactgggcttggatttcaggactctcatcatttactagtcccactaaggccttcagaaggggaccagcacattcgaccaatgattgactgcacttcaaaagaaggtcctccacaagttctaccagttccagtctcaccttccagtgtgggtgaacagaaacacactcaattatctttttaataaggatagtcaacttgtcgccagtcttttttacccaatctgcttccctgtaaaccatcagctctgctactctgtgctcaactgcaggttttgcttggacctttgagattcttttgagctgttcatcagccataatgaagctcactgtcttgtaaaagatctttagggaagatacgacaatgctgtgaccttgtttaaagtctcctgtgataagcctggtcagtgcagttgagattccaggtaaaaaagaggcaaacaaatcccccagctgcttttgttcaagttcatccaatgaccttggatggtcctgacaatcacactgcaagagtagaacctgtaaacattttaaggcagcaattttaatttgctttgatttctcctgttctgcaaggcctaacagtaaagatacagcaaatcctaaacgtggcagaatggagggctcataaaaagtcagaatgatgtccccataagctgagtgcattaatgtgctaagtccctggatcacagccaatttcaactcctcggacacagccgcaggtttttgggagctgggtgaatacagacaagcagagagttctgaaaagagttcctggagaagctcctgttctttcacacatgttgaagaaaggacaaatgtgaggcattccaccacactttggatcaaacgctctcttttgggacctggggtcttcagggtaaatcgcagagggaagaggatgtactgctgaagttcctgaagggcactgtcactcacagcttgtagtcgtgtctgcagatgctccacattctccactgtctgggtctttgtgagctgaacacagactggacgtaagacaccaaaggcctcctcaggagtatcaaaaactgccat

SEQ ID NO: 158689 - DNA, 442 bp, Homo sapiens
ggggtgaagaacaaccacccacagattccggcccttccaaggtttaaaaagagcttgcctgcatcagtgtcacaggcagcggtcagtacgacggccagcgcaggcttccctcccgcgtgggcggccagcgcaggcttccctcccgcgtgggcggccagcgcaggcttccctcccacatggacgcccaaccttcacagggcgaggcactcgttagtctgcaagacagagagaagccggccaacacaaagcagtaaaccctactgggcgcctactatgtgctggtccacactgagactggaacagaagagaccctgccattgaggggtgaataattaggccagggagtaagagaaagctcagctgcacagtggggagcaggggatcaggggagcagagtggaaatggctttggtatcactgacaggcttggaatttgagctctg

SEQ ID NO: 158690 - DNA, 1317 bp, Homo sapiens; identical to SEQ ID NO: 120243

SEQ ID NO: 158691 - DNA, 420 bp, Homo sapiens; identical to SEQ ID NO: 120244

SEQ ID NO: 158692 - DNA, 582 bp, Homo sapiens; identical to SEQ ID NO: 120245

SEQ ID NO: 158693 - DNA, 1719 bp, Homo sapiens
tgtggtttttttttttttgtgcggttctgcaaactttttttaattttaattttatttttttacaatgtaccatgaacatcttttccatgcacatgggtgaaaatcctctactaaaatatagagcgctgtagttgggtcaaaaggctgctggtaacgagattgacatctaaagcaaaaatatcagcttaaggttaaagcattggggcctggctaatacccttccggggaaagcagggccagcaatattctcatcagagaaatcagaatggaaggccaaaggcattaaaggtatgggatatcgtgtaagcccctctggcccctacctccacccctcactcccctgacaccccgttgtccccttggggcgaaatggatcctgtacatctctttgcatcccaatgaaaaccacccattttctgttttttcccttagctccctcttgaacccttgaaaacatctcccacattctctcatcatctcctcactgctcagatgcctttcctgtaagtcctcctgagagtccttgggggaatcgtccgtccccctgtctgtttttctttttgctttccggggcacataatctccagccgggcgcttttcggcggcccgcggctggccctctggctttgcctgggaggctggcttgccctcgccttgtggcttgccctcaccttcggacttgccctgcttttcctggcttcccttatcttccagttgtccctcatcacctggctctccctcagcctttcgctttccctcgcattctgtcttcccctccgcgtctggcttttcttcctcgtctgactttccttcatcatcaggctctacttcatcttctggctttccctcgttttccaggtttccttcatttttattgtagggtttttccatgtcgagatttctctttttcctgtctctcaacccttgtgggcccctgtccatgcagccccctgctttcacggacctgcggggattctggacaggttgctcttcctttgcaggcctcccagagcgctgggaacaacagacgcgcagactgattctctcttcgttcacttcagactcattattgagctgctctaacaagtttttcattacagttgttttccgttcaatggagaaaaggtagtcttttccacaaatgatactggaaatcaactggacttgctgataggcactctccttggaatcttccctcaactgaagttccctaattttcctccttagctctctcatctcctccatgaaccgttccatatcatctccatctccatctatcatatcaatgttatcgacaagcctattgggcacatcctctccaaaacccggggcaggtggagcccaaacccctttaacatttcctccaggctcctggtattcaccacctcctaaagcgggggcttcattctgcactggggccttctccacaactttgttttccttggggacattttccatgttgagtttttttcctgttttttttttttttttcttcatattcattttcttcttcttcttcttcttcttcttcttcttcttcttcttcttcttcttcttcttattattattattattattattatactttaagtttggtgcaaggggtgggctcccaagggcttgtgcaacccttcccctggctttgcagggtgtaacctccatggctgttctcatggtctgaagttgagtgcctatggcttttctaggctcaacgggcat

SEQ ID NO: 158694 - DNA, 403 bp, Homo sapiens
aagtcattacagtatagtaacacaggagacatgattcttgttgtatctggaagctgtcatgccaaggtgattgacagagatggttttgaagtaatggaatgtataaaaggagaccagtatattgtggacatggccaacaccaagggtcatacagcaatgcttcatactggctcatggcatcccaaaataaagggagaatttatgacttgctcaaatgatgcgactgtgacgacgtgggaagttgaaaattcaaagaagcacaaaagtgtgtttaaaccacggacgatgcatggccaaaaagtcattcccactacgtgcacatatagtagagatggaaacctcatagcagctgcctgccagaatggaagcatacagatctgggaccgaaatttgactgttcatt

SEQ ID NO: 158695 - DNA, 397 bp, Homo sapiens
ccctggagaagcagatggaaaaggcccacgaggactcggagaagctgcgggagatcgtactgcccatggaaaaggagatcgaggagctgaaggcgaagctgctgagggccgaggagctgattcaggagatccagagacgtccccggcatgccccttccctgcacggctccacggagttgctgcccctgtcccgggatccatcgcccccgctggagcctctggaggagctgagcggagatgggggtccagccgctgaggccttcgctcacaactgcgatgacagcgcctccatctcctccttctcccttggcggaggggtcggcagcagctcctccctgccccaaagccgccagggcctgagccctgaacaggaagagacggcctcgctggtgtctac

SEQ ID NO: 158696 - DNA, 446 bp, Homo sapiens
  misc_feature (1)...(446): n = a,t,c or g
tttaaaacggatagacgatcatcggacgngcaannaattttatggatgtcttcacgtggtctttaccgtttgttggagaaaaagtgacagatttgtttttaaatgttctgagtatttgctctgatgatgaactaatgactgaaggtgaagaccagtttgatggttcagctgcagcccggaaagaaatcataagaaacaaaattcgagcaattggcaagatggcaagagtcttctctgttctcagggaggagagtgaaagtgtgctgacactcaagggcctgactcccacagggatgttgcctagtggagtgttagctggaggacggcagaccctgcaaagtgcaatacgaggattctctccaccacatagaatctgcagttttgaagaggcaaagggtttggataggatcaatgagagaatgccacctcggaaagatgctgtacag

SEQ ID NO: 158697 - DNA, 602 bp, Homo sapiens
cggcacgagcggcacgagcggcacgaggaactaatgactgaaggtgaagaccagtttgatgtaggttcagctgcagcccggaaagaaatcataagaaacaaaattcgagcaattggcaagatggcaagagtcttctctgttctcagggaggagagtgaaagtgtgctgacactcaagggcctgactcccacagggatgttgcctagtggagtgttagctggaggacggcagaccctgcaaagtgccacagttgaggctattgaggctgaaaaagcaatacgaggattctctccaccacatagaatctgcagttttgaagaggcaaagggtttggataggatcaatgagagaatgccacctcggaaagatgctgtacagcaagatggtttcaattctcttgaacaccgcacatgccactgagaaccacgggacgggcaaccatactgcccagtgacccactacttcccagggactctcacatctcgggccccaaatggacagatcacccgaggagctggaggggtcggccaagctgactgtaaatttcacagtctctctgaagaaaccattgtgcttctgagaccctagcccccttcctggat

SEQ ID NO: 158698 - DNA, 895 bp, Homo sapiens
ggctttagagatgaagcagtagtgatcctttagccatgtttttcttgttgcttatgtcatactcacctagagatgtaaaagattgtatatatttgcatgaccttaggagcacctggtacattaggcacctggtgcattgttgaaatgctggtatggcccttagttcaggattacctgcacagtagctccttcatgccattcattttagaccaactcaaagcaaagaagcttattctgtcatagtctgatgggatattgtcagcctgcatgtcaaatactttgtgatagttaaataagactacaggactgttagaaattcttgtctgttagtctgcatgccataggctgtcatgaaaattaaacagagactataggattattatcagtttttgccctctggtttgtaatgcaagttgggctcaagtttgtttgttttttttttccccattgctgttttactgattagccagtagagtgaaatattaaagtttgtggattactttttatttctatatttatcagaccccagtattagaccaatgctgagctaaaccattgagagagcaagacattttttagcatgagttcatctagtcccctccatgtaagctggtggcaggggtcttggtactggtttagatgagtgtggaacaggctaatagaatattgtaagcatgcatgccctaaacttgagcctttctctctatttattccattgaaagtaggttcagctgcagcccggaaagaaatcataagaaacaaaattcgagcaattggcaagatggcaagagtcttctctgttctcaggtaatgatatattttcttgattatttgttttgcagaaattacgtttattgtaccttgttacaagcattgtcccgcatctaaaagcaaa

SEQ ID NO: 158699 - DNA, 676 bp, Homo sapiens
cccccacaccccttcctgggttatgcccttgagtaatctcattcctctcttccctgctcagcttcaagccctcctgcccttgtttcccctgggtctttctctggcctggtctacaagaatgtcactgtgcctgtctacacagcactgaagggggtaagaaactgctgcacaaagagggggtgtctcatcaggaaaggcccctggcctcatcatccaatgactggggcggggctctagggccaggcttctgcacatggtgaccctgcccagggagctcagcccagcacgtgtcattttgttttattgtttattaggttattataaaaattccacatttacaaaaatgtgaatcagtatgaacgtggacaaggtaagaaggttaagcctatgcccgctttacagctctccccaccttttctcatgtctgcctcactcctcaagtcccagagggcagtggggctccttctagaattactgaggtatattccaacttatattcccgtaacgtcactacattttaaaaacaaaaatcagatagaattgcaatattttcatacacatttttgtctctgttactggtttttgaataatagtaatacttgataaaattttttatagaagaataaaaaaccaaaagtgaaatttccaaaaaaaaaaaaaaaaaagggcggccgct

SEQ ID NO: 158700 - DNA, 562 bp, Homo sapiens
agaagacaagacaatcagtgaccaggaatcctttagggaagttattacggcaatggacgtgatgcagttcaccaaggaggaagtttgggaagtgtcgaggctgcttgctggtatactgcatcttgggaacatagaatttatcactgctggtggggcacaggtttccttcaaaacaggtaagattatgcctgcctgccctcctcgctccctttgttccccgtgggaaacttaaacctaaattattgactgtctagcctttcagaaagaaaattctggcccaggtgcggtggctcttgcctgtaaccccagcactttgggaggtggaggcgggcagattgcttgagcccaggagttcgagaccagcctgggcaatgtggccaaaccccatctctactaaaaatacaaaaattagccaggcatgatggtgtgcccctgtagtcccagctgcttgggaggagagggtgggaggatcacctgagcctctgcgggttgaaggtgcaatgagctgagatgatgccactgcactccagtctgggcaacagaacgagatcttgtatcacca

SEQ ID NO: 158701 - DNA, 693 bp, Homo sapiens
ggataatgtgatctacaacgcaacagagaatcatctctggctattaaacagttgacagggtgcctagatatgtcatgagagtaattatagaatataagctttgaaaactggatgctggctagacttctgggattcttacattgttagcatagtggcatatgtatttctgtgtttactgcagaaacttatgaatcatgaatagaactttaataacaaattgtggtggggttaattattaaattaaaactttgagaaatagttaaaggaagattggcatctctcttataatgactccttactactattcccatagcctttatctcaccctgaaatctattaattgcttgattggcttgacatctttctattcgtaccataattttccggtattcctgaagatattttagggagtcagctttgttctcttttgctcatcatgatgatgaaatagctagtactcatgaaatgacaagtgttttgaatttgggaatatatagagaacattattattttgaggattaagtcatcaaattatcttaaacaggttctacttaaaaagttctaggctgggcgcgatggctcacgcctgtaatcccagcactttgggaggccgaggccagctgatcatgagatcaggtgttcgaggccagccggttcaacatggtaaaaccccgtatctactaaaaatacaaa

SEQ ID NO: 158702 - DNA, 434 bp, Homo sapiens
aggaagagatagtgaccgtaattcatcagaagaaggaactgcagagaaatccaagaaactgaggactacaaatgagcattctcagacttgtgattggggtaatctccttcaggacattattctccaagtatttaaatatttgcctcttcttgaccgggctcatgcttcacaagtttgccgcaactggaaccaggtatttcacatgcctgacttgtggagatgttttgaatttgaactgaatcagccagctacatcttatttgaaagctacccatccagagctgatcaaacagattattaaaagacattcaaaccatctacaatatgtcagcttcaaggtggacagcagcaaggaatcagctgaagcagcttgtgatatactatcgcaacttgtgaattgctctttaaaaacacttggacttatttcaactgctc

SEQ ID NO: 158703 - DNA, 417 bp, Homo sapiens
tacgccaagcttggcacaaggccgggctgcacgcggcggactgggcaggccgggcccggtcactgttgggtgacagtcatacttcgtggagcgcagggagcatcccgggcaagcactaccaagctgtgggtcttcacctctggaaggtagagaagcggcgggtcaatctgcctagggtcctgtccatgccccccgtggctggcaccgtgtgccatggcatacgaccgggaggtccacctgcgttgtgagctctcaccgggctactacctggctgtccccagcaccttcctgaaggacgcgccaggggaggtcctgctccgagtcttctctaccgggcgagtctcccttagcgccatcagggcagtggccaagaacaccacccccggggcagccctgcctgcggtggagagggggacg

SEQ ID NO: 158704 - DNA, 751 bp, Homo sapiens
  misc_feature (1)...(751): n = a,t,c or g
cgtggcgggttgacgtctgctggtgctcccagacccggctctgacctgagactgcaggtctttctgccttgccgtgtgcctcattggccaaaggaaagcaacagagtctgcagccagggcaggacccgcaggaggggcctggacccggggggctcctggcagcgccgtgcctttctgaggcaaggaggtagagccagcggctgaggacctgtcagggccagtcccagctctgcagcttgctgtgtgacctggcacacatcctctccctgcctccctcagtctcttcccctgcaagacggggtcctgacacggatctcatgggattgctctgaggcccaggcagtcccaggctcaaccactggttcacaaagtgtgttgtttccaggaagaacagatgggggcgcctgagggcaaagggcctgagtgtgggtcgaggatatgccggctgctcgctcaggggctgggttttcatcttgtgtgtcttgacagggtgtgacacttggcaccacactgttccctgtcccttcatggatgtggcccacatgatgttcctttcctcgttgcaaaaagaagttttttggggctggaaggcccactgtccagcagccccccangttgcctgggccacggtgcctttgtgggcccagctacaaggaggacttgcaggctcgtgtctgggacagatacttggcgccagggccaagtgaagcccgggattggtgggcatctctagctggtccctgagagaggg

SEQ ID NO: 158705 - DNA, 427 bp, Homo sapiens
atctttctgactttttttcccagataatttagaagatgagactgaagatgatgacctatttgaaactgagtttagacaatataaaagaacatattacatgacgaagatgggggttgacgtagtatctgagtacgtttttgccaatgcttttattttaaaatagaaaaaattagattttgcagttattcagaaaatatgattttgatgaagtagtgggagaaaaaggattttttggtttcatgaattattgggtatgtttcaactagtctggttttggagaagatggtattaattctgacttgtattatattcctgtgataaaaattgctgaagagaaaatgatccttatgtataaggatttttgttacaaagttgtttataatagtaaaaaaattagaaataatctaaatgtccaataagaaggttt

SEQ ID NO: 158706 - DNA, 437 bp, Homo sapiens
ccgagcatttcagatctgctcggtagacctgttgcaccaccaccatgttggctgcaaggctggtgtggctccggacactaccttctagggttttccacccagctttaaccaaggcctcccctgttgtgaagaattccatcacgaataatcaatggctgttaacacctagcagggaatatgccaccaaaacaagaattgggatccggcgtgggagaactggccatgtgtgcgcccagtgaaaagtttctgaacatgggtgcacccctgggagtgggcctgggactcgtctttgtgtcctcattgggatctatgtttcttccacctaccaccgaggctggtgccactctttactcactggcaatgtacggtggattagttcttttcagcatgttccttctgtatgatacccagaaagtaatcaagcgtgcccaagtatc

SEQ ID NO: 158707 - DNA, 663 bp, Homo sapiens; identical to SEQ ID NO: 118099

SEQ ID NO: 158708 - DNA, 1541 bp, Homo sapiens
gtcatgcagtgcgccggaggaactgtgctctttgaggccgacgctaggggcccggaggggaaactgcgaggcgaaggtgaccggggaccgagcatttcagatctgctcggtagacctgggtgcaccaccaccaatgttggctgcaaggctgggtgtgtctccggacactaccttctagggttttccacccagctttcaccaaggcctccccgtgttgtgaagaattccatcacgaagaatcaatggctgttaacacctaggcagggaatatgccacctaaacatagaattggggatccgggcgtggggagaactgggccaagaactcaaagagggcagcattgggaaccattcgatgggaaaaaatattttaaaatttgattcagatggggaagaatggttggttgcttggaggggcttgttgttggtcttgggagcatttgtgcttacttattggctttgggacttgtcttaattgagatttgggagctatttgaaaaaggctgtaatttgggcctcagtatgtcaagggatagaattccattccacctatatggtacttagcagggggagtattgggtttaacagcttttgtctgccatagcaattcagcagaaccgcctgttcttcatggaacttccatgatggaggaggctcttggggtggacaattggtgttgacctttggcagccatggttgggagctgggatgctggtacgatcaataccatatgaccagagcccaggcccaaagcatcttgcttggttgctacattctggtgtgatgggtgcagtggtggctcctctgacaatattagggggtcctctttctcatcagagctgcatggtacaacagctggcattgtgggaggcctctcccactgtggcccatgtgtgcgcccagtgaaaagtttctgaacatgggtgcaccccttgggagtggggctggggtctccgtctttgtgtcctccattgggatctaatgtttcttcccacctaccgacccgtggctggtgccactcttttactcagtgggcaatgtacggtgggattagttcttttttaagcatgttccttctgtatgataccccagaaagtaaatcaagccgtgcagaagtatcaccaatgtatgggagttcaaaaatatgatcccattaaactcgatgcttgagtatctacgatggatacattaaatatatttatgcgagttgcaactatgctggcaactggaggcaacagaaagaaatgaagtgactcagcttctggcttctctgctacatcaaatatcttgtttaatggggcagatatgcattaaatagtttgtacaagcagctttcgttgaagtttagaagataagaaacatgtcatcatatttaaatgttccggccactgtgatgcctcaggtctgccttttttttctggagaataaatgcagtaatcctctcccaaataagcacacacattttcaattctcatgtttgagtgattttaaaatgttttggtgaatgtgaaaactaaagtttgtgtcatgagaatgtaaaaa

SEQ ID NO: 158709 - DNA, 432 bp, Homo sapiens
  misc_feature (1)...(432): n = a,t,c or g
aatnnnnnnnnnnnnnnnnnnnnnnnnnnnnnnnnnnnnnnnnnnnnnnnnnnnnnnnnnnnnnnnnnnanaannannnnnannnnnnnnnnnnnnnnnnnnnnnnnnnnnnnnnnnnnnnnnnnnnnnnnnnnnnnnnnnnnnnnnnnnnnntggcaacttcatagcatatccagaaaaaaaccatgaatggtccaattcaggtgaaagtatcaattggtccaagatggctaacatgggtaagcctagaatgtcaaatattggtttcagaaggttgggtttttttgctggtgggagttgatgctgcacacatttgttttgtagggggtgagtggtgcactgacagtgcttatgaaggacgcactcaagcccaatctcatgcagacactggaggtgagcagagtgactcctgcattcttgaattggttttgg

SEQ ID NO: 158710 - DNA, 605 bp, Homo sapiens
gagaagggtcacacacggacggcccagtttgatatctctgtggccagtgaaattatggctgtcctggctctcaccacttctctagaagacatgagagagagactgggcaaaatggtggtggcatccagtaagaaaggagagcccgtcagtgccgaagatctgggggtgagtggtgcactgacagtgcttatgaaggacgcaatcaagcccaatctcatgcagacactggaggtgagcagagtgactcctgccttcttgaattggttttggacagtcagagcagagtggttataaagcacacttgcaaggcgcggtggctcacacctgtaatcccagcactttgggaggccaaggtgggcagatcacaaggtcaggagatcgagaccatcctggctaacatggtgaaaccccgtctctactaaaaatacaaaaaattagccgggcatgggtgcgggcgcctgtagtcccagctgctcggaaggttgaggcagaatggcgtgaacctgggaggcagagcttgcagtgagccgagatcacgccactgcactccagactgggcgacagagcgccactccgtgtcaaaaaaaaaaaaaaaaaagtcgacc

SEQ ID NO: 158711 - DNA, 627 bp, Homo sapiens
cccacgcgtccgcgactcgggaatcttcggccgaggctcggcaatccccccatcctccgtcaccagggagtgcgggaatccgccgtttgcgctgaggcaatggcggcagctgcgccggtggccgcggacgacaataagcggcggcggcggccgggggctgactccatcagcagctatgaagcccagatcaccgccctgaagcaggagcgacagcagcagcagcaggactgtgaggagaaggagcgggagctgggccgcctgaagcagctgctgtcccgggcctaccccctggactccctggagaagcagatggaaaaggttgggattgggatggcttccctgctgccctgggatttggaagaatgttgaggactgtggatgtcccattccctggtcatggggtgcggggcacccagcagtgattctaggaatagcacagagttaccaggtgttgttgagagcttggctctgtgctccgtagggtcctggcttgccccttattagtgggtgaccaagttcgcttagctccaaaattaacttaagttatgtagaagggaagggaacttacacttaagggtaacaaaaaaaattcttactgttattaaatattgacttctggtgtacatt

SEQ ID NO: 158712 - DNA, 910 bp, Homo sapiens
tgctctcattaaccttaaaaaaacctagatatagataaaagactgaaacactaaaaatgtaaaagtgatggctataagatgataaaaatgctgttcttcattgtccagattttcactcctgaggaaatagttcttttataataaaaaagcaatatttttcatattaaaaaactacctcccagaaatatgtagttatgtaatttctaagtgaatatttttgcctttagcccagggctctgttttgttttgttttgatgatttgaagacttattttacccaaacttagaagatggcatttggtttttgacaaagaaaggattagaaggaatattgttcacatacagcacttctgaaagcattctagcttctgtgaccaaattttaagatcttcctgatttgctgctttgcttctctcagatatcatcccatgtaaagaagattcccatccctttctcccgtctcacccccactatttaagagagtggtagtgtcactatggaaagcttcattgggtaaatcttcaacctttggaccaagggagtggtacattaactgagtaaatatgaataacagacttatctattttgatagttggtttaggaaaactgtcatgtgacaggatgtaatttttaaaaatattttggagtttttaggattataatttttagccataaatagctaattcattgattaaataaatcatctgaggtaaaatgttgtatcagcagataccgtgctctaaagacacgggcctgtcttcagaaaatatgttataatgaaaatattctattttcagtgactttctggctgatcaagctgcatgttatgttcaggcaatacagtggattttgcactattactatcatggagttcagtcctggagctggtgagagaataaaaacaaaaaaaa

SEQ ID NO: 158713 - DNA, 421 bp, Homo sapiens
ccagatttctggatatttatggaataaatgttgtttcctatagggatctgttccaaataaattttatgttcacaatgatatgtttcgttatgaagatgaagtgtttggtgattctgagcctgaacttgatgaaggtgaggttactttgaagatatgaagatagaagggttctgttggtactctttatggactaatttctataagtatgacatctacggaaatttgctgctttattgtaactgtgtcaaacatccttttttcatggttttgttgttgttggcgttgttacaaaaagatgtccattgtttgaaaatatacaaaatttggatgtcaaggaaaaaggttcccctcagtctcatcctctgtagataaccaagtttggtgcctattggagaaggtttttggattctatacttgcaac

SEQ ID NO: 158714 - DNA, 414 bp, Homo sapiens
  misc_feature (1)...(414): n = a,t,c or g
agggatcacacagagcagcatccacacgtccccagctccctcttcccgttctgttgtcctgttttcaccattccccggacctcaggccgctgcctccacgcatccccctgcaggagccctttgccaccttctttcatgaaggtcattcctcaggccacagatggagcgtgtgttgagcatctcaccgccaggcacaaggctggcccttcctagtggaggaagtgggagcctcgactagagagggagccaagagggacgagctgggcagggccccgtgatcaccacggcctccttgaaggggctatagggaaatgatctggtctttctggccctagctggcagccaggaggcaggagcagcgggcgacagtgcgggccctggggttctgggccttctcgctgcaggcaaaggaan

SEQ ID NO: 158715 - DNA, 467 bp, Homo sapiens
aagctcgacacagtcgtagaattcccaatcagagggctgaacatgtccgagtttgtctgtaacatgtcagcaaggccttatgtgtacgacctcattgccgtgtccaatcattatggagccatgggggttggccactactaaagcagcttatgtgctattttaccaacgtcgagatgatgaattttataagacaccttcacttagcagttctggttcctctgatggagggacacgaccaagcagctctcagcagggctttggggatgatgaggcttgcagcatggacaccaactaatgctgactccacgatcctgccaccctgtagcgccagtgtaatcccccaggagaacatctttgacactctgcagactgctagtgttctgtctaaaaaccagacaaggaaatacccttcttttatgagcagaaggaaacaaaaaaaaaaaagaagaccgtttacctagaaaaaa

SEQ ID NO: 158716 - DNA, 638 bp, Homo sapiens
tcgttatggattaaagctgggaagagcctctatcaggctagttggttatttcatcatcctgatgtgatagtgggagctaggtgtgacagagctggctggcattccttcagggaccttcataaatgagaagctcagctctcctcagagttctctgcacaaggctccttccatttcctgctgcctggcaggggcagccatcctcaggtggaagggtctcctctgtgtggatatggcagatccttgagggttttggacagctagagaaaagctggggaaaatgggtgatttttccaagcactgaatggtctttccccctcttgtatttcagactaaagcagcttatgtgctattttaccaacgtcgagatgatgaattttataagacaccttcacttagcaggtctggttcctctgatggagggacacgaccaagcagctctcagcagggctttggggatgatgaggcttgcagcatggacaccaactaatgctgactccacgatcctgccaccctgtagcgccagtgtaatcccccaggagaacatcttttgaacttttcagactgctagggggtccggtcttaaaaacccagccaggggacatccccttccttttattgagccggagggaaacaaaaaa

SEQ ID NO: 158717 - DNA, 917 bp, Homo sapiens
gcctacgagaagcatgtgagcatgttgcagcctcagaagaagaagaagaccacagtggccctgagagactgcatcgagctcttcaccaccatggagacccttggggagcatgacccctggtactgtcccaactgtaagaagcatcaacaggccacaaaaaagtttgacctatggtccttgcccaagatcctggtggtccacctcaaacgtttctcctacaacagatactggagggataagctcgacacagtcgtagaattcccaatcagagggctgaacatgtccgagtttgtctgtaacctgtcagcaaggccttatgtgtacgacctcattgccgtgtccaatcattatggagccatgggggttggccactacactgcatatgcgaagaacaaactgaatggtaaatggtattactttgatgatagcaacgtgtccctggcctctgaggatcagatagtgactaaagcagcttatgtgctattttaccaacgtcgagatgatgaattttataagacaccttcacttagcagttctggttcctctgatggagggacacgaccaagcagctctcagcagggctttggggatgatgaggcttgcagcatggacaccaactaatgctgactccacgatcctgccaccctgtagcgccagtgtaatcccccaggagaacatctttgacactctgcagactgctagtgttctgtctaaaaaccagacaaggaaatacccttcttttatgagcagaaggaaacaaaaaaaaaaaagaagaccgtttacctagaagaagctatgtcaagaggctgaattatttttatttttaaacaggtggtgagaaattttctgaaagttacccactgaagcccatttctccgttgagtcatcttgtaatttccagctttctccccgctaag

SEQ ID NO: 158718 - DNA, 807 bp, Homo sapiens
atgggtccccagcgagggccctaccctcaagcctggaaccaccagcccaagggggagtgccccccactagatgctgctgcaggccccgcatggagttgtgctcctgctggtgcccagaagcagttgccccggctcctgcacccacatgctccttcccgcgaggggttgagcacagtaggttccatatgttcccctcaagtggatatcggcttaaataatggagacatgagtgattctgttggttctttaaaatatatctgtccctcttccccaaaggagaaaagtttattttcctttctctacactgagatttgcttgcaaggcttagtgggaaaagaagggtctcagcaaatggtagaaggtctgattagttggagaaggttgtattgtgttttgcgaggaggtaaactctattgtttttacagtccagaggaaattgaagctaaagtggaaccagctttggtagtacccattaacaagatgttggagagggaaagagagggcgagagagctgaaagaaatccttcgcaagaaaacaaagagtggcgacggcccggacagttcgcgttggagatggaggggccgagcctgaggggtcctgcgctccgcctggcggggcttcccacccagcaggaaaccagaatccgggcaatggataaggatgccaagaaaagaatccataatttctctgtcatcaatcctgttcctggacaagctataactcagatttttgcagttgacaatagagaagatcttcagaagtggatggaagccttctggcagcatttctttgatcttagtaaatag

SEQ ID NO: 158719 - DNA, 431 bp, Homo sapiens
  misc_feature (1)...(431): n = a,t,c or g
tnnnnnnnnnnnnnnnnnnnnnnnnnnnnnnnnnnnnnnnnnnnnnnnnnnnnnnnnnnnnnnnnnnnnnnnnnnnnnnnnnnnnnnnnnnnnnnnnnnnnnnnnnnnnnnnnnnnnnnnnnnnnnnnnnnngttaccttgaatttcattgagcttcctctaaacagctatttcacattctctgtctgaatggtcatatctctgcattctggcattggtcattggtgccttatttagttcatttggtgaggtcatgttttcctcgatggtcttgatgcttgtggatgtttatttgtgtctggtcattaaagagttaggtttttattatagtctttgcagtctgggtttgtttgtacccatccttcttgggaaaactctccaagcattcaaagggaattgagtgttatcgnacgcgtgggcgnacgcgtggg

SEQ ID NO: 158720 - DNA, 2229 bp, Homo sapiens
atggacaagttttggtggcacgcagcctggggactctgcctcgtgccgctgagcctggcgcagatcgatttgaatataacctgccgctttgcaggtgtattccacgtggagaaaaatggtcgctacagcatctctcggacggaggccgctgacctctgcaaggctttcaatagcaccttgcccacaatggcccagatggagaaagctctgagcatcggatttgagacctgcaggtatgggttcatagaagggcatgtggtgattccccggatccaccccaactccatctgtgcagcaaacaacacaggggtgtacatcctcacatacaacacctcccagtatgacacatattgcttcaatgcttcagctccacctgaagaagattgtacatcagtcacagacctgcccaatgcctttgatggaccaattaccataactattgttaaccgtgatggcacccgctatgtccagaaaggagaatacagaacgaatcctgaagacatctaccccagcaaccctactgatgatgacgtgagcagcggctcctccagtgaaaggagcagcacttcaggaggttacatcttttacaccttttctactgtacaccccatcccagacgaagacagtccctggatcaccgacagcacagacagaatccctgctaccactttgatgagcactagtgctacagcaactgagacagcaaccaagaggcaagaagcctgggattggttttcatggttgtttctaccatcagagtcaaagaatcatcttcacacaacaacacaaatggctggtacgtcttcaaataccatctcagcaggctgggagccaaatgaagaaaatgaagatgaaagagacagacacctcagtttttctggatcaggcattgatgatgatgaagattttatctccagcaccatttcaaccacaccacgggcctttgaccacacaaaacagaaccaggactggacccagtggaacccaagccattcaaatccggaagtgctacttcagacaaccacaaggatgactgatgtagacagaaatggcaccactgcttatgaaggaaactggaacccagaagcacaccctcccctcattcaccatgagcatcatgaggaagaagagaccccacattctacaagcacaatccaggcaactcctagtagtacaacggaagaaacagctacccagaaggaacagtggtttggcaacagatggcatgagggatatcgccaaacacccagagaagactcccattcgacaacagggacagctgcagcctcagctcataccagccatccaatgcaaggaaggacaacaccaagcccagaggacagttcctggactgatttcttcaacccaatctcacaccccatgggacgaggtcatcaagcaggaagaaggatggatatggactccagtcatagtacaacgcttcagcctactgcaaatccaaacacaggtttggtggaaaatttggacaggacaggacctctttcaatgacaacgcagcagagtaattctcagagcttctctacatcacatgaaggcttggaagaagataaagaccatccaacaacttctactctgacatcaagcaataggaatgatgtcacaggtggaagaagagacccaaatcattctgaaggctcaactactttactggaaggttatacctctcattacccacacacgaaggaaagcaggaccttcatcccagtgacctcagctaagactgggtcctttggagttactgcagttactgttggagattccaactctaatgtcaatcgttccttatcaggagaccaagacacattccaccccagtggggggtcccataccactcatggatctgaatcagatggacactcacatgggagtcaagaaggtggagcaaacacaacctctggtcctataaggacaccccaaattccagaatggctgatcatcttggcatccctcttggccttggctttgattcttgcagtttgcattgcagtcaacagtcgaagaaggtgtgggcagaagaaaaagctagtgatcaacagtggcaatggagctgtggaggacagaaagccaagtggactcaacggagaggccagcaagtctcaggaaatggtgcatttggtgaacaaggagtcgtcagaaactccagaccagtttatgacagctgatgagacaaggaacctgcagaatgtggacatgaagattggggtgtaa

SEQ ID NO: 158721 - DNA, 1102 bp, Homo sapiens
tgataccagataacttggctttgcaagctcccatgcaggattcttttgtctgtgtgacataagtattaaaatgtgtcctgcctttataaagaatgtgaattccatattctcacttggtatcagtgagaaatattcccatatttctatttgcaacatagaagataatgcatcatgtccttctggggcatggcaagttctaaatgaattcctggcagagcaatggattctgtgattgactatgtggtggtagttgttgctaagaaggatgctattggtaatccttttctacctatacttcttccattggctcagaatgaagcaaggcatgtgctgctttcttatatgtcatttatgccataaatcccattgttagaaggtaatgcttctaacggattccattcatgcttttgagataaatggcaattgactttcttattgatcacatggaaaagctgttaccctgaaaccctttccctgaagatcacttcttcccctaatgtgcatttggctggaatatggttgtctcagaataacatcatgcactcgggcttttatacttctgccctttagggggactgtggcagcatggcatgggtcaagaagtacttctccttcatcttcctttgatgtcggtaactcatcctttctggcactgcgggagttgttaatgcttttgggtcctccaagttcaccatggctggattgcttaagaagaaaatgagccatggagtgaacccaaagctgctgaaacattctgcgtttatgcaaactttccttgccctctatacaaggaagatgggtttcattgtcttgtctagagaataaagtctttttttaaaataaaatcggtgtatccctgaccaagcgtccattaacactttgacaattgctcaaactgcatggtcacagcagcctcagctcataccagccatccaatgcaaggaaggacaacaccaagcccagaggacagttcctggactgatttcttcaacccaatctcacaccccatgggacgaggtcatcaagcaggaagaaggatggatatggactccagtcatagtacaacgcttcagcctactgcaagtccaaacacagggtttgg

SEQ ID NO: 158722 - DNA, 426 bp, Homo sapiens
agctattccaaaccacaaagatccagaaagtacacaattctcccaccactggtatcttactgactggaagtctggtgacacctaccaatccctgtccagctccagcactgccactggcaccacagtcattgagtgcacccaagttcagggcagctcagagtctcttgcctcaccttccacctccagagccactacaccttcccaactctccattgaagtggaggccagggagatatcatccccgggaaggccccctggactgatgtcaccctccagtggctactccagccagtcggaaacaccaacacccactgtttccatgtccctgaccctgggccacttaccccctccaagcagcagtgtccgggtacgtccagtggtacctgagaggaagtcatcactacccccgacgtcaccaatggagaa

SEQ ID NO: 158723 - DNA, 407 bp, Homo sapiens
  misc_feature (1)...(407): n = a,t,c or g
gataaagagattttttcaaaaagttttctttctcattttattttacttcatatttcaggttccctccctaaagtacatccacgttatgatttagacggggatgctagcatggctaagggtagtatttaatttaattactatgtaaacatctgaatttaatgtatcctatcaatagtggaagcaataacatgtattgtggcttcatgtatgcctatatgacttaggaaattattcacttaaattgataccctttccaagtgattttgggggctttcttttttactttttatcctttcttgaattcattatataagaaaattctctccattgagatagtgcatgtttagataatgttaaggagaacatatttattatatttatatctattcttaactcttagaaattgn

SEQ ID NO: 158724 - DNA, 514 bp, Homo sapiens
  misc_feature (1)...(514): n = a,t,c or g
ntagatcgcctgcggtatcgagtcccgaattnccgccggtacccaattcctcgcgtcgacccacgcgtccgcccacgcgtccgaggacttcttatgaaaaacagggatatctgcttctaccacctgtattcagcattgtactagaggttcttgccagggcaattagtcaagaaactgaaataaaaagtgtccaaatgggaaaggaagaagtaaaactgtctttagtttgtgtgtgtgtatatttatgcatgagaaaatcctgtggaatccaccaaaannnnnnnnnnnnnnnnnnnnnnnnnnnnnnnnnnnnnnnnnnnnnnnnnnnnnnnnnnnnnnnnnnnnnnnnnnnnnnnnnnnnnnnnnnnnnnnnnnnnnnnnnnnnnnnnnnnnnnnnnnnnnnnnnnnnnnnnnnnnnnnnnnnnnnnnnnnnnnnnnnnnnnnnnnnnnnnnnnnnnnnnnnnnnnnnnnnnnnnnnnnnnnnnnnnnnnnnnnnnnnnaagggcattggaat

SEQ ID NO: 158725 - DNA, 779 bp, Homo sapiens
gcggaaccgctccggaatttccgggtcgacgatttcgtggaaaactgagcgtgggcctcagaaagattttaaggcacttttgagccgggcaactgccctcgttccgcgccgggggagcgattaaagtgaagaaacaatggccagcattcacaaatcttcagcagctcgccctgtttcaagaggtggagttgggttaacaagaaaggcttccttctgggatacgacccctatcaggaaatattcgagtggcaactgcaatgccacctgggacagcaagaccaggttctcgtggttgtcccatagggactggtggagttctgtcttctcaaatcaaagttgcccatcgccctgtaacacaacaaggtttgactggaatgaaaactgggacgaaaggtccccagaggcaaattttagacaaatcttactatcttgggcttcttagaagtaaaataagtgaacttacaactgaagttaataaacttcagaagggaatagaaatgtacaatcaagagaattcagtatatttgtcatatgaaaagagggctgagactttagctgttgagataaaagagcttcaaggacaactagcagactacaacatgttggtagataaacttaataccaacactgaaatggaagaagtaatgaatgattacaatatgcttaaagctcaaaatgatcgagaaacacaaagtttggatgtcatatttactgaaagacaagcgaaagaaaaacaaatcagaagtgtcgaagaagaaattgaacaggaaaaacaagcg

SEQ ID NO: 158726 - DNA, 441 bp, Homo sapiens
gcatatgtgaaactctccaaggtactgaacttctatgtggctaatgcagatgactccagcaagactgaactgctttttgctgcgttgaaagccttgaagtacttgtttagattcatcatccaatcccgagtgctctacttgagattttatgggcagagcaaagatggagatgagtttaataattcaattcgccagttatttcttgctttcaatatgctgatggacaggcctctggaggaagccgtcaagatcaagggggcagctttgaagtaccttcctagcataattaatgatgtcaaacttgtatttgatcctgttgagctcagcgtgctcttctgcaaattcattcaaagcattcctgacaaccagctggttcggcagaaacttaactgcatgaccaagatagtagagagcactctttttcgacagtcagagtgcaaa

SEQ ID NO: 158727 - DNA, 700 bp, Homo sapiens
cttcccgggtcgacgatttcgtagacccggtcaccagcaaccatgacggaccagcatgctgaggccaggtcctacctcagcgaacagatgatcgctgagttcaaggctgcctttgacatgtttgatgctgatggtggtggggacatcagcgtcaaggagttgggcacggagatgaggatgctgggccagacaccactccagccatcatcatcaccaccatggacaagttcaacgtcaccaagcctgtggagtacctcatcaaccccatcatcacccagttcttccccaccctgctgctgtggtgcttctcggccctccttcccaccatcgtgtactactcaggcttctttgaagaccactggacacgctctggggagaacaggacaaccatgcacaagtgctacactttgctcatcttcatggtgctgctcctaccctcgctgggactgagcagcctggacctcttcttccgctggctctttgataagaaattcttggctgaggcagctattcggttagagagtgggttcctgcccaacaacggtgccttcttaaagaactacgtcattgcctcaccctttatcggcaacgccatggacctgctgcgcatcccaggcctgctcatgtacatgatccggctctgcctgacgcgctcggccgccgagaggcgcaacgtgaaacggcatcaggcctacgagtt

SEQ ID NO: 158728 - DNA, 765 bp, Homo sapiens
tatttggaacatttgcttttattcccttccagacaaagacccacaaggggttcgcgccctccctggtggggaacccggcaagggcggaagtctccaacaccctagggaacacgcgaatcttggtagaggcggactgtcccactcccttactggcacgccctccaatcaatcttcaaggaactcgttcaaaagtcaaatgcggccgttcgtttgttcttgtcgccggtcttttcaatcagaagaattcgaatcttccttcgtcggtcaaggtgcttccccggaaggcccctgaaaaatcttaagccaagccttcttccgggttcgaatgtagccgttctgcattcctgtccaaagaatgcggaaagcaactcgggccaagctcctcctcggctctttccctttcggggtccttctttcatcttggcgcaccatcatgaccaagaactcctcggaagtcggatggtgcccgctgccgtcctcatccaccttcctcgatgattggcgtccagctcctccttggtgggtgtctggcccagcatcctcatcaccgtgcccaactccttgacgctgatgtccccaccaccatcagcatcaaacatgtcaaagggcagccttgaactcagcgatcatctcttcgctgaggtaggacgtggcactcagcctgctggtccgtcatggttcctggtgcccgggactcctctgttgcaggtcgcatccttatgcactccaccacccaaagatgacctggcctgctctagccaccgg

SEQ ID NO: 158729 - DNA, 257 bp, Homo sapiens
attataacactttttaaggagctgttatagttgaaataaactaatttgaaatcatgtaaatttttgttgtttttgctgttttagtgacagaggagagataaaactggggataaacgtaattaaacgtattcatgtaattaggaaaatcttttttccttttagaactgaagctagtttagcctcacgcagagaacaaaagagagagcagtatcgtcaggtaaaagcacatgttcagaaggaagaccgtagagtgcagg

SEQ ID NO: 158730 - DNA, 179 bp, Homo sapiens
  misc_feature (1)...(179): n = a,t,c or g
cggccgcgtcgacctctaannnnnnnnnnnnnnnnnnnnnnnnnntggaagaggatgaactgtttcaagttcaggagaaaggtgaactctgaaatgagtctacttttaatgttttccagcagcaccagatgaagacagtacaaccaatataacaaaaaagcagaagtggactgtagaag

SEQ ID NO: 158731 - DNA, 571 bp, Homo sapiens
  misc_feature (1)...(571): n = a,t,c or g
ctaatgaagancccttgcgnannnnngctannggccanacctttcgtannancngcncgacccacgcgnncgngagagccgtcccttcgtccggccctggagcattgcgtttgtcgccggtgtcgcaatgcgaggatggcgccgcgggtgtagcggctctctgcgcaggccgagtgggcttggtgaggtgactcgcggtcgcgggtgactcgccggcaggacactgcctggaacgcctggagcgcctcccactgcagacgtctgtccgcctccagccgctctcctctgacgggtcctgcctcagttggcggaatggcggccacgggagccaatgcagagaaagctgaaagtcacaatgattgccccgtcagacttttaaatccaaacatagcaaaaatgaaagaagatattctctatcatttcaatctcaccactagcagacacaatttcccagccttgtttggagatgtgaagtttgtgtgtgttggtggaagcccctcccggatgaaagccttcatcaggtctggagcccggcactgtggtcataacagagcaggcagtggatacctgg

SEQ ID NO: 158732 - DNA, 509 bp, Homo sapiens
ttttgtcgaccttttaatttcaaacatagcaaaaatgaaagaagatattctctatcatttcaatctcaccactagcagacacaatttcccagccttgtttggagatgtgaaggtaagaggccaggtgttgacaccttggaatttggcttaagatcaacctccccctatattatacaggtatgaccaacccacaaatgcttgagagaccacagctgacaggtttatgaagacataatgtttaccacacttttgcaagattttaactttcaagtatgcgaactatcaagtaaaactatcctaagtagtgccaaattgttccctaattcatcttttgcaaatatagtgcagtcatgcattgtttaactctggaaatacggtccgagaaatgcagccttaggtattttatcattgtgtggacaacatagagcgtatccacactaacctaggtggtagagcctactacttgcctgggccatattgctctaagctacaaacccttttagcatgtg

SEQ ID NO: 158733 - DNA, 857 bp, Homo sapiens
  misc_feature (1)...(857): n = a,t,c or g
attcgagtgctccggagaacagacccgcgccccgccgtccgcgagcctcccgagagccgtcccttcgtccggccctggagcattgcgtttgtcgccggtgtcgcagtgcgaggatggcgccgcgggtgtagcggctctctgcgcaggccgagtgggcccagagaagcgaggaactccccagatcgccgacacgtctcgtctcctgtcccaattcagggcttggtgaggtgactcgcggtcgcgggtgactcgccggcaggacactgcctggaacgcctggagcgcctcccactgcagacgtctgtccgcctccagccgctctcctctgacgggtcctgcctcagttggcggaatggcggccacgggagccaatgcagagaaagctgaaagtcacaatgattgccccgtcagacttttaaatccaaacatagcaaaaatgaaagaagatattctctatcatttcaatctcaccactagcagacacaatttccccaggccntgtttggagatgttgaagtttgtgtgtggttggtggaagcccctcccggaatgaaaagccttcatcagggtgccgtttgggtgcaagagctgggccttgactgcccaggtagagactatcccaacatctgtgcgggaactgaccgctatgccatgtataaagtaggaccggtgctgtctgtcagtcatggtatgggcattccttctatctcaatcatgttgcatgagctcataaagctgctgtactatgcccggtgctccaacgtcactatcatccgcattggcacttctggtgggataggtctggagcccggcactgtggtcataacagagcaggcagtggatacctgcttcaaggc

SEQ ID NO: 158734 - DNA, 357 bp, Homo sapiens
  misc_feature (1)...(357): n = a,t,c or g
catggcattcctttggcttgtgtgctgctttgcccttgtgggcgccacctttggctgtggggtccctgccatccaacccgggctgaccggtctgtccaggatcgtcaacggagaggatgctatccctggctcctggccctggcaggagtccctgcaggacagaactggcttccatttctgcgggggctccctcatcagcgaaaactgggtggtcactgctgcccactgcggggtcaagacaaccgatgtggtggtagctggagagtttgatcaaggctccgatgaaaagaatgtccaggtcctgaaaatcgttcaggtttttaagaaccccaagttcaactccttcaccgtgcgtan

SEQ ID NO: 158735 - DNA, 744 bp, Homo sapiens
actcccaaaagagcgcccaagaagaaaatggccataagtggagtccctgtgctaggatttttcatcatagctgtgctgatgagcgctcaggaatcatgggctatcaaagaagaacatgtgatcatccaggccgagttctatctgaatcctgaccaatcaggcgagtttatgtttgactttgatggtgatgagattttccatgtggatatggcaaagaaggagacggtctggcggcttgaagaatttggacgatttgccagctttgaggctcaaggtgcattggccaacatagctgtggacaaagccaacttggaaatcatgacaaagcgctccaactatactccgatcaccaatgacaagttcaccccaccagtggtcaatgtcacgtggcttcgaaatggaaaacctgtcaccacaggagtgtcagagacagtcttcctgcccagggaagaccaccttttccgcaagttccactatctccccttcctgccctcaactgaggacgtttacgactgcagggtggagcactggggcttggatgagcctcttctcaagcactgggagtttgatgctccaagccctctcccagagactacagagaacgtggtgtgtgccctgggcctgactgtgggtctggtgggcatcattattgggaccatcttcatcatcaagggattgcgcaaaagcaatgcagcagaacgcagggggcctctgtaaggcacatggaggtgatggtgtttctta

SEQ ID NO: 158736 - DNA, 382 bp, Homo sapiens
cttggatgagcctcttctcaagcactggggtatggaccaacactcaatctcctttatttcaaggtttcctcctatgatgcttgtgtgaaacttggggttctaactgtttcataatatctgctacaattaatataactgtcttctcctactatccagcttccgcctttttttaatctgtaattctctcaatacatcattctgtcttcctcttctttaatctatgaataacttttctctttattaagaaccctacatttgattctgagtgttacttcttcccacactcattaccatgtactctgccttatttccccccagagtttgatgctccaagccctctcccagagactacagagaacgtggtgtgtgccctgggcctgat

SEQ ID NO: 158737 - DNA, 1302 bp, Homo sapiens
  misc_feature (1)...(1302): n = a,t,c or g
attcttgtctgttctgcctcactcccgagctctactgactcccaaaagagcgcccaagaagaaaatggccataagtggagtccctgtgctaggatttttcatcatagctgtgctgatgagcgctcaggaatcatgggctatcaaagaagaacatgtgatcatccaggccgagttctatctgaatcctgaccaatcaggcgagtttatgtttgactttgatggtgatgagattttccatgtggatatggcaaagaaggagacggtctggcggcttgaagaatttggacgatttgccagctttgaggctcaaggtgcattggccaacatagctgtggacaaagccaacctggaaatcatgacaaagcgctccaactatactccgatcaccaatgtacctccagaggtaactgtgctcacgaacagccctgtggaactgagagagcccaacgtcctcatctgtttcatcgacaagttcaccccaccagtggtcaatgtcacgtggcttcgaaatggaaaacctgtcaccacagggggtttcagagacatgttttcctgcccaggggaagaccactttttccggcaagttccactatctccccttccctgccctcaactgaggacgtttaacgactgcaggggtggagcactggggcttggatgagcctcttctcaagcactgggagtttgatgctccaagccctctccgcagagactacagagaacgtggtgtgtgccctgggccttgactgtgggtctggtgggcatcattattgggaccatctttcatcattcaagggagttgcgcaaaagcaattgcaggcagaaacgcaaggggggcctctgtaaggcacaatggaggtgatggatgttttcttagagagaggatcacttgaagaaacttctgctttaatggctttacaaaagctgggcaatatttacaattccttgacctcaagtgaaagcaagtcatcttcaagcgttttccagcccctataaggccacccccaagtgtggttatgcctccctttcctttctccggggagaatntggctccccgtactctaacaatcttagctgggcttcccctgtctaattgcctttttcctgtatctaatttcctctaatttccctatcaatttattatcaccatgcaatgcctctggaataaaaacatacaggagtctgtctctgctatggaatgccccatggggcatctcttgtggacttattgtttaaggtttccctcaaactgtgatttttctgaacacaataaactattttgatgatcttgggtggaaaaaa

SEQ ID NO: 158738 - DNA, 223 bp, Homo sapiens
tattaataattctctatttattaaaaagggtcctacagctttacagccacagcaccggacacggccctggacagcgacggcgagcccggccaggggccgctttgcaacttcaatgccaagctcacgtctggctgcgaccgtggcaggctgtggcatccccgacagcggccggccggcgcccactcgagattcacagaacatggcaagcccgcctgactggcat

SEQ ID NO: 158739 - DNA, 3252 bp, Homo sapiens
atggagctatccgtcacccttgtcagtcgggcacctcgtcctgggctcccagttttccgacagctcaacacggccatcgccgtatcccagatgtcctcaggccagtgccgcctggcccccctcatccaggtcatccaggactgcagccacctctaccactacacggtcaagctcctgttcaagctacactcttgtctccctgcggacaccctgcaaggccacagggaccggttccacgagcagtttcacagcctcaggaacttcttccgcagagcctccgacatgctgtacttcaagcggctcatccagatcccccggctgcccgagggaccccctaacttcctgcgggcctcagccctggctgagcacatcaagccggtggtggtgatccccgaggaggccccggaagatgaggagccggagaatctcattgagatcagcacagggccccccgcgggggagccagtggtggtggctgacctcttcgatcagacgtttggaccccccaatgggtctgtgaaggacgacagggacctccagattgagagcttgaagagagaggtggaaatgctccgctctgaactggagaagatcaagctggaggcccagcggtacatcgcgcagctgaagagccaggtgaatgcactggagggtgagctggaggagcagcggaagcagaagcagaaggccctggtggataatgagcagctccgccacgagctggcccagctgagggctgcccagctggagggcgagcggagccagggcctgcgtgaggaggctgagaggaaggccagtgccacggaggcgcgctacaacaagctgaaggaaaagcacagtgagctcgtccatgtgcacgcggagctgctcagaaagaacgcggacacagccaagcagctgacggtgacgcagcaaagccaggaggaggtggcgcgggtgaaggagcagctggccttccaggtggagcaggtgaagcgggagtcggagttgaagctagaggagaagagcgaccagctggagaagctcaagagggagctggaggccaaggccggagagctggcccgcgcgcaggaggccctgagccacacagagcagagcaagtcggagctgagctcacggctggacacgctgagtgcggagaaggatgctctgagtggagctgtgcggcagcgggaggcagacctgctggcggcgcagagcctggatgatttctcgcccacgagcaagctccagcgtttgctggcggaatctcgtcagatggtgacggacctggagctgagcacactgctgcccatcagccatgagaatctcactggcagtgccacaaatataaggaaatgctgcctgcagagctgcagccacggtctcatcgccaaaccttctgcaacccttattcagcatgtcctgctgttatttatagctgaaggaaccttgcgagtggaggggtcctacagctttacagccacagcaccggacacggccctggacagcgacggcgagcccggccaggggccgctttgcaacttcaatgccaagctcacgtctggctgcgaccgtggcaggctgtggcatccccgacagcggccggtgcggagattcagtgagcaacaacgcagccacaggtgtggcccagccacggcgctcttccaggccgcacgcgcccacccgccctcaccagggctgcagtggccggccatcagcatcagcaaagccatcaacacccaggaggcccccgtgaaggagaagcacgcccggcgtatccttggccggctcttggacccaggagttgggcatcattctgggcacacaccacgagaagtgggcttcaccttctggtctacgccattgggctgccgctgcccagcagtccattctcagctggagttctgtcacgtcctcaaaggtcctcgagagtgcacccatggctgcctgatgccccagcagcacgtatgttgcttccgcaactccccagccgcaatggttcagcctcagcgtcttctccactccaggacacgcactgtaggcacaggcctgctcagcccagccaaccttcccaatcctcagaggatccccaaaagaatgccccctgcccctcctggggaccctgcacctccagggataggtaatggggcctgccccctccaaagcatggcaggccccagcgggtacatccaggatacaggttcagccatctcttccatccagcagacgagcaccccacagtgctccagagagaaccaggccaaggccctctgcccaccagggacatctctaactcctgaggtcttgcagtgcatccagattgcaggccccccagggctctcaggccttactgtgtgtgtgctcaaaatgcagacctccagtcctgattcttcagcagcaggtctgggggagcccaggaacctgcgccctgccacaggctctctaaccaccgaggtgcccgggctgtggtcttgccacatttcccaactcgagtctcaggagcaggagctgcggcagaggctactggacgagcagttctcagtgttccggggcgctgctgccgaggccgcagtgatcctgcaggatgccgtgagcaagctggacgaccccctgcacctgcgctgtaccagctccccagactacctggtgagcagcgcccaggaggccttggatgccgtgagcaccctggaggagggccacgcccagtacctgacctccttggcagacgcctccgccctggtggcagctctgacccgcttctcccacctggctgcggataccatcatcaatggcggtgccacctcgcacctggctcccaccgaccctgccgaccgcctcatagacacctgcagggagtgcggggcccgggctctggagctcatggggcagctgcaggaccagcaggctctgcggcacatgcaggccagcctggtgcggacacccctgcagggcatccttcagctgggccaggctgccgtggacggggggggacggaggctacccctgtctgactcccatcctcaccaggaactgaaacccaagagcctagatgtgcggcaggaggagctgggggccgtggtcgacaaggagatggcgccacatccgcagccattgaagatgctgtgcggaggattgaggatcctcaactcctgcacagacctgatgaaggtgaggggctgtgacccgggggggtctgcacctggagggccaccagtcattgctgtcttggtctcggcaggctatccggctcctggtgacgacatccactag
